United States Patent Application Publication US 2021/0170017 A1 - sequence listing, part 7

SEQ ID NO: 8206 - RNA, 1926 nt, Artificial Sequence
  mRNA product Design h-1 comprising derived and/or modified sequence from HRSV(A2)__F-del_DSCav1_mut8 (opt1)
gggagacccgugacccggaaguuguacggcuacgcgacuuucccucccacaaacccucgcgcccuuccuuuccuacuugggcccggcagaaagcuuaccauggagcugcucauccugaaggccaacgccaucaccaccauccugacggcggugaccuucugcuucgccagcggccagaacaucaccgaggaguucuaccaguccacgugcagcgccgucuccaagggguaccucggcgcccugcggaccggcugguacaccuccgugaucaccaucgagcugagcaacaucaaggagaucaagugcaacgggaccgacgccaaggugaagcucaucaagcaggagcuggacaaguacaagaacgcggucacggaccugcagcuccugaugcaguccaccccggcaaccggcuccggcuccgccaucgcgagcggcgucgccgugugcaaggugcugcaccucgagggggaggucaacaagaucaagagcgcccugcuguccaccaacaaggccguggugagccucuccggcugcggcgucagcgugcugaccuucaaggugcuggaccucaagaacuacaucgacaagcagcugcugcccauccugaacaagcagagcugcuccauccccaacaucgagacggugaucgaguuccagcagaagaacaaccggcuccuggagaucacccgcgaguucagcgugaacgccggggucaccacccccguguccacguacaugcugaccaacagcgagcuccugucccugaucaacgacaugccgaucaccaacgaccagaagaagcucaugagcaacaacgugcagaucguccggcagcaguccuacagcaucaugugcaucaucaaggaggaggugcuggcguacgugguccagcugccccucuacggcgugaucgacacccccugcuggaagcugcacacgagcccccugugcaccaccaacaccaaggagggguccaacaucugccucacgcgcaccgaccggggcugguacugcgacaacgccggcagcgucuccuucuucccgcaggccgagaccugcaaggugcagagcaaccgcguguucugcgacaccaugaacucccugacgcugcccagcgagguaaaccucugcaacgucgacaucuucaaccccaaguacgacugcaagaucaugaccuccaagaccgacgugagcuccagcgugaucaccucccugggggccaucgucagcugcuacggcaagacgaagugcaccgccagcaacaagugccgggggaucaucaagaccuucuccaacggcugcgacuacgugagcaacaagggcguggacaccguguccgucgggaacacccuguacuacgugaacaagcaggagggccagagccucuacgugaagggggagcccaucaucaacuucuacgacccgcuggucuuccccuccgacgaguucgacgcgagcaucucccaggugaacgagaagaucaaccagagccuggccuucauccgcaaguccgacgagcugcuccacaacgugaacgccggcaagagcacgaccaacaucaugaucaccaccaucaucaucgucaucaucgugauccugcugucccucaucgccguggggcugcugcucuacugcaaggcccggugaggacuaguacuggcugcaucucccuuuccucuguccuccauccuucucccaggauggugaagggggaccugguacccagugauccccaccccaggauccuaaaucaugacuuaccugcuaauaaaaacucauuggaaaagugagaagaucuaaaaaaaaaaaaaaaaaaaaaaaaaaaaaaaaaaaaaaaaaaaaaaaaaaaaaaaaaaaaaaaaugcaucccccccccccccccccccccccccccccccaaaggcucuuuucagagccaccagaauu

SEQ ID NO: 8207 - RNA, 1926 nt, Artificial Sequence
  mRNA product Design h-1 comprising derived and/or modified sequence from HRSV(A2)__F-del_DSCav1_mut8 (opt1)
gggagacccgugacccggaaguuguacggcuacgcgacuuucccucccacaaacccucgcgcccuuccuuuccuacuugggcccggcagaaagcuuaccauggagcugcucauccugaaggccaacgccaucaccaccauccugacggcggugaccuucugcuucgccagcggccagaacaucaccgaggaguucuaccaguccacgugcagcgccgucuccaagggguaccucggcgcccugcgcaccgggugguacaccagcgugaucaccaucgagcuguccaacaucaaggagaucaagugcaacggcaccgacgccaaggugaagcucaucaagcaggagcuggacaaguacaagaacgcggucacggaccugcagcuccugaugcagagcacccccgccaccggguccggcagcgccaucgccuccggcguggcggugugcaagguccugcaccucgagggggaggugaacaagaucaagagcgcccugcuguccaccaacaaggccguggucagccucuccggcugcggggugagcgugcugacguucaagguccuggaccucaagaacuacaucgacaagcagcugcugccgauccucaacaagcaguccugcagcauccccaacaucgagaccgugaucgaguuccagcagaagaacaaccggcugcuggagaucacccgcgaguucuccgugaacgccggcgucaccacgcccgugagcaccuacaugcucaccaacuccgagcugcugagccucaucaacgacaugcccaucaccaacgaccagaagaagcugaugagcaacaacgugcagaucguccggcagcaguccuacagcaucaugugcaucaucaaggaggaggugcuggccuacgugguccagcucccgcuguacggggugaucgacacgcccugcuggaagcugcacaccagcccccucugcaccaccaacacgaaggagggcuccaacaucugccugacccgcaccgaccggggcugguacugcgacaacgcgggguccgugagcuucuucccccaggccgagaccugcaagguccaguccaaccgcguguucugcgacacgaugaacagccugacccucccguccgaggucaaccugugcaacguggacaucuucaaccccaaguacgacugcaagaucaugaccagcaagaccgacguguccagcuccgucaucacgagccugggcgccaucguguccugcuacgggaagaccaagugcaccgccagcaacaagugccggggcaucaucaagaccuucuccaacggcugcgacuacgugagcaacaagggggucgacacgguguccgugggcaacacccucuacuacgucaacaagcaggaggggcagagccuguacgugaagggcgagcccaucaucaacuucuacgacccccugguguucccgagcgacgaguucgacgccuccaucagccaggucaacgagaagaucaaccagucccucgcguucauccgcaagagcgacgagcugcugcacaacgugaacgccgggaaguccaccaccaacaucaugaucaccacgaucaucaucgugaucaucgucauccuccugagccugaucgccgugggccuccugcuguacugcaaggcccggugaggacuaguacuggcugcaucucccuuuccucuguccuccauccuucucccaggauggugaagggggaccugguacccagugauccccaccccaggauccuaaaucaugacuuaccugcuaauaaaaacucauuggaaaagugagaagaucuaaaaaaaaaaaaaaaaaaaaaaaaaaaaaaaaaaaaaaaaaaaaaaaaaaaaaaaaaaaaaaaaugcaucccccccccccccccccccccccccccccccaaaggcucuuuucagagccaccagaauu

SEQ ID NO: 8208 - RNA, 1926 nt, Artificial Sequence
  mRNA product Design h-1 comprising derived and/or modified sequence from HRSV(A2)__F-del_DSCav1_mut8 (opt2)
gggagacccgugacccggaaguuguacggcuacgcgacuuucccucccacaaacccucgcgcccuuccuuuccuacuugggcccggcagaaagcuuaccauggagcuccucauccucaaggccaacgccaucaccaccauccucaccgccgucaccuucugcuucgccuccggccagaacaucaccgaggaguucuaccaguccaccugcuccgccgucuccaagggcuaccucggcgcccuccgcaccggcugguacaccuccgucaucaccaucgagcucuccaacaucaaggagaucaagugcaacggcaccgacgccaaggucaagcucaucaagcaggagcucgacaaguacaagaacgccgucaccgaccuccagcuccucaugcaguccacccccgccaccggcuccggcuccgccaucgccuccggcgucgccgucugcaagguccuccaccucgagggcgaggucaacaagaucaaguccgcccuccucuccaccaacaaggccgucgucucccucuccggcugcggcgucuccguccucaccuucaagguccucgaccucaagaacuacaucgacaagcagcuccuccccauccucaacaagcaguccugcuccauccccaacaucgagaccgucaucgaguuccagcagaagaacaaccgccuccucgagaucacccgcgaguucuccgucaacgccggcgucaccacccccgucuccaccuacaugcucaccaacuccgagcuccucucccucaucaacgacaugcccaucaccaacgaccagaagaagcucauguccaacaacguccagaucguccgccagcaguccuacuccaucaugugcaucaucaaggaggagguccucgccuacgucguccagcucccccucuacggcgucaucgacacccccugcuggaagcuccacaccuccccccucugcaccaccaacaccaaggagggcuccaacaucugccucacccgcaccgaccgcggcugguacugcgacaacgccggcuccgucuccuucuucccccaggccgagaccugcaagguccaguccaaccgcgucuucugcgacaccaugaacucccucacccuccccuccgaggucaaccucugcaacgucgacaucuucaaccccaaguacgacugcaagaucaugaccuccaagaccgacgucuccuccuccgucaucaccucccucggcgccaucgucuccugcuacggcaagaccaagugcaccgccuccaacaagugccgcggcaucaucaagaccuucuccaacggcugcgacuacgucuccaacaagggcgucgacaccgucuccgucggcaacacccucuacuacgucaacaagcaggagggccagucccucuacgucaagggcgagcccaucaucaacuucuacgacccccucgucuuccccuccgacgaguucgacgccuccaucucccaggucaacgagaagaucaaccagucccucgccuucauccgcaaguccgacgagcuccuccacaacgucaacgccggcaaguccaccaccaacaucaugaucaccaccaucaucaucgucaucaucgucauccuccucucccucaucgccgucggccuccuccucuacugcaaggcccgcugaggacuaguacuggcugcaucucccuuuccucuguccuccauccuucucccaggauggugaagggggaccugguacccagugauccccaccccaggauccuaaaucaugacuuaccugcuaauaaaaacucauuggaaaagugagaagaucuaaaaaaaaaaaaaaaaaaaaaaaaaaaaaaaaaaaaaaaaaaaaaaaaaaaaaaaaaaaaaaaaugcaucccccccccccccccccccccccccccccccaaaggcucuuuucagagccaccagaauu

SEQ ID NO: 8209 - RNA, 1926 nt, Artificial Sequence
  mRNA product Design h-1 comprising derived and/or modified sequence from HRSV(A2)__F-del_DSCav1_mut8 (opt3)
gggagacccgugacccggaaguuguacggcuacgcgacuuucccucccacaaacccucgcgcccuuccuuuccuacuugggcccggcagaaagcuuaccauggagcugcucauccuuaaggccaacgcuauuaccacaauacugacugcagugacguucugcuuugccagcggccagaauaucaccgaagaguucuaccaauccacauguucugcggucucaaaaggguauuugggagcuuuaagaacugguugguacaccaguguuauuacaaucgaacugagcaacauuaaggagaucaaaugcaauggcaccgacgccaaggugaaacuaauaaagcaggaacucgauaaguauaaaaacgcaguaacugaccugcagcuucugaugcaguccacacccgccaccgggucuggaucggcuaucgcaucaggcguggccgucuguaagguguugcaccucgagggugagguuaauaaaauuaagagcgcucugcugaguacgaacaaagccguggucucccucucugggugcggagugagcguauuaacuuuuaagguucuggaucuuaagaauuacaucgacaaacaauugcugccuauucuaaacaagcaguccuguucaaucccaaauauagaaaccgugauugaguuccagcagaaaaacaauaggcuccuggaaaucacacgggaguuuagugucaacgcgggcgugacuaccccggugagcacauauaugcuuaccaauucugagcuguugucccucauuaacgauaugcccaucacgaaugaccaaaagaaacugaugucaaacaacguccagaucguucgccagcagagcuacaguauuaugugcauaaucaaggaagagguguuagcauauguagugcaacugccucucuacggcgucauugauacuccauguuggaaacuucauacaucuccccugugcaccacuaauacaaaggaaggguccaacaucuguuugacccgaacggaccguggaugguacugcgauaaugccgguagcgugucguucuuuccucaggcugagaccuguaagguucagucuaacagaguguucugcgacacaaugaacucccuaacucugccaucagaagucaaucucugcaauguggauauauuuaaccccaaauaugacuguaagauuaugaccaguaaaacagauguaagcuccucuguuaucacuagccugggcgccaucgugucaugcuacgggaagaccaaauguacagcaaguaauaagugcaggggaauuaucaagaccuucuccaacggcugugacuaugucagcaauaaagguguggacacugucucuguggggaacacgcuuuacuauguuaauaagcaagagggacagucacuguacgugaaaggcgagccuauuauaaacuuuuaugauccauugguauucccgagugacgaauuugaugcuagcaucucccaggucaaugagaagauuaaccagucucucgccuucauccggaaaucggacgaacuguuacacaacgugaaugcgggcaagagcacaaccaacaucaugauuacuaccauaaucauuguuaucauugugauccugcuaucccucauagccgucgggcugcuuuuguacugcaaggcacgcugaggacuaguacuggcugcaucucccuuuccucuguccuccauccuucucccaggauggugaagggggaccugguacccagugauccccaccccaggauccuaaaucaugacuuaccugcuaauaaaaacucauuggaaaagugagaagaucuaaaaaaaaaaaaaaaaaaaaaaaaaaaaaaaaaaaaaaaaaaaaaaaaaaaaaaaaaaaaaaaaugcaucccccccccccccccccccccccccccccccaaaggcucuuuucagagccaccagaauu

SEQ ID NO: 8210 - RNA, 1926 nt, Artificial Sequence
  mRNA product Design h-1 comprising derived and/or modified sequence from HRSV(A2)__F-del_DSCav1_mut8 (opt4)
gggagacccgugacccggaaguuguacggcuacgcgacuuucccucccacaaacccucgcgcccuuccuuuccuacuugggcccggcagaaagcuuaccauggagcugcugauccugaaggccaacgccaucaccaccauccugaccgccgugaccuucugcuucgccagcggccagaacaucaccgaggaguucuaccagagcaccugcagcgccgugagcaagggcuaccugggcgcccugagaaccggcugguacaccagcgugaucaccaucgagcugagcaacaucaaggagaucaagugcaacggcaccgacgccaaggugaagcugaucaagcaggagcuggacaaguacaagaacgccgugaccgaccugcagcugcugaugcagagcacccccgccaccggcagcggcagcgccaucgccagcggcguggccgugugcaaggugcugcaccuggagggcgaggugaacaagaucaagagcgcccugcugagcaccaacaaggccguggugagccugagcggcugcggcgugagcgugcugaccuucaaggugcuggaccugaagaacuacaucgacaagcagcugcugcccauccugaacaagcagagcugcagcauccccaacaucgagaccgugaucgaguuccagcagaagaacaacagacugcuggagaucaccagagaguucagcgugaacgccggcgugaccacccccgugagcaccuacaugcugaccaacagcgagcugcugagccugaucaacgacaugcccaucaccaacgaccagaagaagcugaugagcaacaacgugcagaucgugagacagcagagcuacagcaucaugugcaucaucaaggaggaggugcuggccuacguggugcagcugccccuguacggcgugaucgacacccccugcuggaagcugcacaccagcccccugugcaccaccaacaccaaggagggcagcaacaucugccugaccagaaccgacagaggcugguacugcgacaacgccggcagcgugagcuucuucccccaggccgagaccugcaaggugcagagcaacagaguguucugcgacaccaugaacagccugacccugcccagcgaggugaaccugugcaacguggacaucuucaaccccaaguacgacugcaagaucaugaccagcaagaccgacgugagcagcagcgugaucaccagccugggcgccaucgugagcugcuacggcaagaccaagugcaccgccagcaacaagugcagaggcaucaucaagaccuucagcaacggcugcgacuacgugagcaacaagggcguggacaccgugagcgugggcaacacccuguacuacgugaacaagcaggagggccagagccuguacgugaagggcgagcccaucaucaacuucuacgacccccugguguuccccagcgacgaguucgacgccagcaucagccaggugaacgagaagaucaaccagagccuggccuucaucagaaagagcgacgagcugcugcacaacgugaacgccggcaagagcaccaccaacaucaugaucaccaccaucaucaucgugaucaucgugauccugcugagccugaucgccgugggccugcugcuguacugcaaggccagaugaggacuaguacuggcugcaucucccuuuccucuguccuccauccuucucccaggauggugaagggggaccugguacccagugauccccaccccaggauccuaaaucaugacuuaccugcuaauaaaaacucauuggaaaagugagaagaucuaaaaaaaaaaaaaaaaaaaaaaaaaaaaaaaaaaaaaaaaaaaaaaaaaaaaaaaaaaaaaaaaugcaucccccccccccccccccccccccccccccccaaaggcucuuuucagagccaccagaauu

SEQ ID NO: 8211 - RNA, 1926 nt, Artificial Sequence
  mRNA product Design h-1 comprising derived and/or modified sequence from HRSV(A2)__F-del_DSCav1_mut8 (opt5)
gggagacccgugacccggaaguuguacggcuacgcgacuuucccucccacaaacccucgcgcccuuccuuuccuacuugggcccggcagaaagcuuaccauggagcugcucauccugaaggccaacgcuauuaccacaauccuuacggccgugaccuucugcuuugcgagcggccagaauauuacagaagaguucuaccaauccaccuguucugcugucagcaaaggguaucugggagcccucagaacaggcugguacaccuccguuaucacaauugaacugucuaacaucaaggagaucaaaugcaaugggaccgacgccaaggugaaacuuauuaagcaggaacuggauaaguauaaaaacgcugugacggaccuccagcugcugaugcagagcacccccgccacaggauccggcucugcuaucgccagcggggucgcgguguguaagguucuccaccuggagggagaggugaauaaaauuaaguccgcccuucugagcaccaacaaagcugucgugucucucuccggcugcggcguuagcgugcugacauuuaagguccuugaucugaagaauuacaucgacaaacaacuccugccuauucugaacaagcagucuuguuccaucccgaauauugaaaccgugaucgaguuccagcagaaaaacaaucggcuccuggaaaucacgcgcgaguuuagcgugaacgccggggucacaacccccguuucuacauauaugcuuaccaauuccgagcugcucagccugauuaacgauaugccuaucaccaaugaccaaaagaaacuuauguccaacaacgugcagauugugagacagcagucuuacagcaucaugugcauuaucaaggaagagguccuggcuuaugugguucaacucccccuguacggagugaucgauacaccuuguuggaaacugcauacgagcccccucugcaccacaaauaccaaggaaggcagcaacauuugucugacacggaccgaccgcgggugguacugcgauaaugccggaucugucuccuucuuuccucaggcggagacguguaaggugcagagcaacagaguuuucugcgacacaaugaacucucuuacccugccgagcgaagugaaucucugcaaugucgauaucuuuaaccccaaauaugacuguaagauuaugaccuccaaaacagaugugucuagcuccgucaucaccagccugggcgccauugugucuugcuacgggaagacaaaauguacggcuuccaauaagugccggggaaucaucaagaccuucagcaacggcugugacuauguuucuaauaaaggcguggacacagucuccguggggaacacccuuuacuauguuaauaagcaagagggacagagccuguacgugaaaggcgagccuauuaucaacuuuuaugauccccucgucuucccuuccgacgaauuugaugccucuauuagccaggugaaugagaagaucaaccagucccuggcuuucauucgcaaaucugacgaacugcuccacaacgugaaugccgggaaguccacaaccaacaucaugauuacgaccaucaucauuguuaucauugucauccugcuuucccugauugccgugggacuccugcuguacugcaaggcuagaugaggacuaguacuggcugcaucucccuuuccucuguccuccauccuucucccaggauggugaagggggaccugguacccagugauccccaccccaggauccuaaaucaugacuuaccugcuaauaaaaacucauuggaaaagugagaagaucuaaaaaaaaaaaaaaaaaaaaaaaaaaaaaaaaaaaaaaaaaaaaaaaaaaaaaaaaaaaaaaaaugcaucccccccccccccccccccccccccccccccaaaggcucuuuucagagccaccagaauu

SEQ ID NO: 8212 - RNA, 1926 nt, Artificial Sequence
  mRNA product Design h-1 comprising derived and/or modified sequence from HRSV(A2)__F-del_DSCav1_mut8 (opt6)
gggagacccgugacccggaaguuguacggcuacgcgacuuucccucccacaaacccucgcgcccuuccuuuccuacuugggcccggcagaaagcuuaccauggaacuacucauauugaaagccaacgcaaucacaacaauacuaaccgccguaacauuuugcuucgcgucaggccaaaauauaacagaagaauuuuaccaaucaacaugcuccgccguaucaaaaggauaccuaggugcauuacgaaccgguugguacacaucaguaaucacaauagaacuuuccaacauuaaagaaauaaaaugcaauggcacagacgcaaaagucaaacuaauaaaacaagaacuagacaaauauaaaaacgccgucacagacuuacaacuauuaaugcaaagcacaccagcaacaggauccggaucagcaauagcaucaggaguagccgucuguaaaguacuacaccuagaaggcgaaguuaauaaaauuaaaucagcuuuauuaucaaccaacaaagcaguaguaucacuauccggaugcggagucuccguccuaacauucaaaguacuagaccucaagaauuacauagauaaacaacuacuaccaauacucaacaaacaaucauguucaauaccaaacaucgaaaccgucauagaauuucaacaaaaaaauaauagacucuuagaaauaacacgagaauuuagcguaaacgcaggagucacaaccccugucucaacauacaugcuaaccaauuccgaauuauuaucacucauaaaugacaugccaauaacuaaugaccaaaaaaaacuuaugucaaacaacguacaaauaguaagacaacaaucauauucaauaaugugcauaaucaaagaagaaguuuuagcauauguaguacaacuaccacuauauggcgucauagacacaccaugcuggaaauuacacacaucaccucuaugcacaacaaacacaaaagaaggaagcaacauuugccuaaccagaaccgauagaggaugguacugcgauaacgcaggcucaguaucauucuucccucaagccgaaacuugcaaaguccaaucaaauagagucuucugcgauacaaugaacuccuuaacuuuaccaucagaaguaaaucuaugcaacguagauaucuuuaauccaaaauacgauugcaaaaucaugacaucaaaaacagauguaucaucuaguguaauuaccucccuaggagcaauaguaagcugcuacggaaaaacaaaaugcaccgccucuaacaaaugucguggaauaauaaaaacauucucaaacggaugcgauuauguaucaaauaaaggugucgacaccguaucaguaggcaauacacuauacuauguaaauaaacaagaaggacaaucacucuacgucaaaggugaaccaauaauaaacuucuacgacccacuuguauucccaagcgacgaauuugacgcaucaauaagccaaguaaacgaaaaaauaaaccaaucacuagcauucaucagaaaaucagacgaacuacuccacaauguaaaugcaggaaaaucaacaaccaauaucaugauaacaaccauaauaauagucauaauaguaauacuauuaucccucauagccguuggacuacuccuauauuguaaagcacgauaaggacuaguacuggcugcaucucccuuuccucuguccuccauccuucucccaggauggugaagggggaccugguacccagugauccccaccccaggauccuaaaucaugacuuaccugcuaauaaaaacucauuggaaaagugagaagaucuaaaaaaaaaaaaaaaaaaaaaaaaaaaaaaaaaaaaaaaaaaaaaaaaaaaaaaaaaaaaaaaaugcaucccccccccccccccccccccccccccccccaaaggcucuuuucagagccaccagaauu

SEQ ID NO: 8213 - RNA, 1926 nt, Artificial Sequence
  mRNA product Design h-1 comprising derived and/or modified sequence from HRSV(A2)__F-del_DSCav1_mut8 (opt11)
gggagacccgugacccggaaguuguacggcuacgcgacuuucccucccacaaacccucgcgcccuuccuuuccuacuugggcccggcagaaagcuuaccauggaacuccucauccucaaagccaacgccaucaccaccauacucaccgcaguaaccuucugcuucgcauccggccaaaacaucacagaagaguucuaccagaguaccugcuccgccgucuccaaaggcuaccuuggcgcccuccguaccgggugguacacauccgucaucacaaucgaacucuccaacaucaaagaaauaaagugcaacggcacagacgccaaaguaaaacugauaaagcaagaacucgacaaauacaaaaacgccguaaccgaccuccagcuacuaaugcaauccacucccgccaccggcagcggauccgccaucgccuccggaguagccgucuguaaagucuuacaccucgaaggcgaagugaacaaaaucaaauccgcccuacucucaaccaacaaagccguaguaucacucuccgggugcggcguuucagugcuaacguucaaaguccuugaccucaaaaacuacaucgacaaacaacuccuccccauccuaaauaaacaauccugcuccauacccaacaucgagacugucaucgaguuccagcagaaaaacaaccgacuccucgaaaucacacgcgaguucucugucaacgccggcgucacaacccccgucuccacauacaugcucaccaacagcgaacuccucucccuaaucaaugacaugcccaucaccaacgaccaaaagaaacucaugucaaacaacguccaaaucguccgccaacaauccuacagcaucaugugcaucaucaaagaagaaguucucgcauacguaguacaacucccccucuacggagugaucgacacccccugcuggaaacuacacaccagcccgcuuugcaccacaaacaccaaggaaggcuccaacaucugccucacucgaaccgaccgcggcugguacugcgacaacgcaggcuccgucaguuucuuuccccaagcagaaacaugcaaaguccaauccaaccgaguauucugcgacaccaugaacucccucacccuaccauccgaaguuaaccuaugcaacguggacaucuucaaccccaaguacgacugcaaaauuaugaccuccaaaaccgacguauccuccagcgucaucaccagccucggagcaauagucuccugcuacggcaagaccaagugcaccgcuuccaacaagugucgcggaaucaucaaaaccuucucaaacggcugcgacuacgucuccaacaaaggcgucgacaccguauccguaggaaacacccuauacuacgucaacaaacaagaaggacaaucccucuaugucaaaggcgaacccaucaucaauuucuacgacccccuagucuucccuuccgacgaguucgacgcguccaucagccaagucaaugaaaagaucaaccagagccuggcauucauccgcaaauccgacgaacuccuccacaacgucaacgcgggaaaauccacgacaaacaucaugaucaccaccaucaucaucgucaucauagucauucuccuuucucucaucgccgugggacuacuucucuacugcaaagcccgauaaggacuaguacuggcugcaucucccuuuccucuguccuccauccuucucccaggauggugaagggggaccugguacccagugauccccaccccaggauccuaaaucaugacuuaccugcuaauaaaaacucauuggaaaagugagaagaucuaaaaaaaaaaaaaaaaaaaaaaaaaaaaaaaaaaaaaaaaaaaaaaaaaaaaaaaaaaaaaaaaugcaucccccccccccccccccccccccccccccccaaaggcucuuuucagagccaccagaauu

SEQ ID NO: 8214 - RNA, 2142 nt, Artificial Sequence
  mRNA product Design h-2 comprising derived and/or modified sequence from HRSV(A2)__F-del_DSCav1_mut8 (opt1)
gggagacccgugacccggaaguuguacggcuacgcgacuuucccucccacaaacccucgcgcccuuccuuuccuacuugggcccggcagaaagcuuaccauggagcugcucauccugaaggccaacgccaucaccaccauccugacggcggugaccuucugcuucgccagcggccagaacaucaccgaggaguucuaccaguccacgugcagcgccgucuccaagggguaccucggcgcccugcggaccggcugguacaccuccgugaucaccaucgagcugagcaacaucaaggagaucaagugcaacgggaccgacgccaaggugaagcucaucaagcaggagcuggacaaguacaagaacgcggucacggaccugcagcuccugaugcaguccaccccggcaaccggcuccggcuccgccaucgcgagcggcgucgccgugugcaaggugcugcaccucgagggggaggucaacaagaucaagagcgcccugcuguccaccaacaaggccguggugagccucuccggcugcggcgucagcgugcugaccuucaaggugcuggaccucaagaacuacaucgacaagcagcugcugcccauccugaacaagcagagcugcuccauccccaacaucgagacggugaucgaguuccagcagaagaacaaccggcuccuggagaucacccgcgaguucagcgugaacgccggggucaccacccccguguccacguacaugcugaccaacagcgagcuccugucccugaucaacgacaugccgaucaccaacgaccagaagaagcucaugagcaacaacgugcagaucguccggcagcaguccuacagcaucaugugcaucaucaaggaggaggugcuggcguacgugguccagcugccccucuacggcgugaucgacacccccugcuggaagcugcacacgagcccccugugcaccaccaacaccaaggagggguccaacaucugccucacgcgcaccgaccggggcugguacugcgacaacgccggcagcgucuccuucuucccgcaggccgagaccugcaaggugcagagcaaccgcguguucugcgacaccaugaacucccugacgcugcccagcgagguaaaccucugcaacgucgacaucuucaaccccaaguacgacugcaagaucaugaccuccaagaccgacgugagcuccagcgugaucaccucccugggggccaucgucagcugcuacggcaagacgaagugcaccgccagcaacaagugccgggggaucaucaagaccuucuccaacggcugcgacuacgugagcaacaagggcguggacaccguguccgucgggaacacccuguacuacgugaacaagcaggagggccagagccucuacgugaagggggagcccaucaucaacuucuacgacccgcuggucuuccccuccgacgaguucgacgcgagcaucucccaggugaacgagaagaucaaccagagccuggccuucauccgcaaguccgacgagcugcuccacaacgugaacgccggcaagagcacgaccaacaucaugaucaccaccaucaucaucgucaucaucgugauccugcugucccucaucgccguggggcugcugcucuacugcaaggcccggugaggacuagugaagggaacacccaaauuuaauucagccuuaagcacaauuaauuaagagugaaacguaauuguacaagcaguuggucacccaccauagggcaugaucaacaccgcaaccuuuccuuuuucccccagugauucugaaaaaccccucuucccuucagcuugcuuagauguuccaaauuuaguaagcuuaaggcggccuacagaagaaaaagaaaaaaaaggccacaaaaguucccucucacuuucaguaaauaaaauaaaagcagcaacagaaauaaagaaauaaaugaaauucaaaaugaaauaaauauuguguugugcagcauuaaaaaaucaauaaaaauuaaaaaugagcaagaucuaaaaaaaaaaaaaaaaaaaaaaaaaaaaaaaaaaaaaaaaaaaaaaaaaaaaaaaaaaaaaaaaugcaucccccccccccccccccccccccccccccccaaaggcucuuuucagagccaccagaauu

SEQ ID NO: 8215 - RNA, 2142 nt, Artificial Sequence
  mRNA product Design h-2 comprising derived and/or modified sequence from HRSV(A2)__F-del_DSCav1_mut8 (opt1)
gggagacccgugacccggaaguuguacggcuacgcgacuuucccucccacaaacccucgcgcccuuccuuuccuacuugggcccggcagaaagcuuaccauggagcugcucauccugaaggccaacgccaucaccaccauccugacggcggugaccuucugcuucgccagcggccagaacaucaccgaggaguucuaccaguccacgugcagcgccgucuccaagggguaccucggcgcccugcgcaccgggugguacaccagcgugaucaccaucgagcuguccaacaucaaggagaucaagugcaacggcaccgacgccaaggugaagcucaucaagcaggagcuggacaaguacaagaacgcggucacggaccugcagcuccugaugcagagcacccccgccaccggguccggcagcgccaucgccuccggcguggcggugugcaagguccugcaccucgagggggaggugaacaagaucaagagcgcccugcuguccaccaacaaggccguggucagccucuccggcugcggggugagcgugcugacguucaagguccuggaccucaagaacuacaucgacaagcagcugcugccgauccucaacaagcaguccugcagcauccccaacaucgagaccgugaucgaguuccagcagaagaacaaccggcugcuggagaucacccgcgaguucuccgugaacgccggcgucaccacgcccgugagcaccuacaugcucaccaacuccgagcugcugagccucaucaacgacaugcccaucaccaacgaccagaagaagcugaugagcaacaacgugcagaucguccggcagcaguccuacagcaucaugugcaucaucaaggaggaggugcuggccuacgugguccagcucccgcuguacggggugaucgacacgcccugcuggaagcugcacaccagcccccucugcaccaccaacacgaaggagggcuccaacaucugccugacccgcaccgaccggggcugguacugcgacaacgcgggguccgugagcuucuucccccaggccgagaccugcaagguccaguccaaccgcguguucugcgacacgaugaacagccugacccucccguccgaggucaaccugugcaacguggacaucuucaaccccaaguacgacugcaagaucaugaccagcaagaccgacguguccagcuccgucaucacgagccugggcgccaucguguccugcuacgggaagaccaagugcaccgccagcaacaagugccggggcaucaucaagaccuucuccaacggcugcgacuacgugagcaacaagggggucgacacgguguccgugggcaacacccucuacuacgucaacaagcaggaggggcagagccuguacgugaagggcgagcccaucaucaacuucuacgacccccugguguucccgagcgacgaguucgacgccuccaucagccaggucaacgagaagaucaaccagucccucgcguucauccgcaagagcgacgagcugcugcacaacgugaacgccgggaaguccaccaccaacaucaugaucaccacgaucaucaucgugaucaucgucauccuccugagccugaucgccgugggccuccugcuguacugcaaggcccggugaggacuagugaagggaacacccaaauuuaauucagccuuaagcacaauuaauuaagagugaaacguaauuguacaagcaguuggucacccaccauagggcaugaucaacaccgcaaccuuuccuuuuucccccagugauucugaaaaaccccucuucccuucagcuugcuuagauguuccaaauuuaguaagcuuaaggcggccuacagaagaaaaagaaaaaaaaggccacaaaaguucccucucacuuucaguaaauaaaauaaaagcagcaacagaaauaaagaaauaaaugaaauucaaaaugaaauaaauauuguguugugcagcauuaaaaaaucaauaaaaauuaaaaaugagcaagaucuaaaaaaaaaaaaaaaaaaaaaaaaaaaaaaaaaaaaaaaaaaaaaaaaaaaaaaaaaaaaaaaaugcaucccccccccccccccccccccccccccccccaaaggcucuuuucagagccaccagaauu

SEQ ID NO: 8216 - RNA, 2142 nt, Artificial Sequence
  mRNA product Design h-2 comprising derived and/or modified sequence from HRSV(A2)__F-del_DSCav1_mut8 (opt2)
gggagacccgugacccggaaguuguacggcuacgcgacuuucccucccacaaacccucgcgcccuuccuuuccuacuugggcccggcagaaagcuuaccauggagcuccucauccucaaggccaacgccaucaccaccauccucaccgccgucaccuucugcuucgccuccggccagaacaucaccgaggaguucuaccaguccaccugcuccgccgucuccaagggcuaccucggcgcccuccgcaccggcugguacaccuccgucaucaccaucgagcucuccaacaucaaggagaucaagugcaacggcaccgacgccaaggucaagcucaucaagcaggagcucgacaaguacaagaacgccgucaccgaccuccagcuccucaugcaguccacccccgccaccggcuccggcuccgccaucgccuccggcgucgccgucugcaagguccuccaccucgagggcgaggucaacaagaucaaguccgcccuccucuccaccaacaaggccgucgucucccucuccggcugcggcgucuccguccucaccuucaagguccucgaccucaagaacuacaucgacaagcagcuccuccccauccucaacaagcaguccugcuccauccccaacaucgagaccgucaucgaguuccagcagaagaacaaccgccuccucgagaucacccgcgaguucuccgucaacgccggcgucaccacccccgucuccaccuacaugcucaccaacuccgagcuccucucccucaucaacgacaugcccaucaccaacgaccagaagaagcucauguccaacaacguccagaucguccgccagcaguccuacuccaucaugugcaucaucaaggaggagguccucgccuacgucguccagcucccccucuacggcgucaucgacacccccugcuggaagcuccacaccuccccccucugcaccaccaacaccaaggagggcuccaacaucugccucacccgcaccgaccgcggcugguacugcgacaacgccggcuccgucuccuucuucccccaggccgagaccugcaagguccaguccaaccgcgucuucugcgacaccaugaacucccucacccuccccuccgaggucaaccucugcaacgucgacaucuucaaccccaaguacgacugcaagaucaugaccuccaagaccgacgucuccuccuccgucaucaccucccucggcgccaucgucuccugcuacggcaagaccaagugcaccgccuccaacaagugccgcggcaucaucaagaccuucuccaacggcugcgacuacgucuccaacaagggcgucgacaccgucuccgucggcaacacccucuacuacgucaacaagcaggagggccagucccucuacgucaagggcgagcccaucaucaacuucuacgacccccucgucuuccccuccgacgaguucgacgccuccaucucccaggucaacgagaagaucaaccagucccucgccuucauccgcaaguccgacgagcuccuccacaacgucaacgccggcaaguccaccaccaacaucaugaucaccaccaucaucaucgucaucaucgucauccuccucucccucaucgccgucggccuccuccucuacugcaaggcccgcugaggacuagugaagggaacacccaaauuuaauucagccuuaagcacaauuaauuaagagugaaacguaauuguacaagcaguuggucacccaccauagggcaugaucaacaccgcaaccuuuccuuuuucccccagugauucugaaaaaccccucuucccuucagcuugcuuagauguuccaaauuuaguaagcuuaaggcggccuacagaagaaaaagaaaaaaaaggccacaaaaguucccucucacuuucaguaaauaaaauaaaagcagcaacagaaauaaagaaauaaaugaaauucaaaaugaaauaaauauuguguugugcagcauuaaaaaaucaauaaaaauuaaaaaugagcaagaucuaaaaaaaaaaaaaaaaaaaaaaaaaaaaaaaaaaaaaaaaaaaaaaaaaaaaaaaaaaaaaaaaugcaucccccccccccccccccccccccccccccccaaaggcucuuuucagagccaccagaauu

SEQ ID NO: 8217 - RNA, 2142 nt, Artificial Sequence
  mRNA product Design h-2 comprising derived and/or modified sequence from HRSV(A2)__F-del_DSCav1_mut8 (opt3)
gggagacccgugacccggaaguuguacggcuacgcgacuuucccucccacaaacccucgcgcccuuccuuuccuacuugggcccggcagaaagcuuaccauggagcugcucauccuuaaggccaacgcuauuaccacaauacugacugcagugacguucugcuuugccagcggccagaauaucaccgaagaguucuaccaauccacauguucugcggucucaaaaggguauuugggagcuuuaagaacugguugguacaccaguguuauuacaaucgaacugagcaacauuaaggagaucaaaugcaauggcaccgacgccaaggugaaacuaauaaagcaggaacucgauaaguauaaaaacgcaguaacugaccugcagcuucugaugcaguccacacccgccaccgggucuggaucggcuaucgcaucaggcguggccgucuguaagguguugcaccucgagggugagguuaauaaaauuaagagcgcucugcugaguacgaacaaagccguggucucccucucugggugcggagugagcguauuaacuuuuaagguucuggaucuuaagaauuacaucgacaaacaauugcugccuauucuaaacaagcaguccuguucaaucccaaauauagaaaccgugauugaguuccagcagaaaaacaauaggcuccuggaaaucacacgggaguuuagugucaacgcgggcgugacuaccccggugagcacauauaugcuuaccaauucugagcuguugucccucauuaacgauaugcccaucacgaaugaccaaaagaaacugaugucaaacaacguccagaucguucgccagcagagcuacaguauuaugugcauaaucaaggaagagguguuagcauauguagugcaacugccucucuacggcgucauugauacuccauguuggaaacuucauacaucuccccugugcaccacuaauacaaaggaaggguccaacaucuguuugacccgaacggaccguggaugguacugcgauaaugccgguagcgugucguucuuuccucaggcugagaccuguaagguucagucuaacagaguguucugcgacacaaugaacucccuaacucugccaucagaagucaaucucugcaauguggauauauuuaaccccaaauaugacuguaagauuaugaccaguaaaacagauguaagcuccucuguuaucacuagccugggcgccaucgugucaugcuacgggaagaccaaauguacagcaaguaauaagugcaggggaauuaucaagaccuucuccaacggcugugacuaugucagcaauaaagguguggacacugucucuguggggaacacgcuuuacuauguuaauaagcaagagggacagucacuguacgugaaaggcgagccuauuauaaacuuuuaugauccauugguauucccgagugacgaauuugaugcuagcaucucccaggucaaugagaagauuaaccagucucucgccuucauccggaaaucggacgaacuguuacacaacgugaaugcgggcaagagcacaaccaacaucaugauuacuaccauaaucauuguuaucauugugauccugcuaucccucauagccgucgggcugcuuuuguacugcaaggcacgcugaggacuagugaagggaacacccaaauuuaauucagccuuaagcacaauuaauuaagagugaaacguaauuguacaagcaguuggucacccaccauagggcaugaucaacaccgcaaccuuuccuuuuucccccagugauucugaaaaaccccucuucccuucagcuugcuuagauguuccaaauuuaguaagcuuaaggcggccuacagaagaaaaagaaaaaaaaggccacaaaaguucccucucacuuucaguaaauaaaauaaaagcagcaacagaaauaaagaaauaaaugaaauucaaaaugaaauaaauauuguguugugcagcauuaaaaaaucaauaaaaauuaaaaaugagcaagaucuaaaaaaaaaaaaaaaaaaaaaaaaaaaaaaaaaaaaaaaaaaaaaaaaaaaaaaaaaaaaaaaaugcaucccccccccccccccccccccccccccccccaaaggcucuuuucagagccaccagaauu

SEQ ID NO: 8218 - RNA, 2142 nt, Artificial Sequence
  mRNA product Design h-2 comprising derived and/or modified sequence from HRSV(A2)__F-del_DSCav1_mut8 (opt4)
gggagacccgugacccggaaguuguacggcuacgcgacuuucccucccacaaacccucgcgcccuuccuuuccuacuugggcccggcagaaagcuuaccauggagcugcugauccugaaggccaacgccaucaccaccauccugaccgccgugaccuucugcuucgccagcggccagaacaucaccgaggaguucuaccagagcaccugcagcgccgugagcaagggcuaccugggcgcccugagaaccggcugguacaccagcgugaucaccaucgagcugagcaacaucaaggagaucaagugcaacggcaccgacgccaaggugaagcugaucaagcaggagcuggacaaguacaagaacgccgugaccgaccugcagcugcugaugcagagcacccccgccaccggcagcggcagcgccaucgccagcggcguggccgugugcaaggugcugcaccuggagggcgaggugaacaagaucaagagcgcccugcugagcaccaacaaggccguggugagccugagcggcugcggcgugagcgugcugaccuucaaggugcuggaccugaagaacuacaucgacaagcagcugcugcccauccugaacaagcagagcugcagcauccccaacaucgagaccgugaucgaguuccagcagaagaacaacagacugcuggagaucaccagagaguucagcgugaacgccggcgugaccacccccgugagcaccuacaugcugaccaacagcgagcugcugagccugaucaacgacaugcccaucaccaacgaccagaagaagcugaugagcaacaacgugcagaucgugagacagcagagcuacagcaucaugugcaucaucaaggaggaggugcuggccuacguggugcagcugccccuguacggcgugaucgacacccccugcuggaagcugcacaccagcccccugugcaccaccaacaccaaggagggcagcaacaucugccugaccagaaccgacagaggcugguacugcgacaacgccggcagcgugagcuucuucccccaggccgagaccugcaaggugcagagcaacagaguguucugcgacaccaugaacagccugacccugcccagcgaggugaaccugugcaacguggacaucuucaaccccaaguacgacugcaagaucaugaccagcaagaccgacgugagcagcagcgugaucaccagccugggcgccaucgugagcugcuacggcaagaccaagugcaccgccagcaacaagugcagaggcaucaucaagaccuucagcaacggcugcgacuacgugagcaacaagggcguggacaccgugagcgugggcaacacccuguacuacgugaacaagcaggagggccagagccuguacgugaagggcgagcccaucaucaacuucuacgacccccugguguuccccagcgacgaguucgacgccagcaucagccaggugaacgagaagaucaaccagagccuggccuucaucagaaagagcgacgagcugcugcacaacgugaacgccggcaagagcaccaccaacaucaugaucaccaccaucaucaucgugaucaucgugauccugcugagccugaucgccgugggccugcugcuguacugcaaggccagaugaggacuagugaagggaacacccaaauuuaauucagccuuaagcacaauuaauuaagagugaaacguaauuguacaagcaguuggucacccaccauagggcaugaucaacaccgcaaccuuuccuuuuucccccagugauucugaaaaaccccucuucccuucagcuugcuuagauguuccaaauuuaguaagcuuaaggcggccuacagaagaaaaagaaaaaaaaggccacaaaaguucccucucacuuucaguaaauaaaauaaaagcagcaacagaaauaaagaaauaaaugaaauucaaaaugaaauaaauauuguguugugcagcauuaaaaaaucaauaaaaauuaaaaaugagcaagaucuaaaaaaaaaaaaaaaaaaaaaaaaaaaaaaaaaaaaaaaaaaaaaaaaaaaaaaaaaaaaaaaaugcaucccccccccccccccccccccccccccccccaaaggcucuuuucagagccaccagaauu

SEQ ID NO: 8219 - RNA, 2142 nt, Artificial Sequence
  mRNA product Design h-2 comprising derived and/or modified sequence from HRSV(A2)__F-del_DSCav1_mut8 (opt5)
gggagacccgugacccggaaguuguacggcuacgcgacuuucccucccacaaacccucgcgcccuuccuuuccuacuugggcccggcagaaagcuuaccauggagcugcucauccugaaggccaacgcuauuaccacaauccuuacggccgugaccuucugcuuugcgagcggccagaauauuacagaagaguucuaccaauccaccuguucugcugucagcaaaggguaucugggagcccucagaacaggcugguacaccuccguuaucacaauugaacugucuaacaucaaggagaucaaaugcaaugggaccgacgccaaggugaaacuuauuaagcaggaacuggauaaguauaaaaacgcugugacggaccuccagcugcugaugcagagcacccccgccacaggauccggcucugcuaucgccagcggggucgcgguguguaagguucuccaccuggagggagaggugaauaaaauuaaguccgcccuucugagcaccaacaaagcugucgugucucucuccggcugcggcguuagcgugcugacauuuaagguccuugaucugaagaauuacaucgacaaacaacuccugccuauucugaacaagcagucuuguuccaucccgaauauugaaaccgugaucgaguuccagcagaaaaacaaucggcuccuggaaaucacgcgcgaguuuagcgugaacgccggggucacaacccccguuucuacauauaugcuuaccaauuccgagcugcucagccugauuaacgauaugccuaucaccaaugaccaaaagaaacuuauguccaacaacgugcagauugugagacagcagucuuacagcaucaugugcauuaucaaggaagagguccuggcuuaugugguucaacucccccuguacggagugaucgauacaccuuguuggaaacugcauacgagcccccucugcaccacaaauaccaaggaaggcagcaacauuugucugacacggaccgaccgcgggugguacugcgauaaugccggaucugucuccuucuuuccucaggcggagacguguaaggugcagagcaacagaguuuucugcgacacaaugaacucucuuacccugccgagcgaagugaaucucugcaaugucgauaucuuuaaccccaaauaugacuguaagauuaugaccuccaaaacagaugugucuagcuccgucaucaccagccugggcgccauugugucuugcuacgggaagacaaaauguacggcuuccaauaagugccggggaaucaucaagaccuucagcaacggcugugacuauguuucuaauaaaggcguggacacagucuccguggggaacacccuuuacuauguuaauaagcaagagggacagagccuguacgugaaaggcgagccuauuaucaacuuuuaugauccccucgucuucccuuccgacgaauuugaugccucuauuagccaggugaaugagaagaucaaccagucccuggcuuucauucgcaaaucugacgaacugcuccacaacgugaaugccgggaaguccacaaccaacaucaugauuacgaccaucaucauuguuaucauugucauccugcuuucccugauugccgugggacuccugcuguacugcaaggcuagaugaggacuagugaagggaacacccaaauuuaauucagccuuaagcacaauuaauuaagagugaaacguaauuguacaagcaguuggucacccaccauagggcaugaucaacaccgcaaccuuuccuuuuucccccagugauucugaaaaaccccucuucccuucagcuugcuuagauguuccaaauuuaguaagcuuaaggcggccuacagaagaaaaagaaaaaaaaggccacaaaaguucccucucacuuucaguaaauaaaauaaaagcagcaacagaaauaaagaaauaaaugaaauucaaaaugaaauaaauauuguguugugcagcauuaaaaaaucaauaaaaauuaaaaaugagcaagaucuaaaaaaaaaaaaaaaaaaaaaaaaaaaaaaaaaaaaaaaaaaaaaaaaaaaaaaaaaaaaaaaaugcaucccccccccccccccccccccccccccccccaaaggcucuuuucagagccaccagaauu

SEQ ID NO: 8220 - RNA, 2142 nt, Artificial Sequence
  mRNA product Design h-2 comprising derived and/or modified sequence from HRSV(A2)__F-del_DSCav1_mut8 (opt6)
gggagacccgugacccggaaguuguacggcuacgcgacuuucccucccacaaacccucgcgcccuuccuuuccuacuugggcccggcagaaagcuuaccauggaacuacucauauugaaagccaacgcaaucacaacaauacuaaccgccguaacauuuugcuucgcgucaggccaaaauauaacagaagaauuuuaccaaucaacaugcuccgccguaucaaaaggauaccuaggugcauuacgaaccgguugguacacaucaguaaucacaauagaacuuuccaacauuaaagaaauaaaaugcaauggcacagacgcaaaagucaaacuaauaaaacaagaacuagacaaauauaaaaacgccgucacagacuuacaacuauuaaugcaaagcacaccagcaacaggauccggaucagcaauagcaucaggaguagccgucuguaaaguacuacaccuagaaggcgaaguuaauaaaauuaaaucagcuuuauuaucaaccaacaaagcaguaguaucacuauccggaugcggagucuccguccuaacauucaaaguacuagaccucaagaauuacauagauaaacaacuacuaccaauacucaacaaacaaucauguucaauaccaaacaucgaaaccgucauagaauuucaacaaaaaaauaauagacucuuagaaauaacacgagaauuuagcguaaacgcaggagucacaaccccugucucaacauacaugcuaaccaauuccgaauuauuaucacucauaaaugacaugccaauaacuaaugaccaaaaaaaacuuaugucaaacaacguacaaauaguaagacaacaaucauauucaauaaugugcauaaucaaagaagaaguuuuagcauauguaguacaacuaccacuauauggcgucauagacacaccaugcuggaaauuacacacaucaccucuaugcacaacaaacacaaaagaaggaagcaacauuugccuaaccagaaccgauagaggaugguacugcgauaacgcaggcucaguaucauucuucccucaagccgaaacuugcaaaguccaaucaaauagagucuucugcgauacaaugaacuccuuaacuuuaccaucagaaguaaaucuaugcaacguagauaucuuuaauccaaaauacgauugcaaaaucaugacaucaaaaacagauguaucaucuaguguaauuaccucccuaggagcaauaguaagcugcuacggaaaaacaaaaugcaccgccucuaacaaaugucguggaauaauaaaaacauucucaaacggaugcgauuauguaucaaauaaaggugucgacaccguaucaguaggcaauacacuauacuauguaaauaaacaagaaggacaaucacucuacgucaaaggugaaccaauaauaaacuucuacgacccacuuguauucccaagcgacgaauuugacgcaucaauaagccaaguaaacgaaaaaauaaaccaaucacuagcauucaucagaaaaucagacgaacuacuccacaauguaaaugcaggaaaaucaacaaccaauaucaugauaacaaccauaauaauagucauaauaguaauacuauuaucccucauagccguuggacuacuccuauauuguaaagcacgauaaggacuagugaagggaacacccaaauuuaauucagccuuaagcacaauuaauuaagagugaaacguaauuguacaagcaguuggucacccaccauagggcaugaucaacaccgcaaccuuuccuuuuucccccagugauucugaaaaaccccucuucccuucagcuugcuuagauguuccaaauuuaguaagcuuaaggcggccuacagaagaaaaagaaaaaaaaggccacaaaaguucccucucacuuucaguaaauaaaauaaaagcagcaacagaaauaaagaaauaaaugaaauucaaaaugaaauaaauauuguguugugcagcauuaaaaaaucaauaaaaauuaaaaaugagcaagaucuaaaaaaaaaaaaaaaaaaaaaaaaaaaaaaaaaaaaaaaaaaaaaaaaaaaaaaaaaaaaaaaaugcaucccccccccccccccccccccccccccccccaaaggcucuuuucagagccaccagaauu

SEQ ID NO: 8221 - RNA, 2142 nt, Artificial Sequence
  mRNA product Design h-2 comprising derived and/or modified sequence from HRSV(A2)__F-del_DSCav1_mut8 (opt11)
gggagacccgugacccggaaguuguacggcuacgcgacuuucccucccacaaacccucgcgcccuuccuuuccuacuugggcccggcagaaagcuuaccauggaacuccucauccucaaagccaacgccaucaccaccauacucaccgcaguaaccuucugcuucgcauccggccaaaacaucacagaagaguucuaccagaguaccugcuccgccgucuccaaaggcuaccuuggcgcccuccguaccgggugguacacauccgucaucacaaucgaacucuccaacaucaaagaaauaaagugcaacggcacagacgccaaaguaaaacugauaaagcaagaacucgacaaauacaaaaacgccguaaccgaccuccagcuacuaaugcaauccacucccgccaccggcagcggauccgccaucgccuccggaguagccgucuguaaagucuuacaccucgaaggcgaagugaacaaaaucaaauccgcccuacucucaaccaacaaagccguaguaucacucuccgggugcggcguuucagugcuaacguucaaaguccuugaccucaaaaacuacaucgacaaacaacuccuccccauccuaaauaaacaauccugcuccauacccaacaucgagacugucaucgaguuccagcagaaaaacaaccgacuccucgaaaucacacgcgaguucucugucaacgccggcgucacaacccccgucuccacauacaugcucaccaacagcgaacuccucucccuaaucaaugacaugcccaucaccaacgaccaaaagaaacucaugucaaacaacguccaaaucguccgccaacaauccuacagcaucaugugcaucaucaaagaagaaguucucgcauacguaguacaacucccccucuacggagugaucgacacccccugcuggaaacuacacaccagcccgcuuugcaccacaaacaccaaggaaggcuccaacaucugccucacucgaaccgaccgcggcugguacugcgacaacgcaggcuccgucaguuucuuuccccaagcagaaacaugcaaaguccaauccaaccgaguauucugcgacaccaugaacucccucacccuaccauccgaaguuaaccuaugcaacguggacaucuucaaccccaaguacgacugcaaaauuaugaccuccaaaaccgacguauccuccagcgucaucaccagccucggagcaauagucuccugcuacggcaagaccaagugcaccgcuuccaacaagugucgcggaaucaucaaaaccuucucaaacggcugcgacuacgucuccaacaaaggcgucgacaccguauccguaggaaacacccuauacuacgucaacaaacaagaaggacaaucccucuaugucaaaggcgaacccaucaucaauuucuacgacccccuagucuucccuuccgacgaguucgacgcguccaucagccaagucaaugaaaagaucaaccagagccuggcauucauccgcaaauccgacgaacuccuccacaacgucaacgcgggaaaauccacgacaaacaucaugaucaccaccaucaucaucgucaucauagucauucuccuuucucucaucgccgugggacuacuucucuacugcaaagcccgauaaggacuagugaagggaacacccaaauuuaauucagccuuaagcacaauuaauuaagagugaaacguaauuguacaagcaguuggucacccaccauagggcaugaucaacaccgcaaccuuuccuuuuucccccagugauucugaaaaaccccucuucccuucagcuugcuuagauguuccaaauuuaguaagcuuaaggcggccuacagaagaaaaagaaaaaaaaggccacaaaaguucccucucacuuucaguaaauaaaauaaaagcagcaacagaaauaaagaaauaaaugaaauucaaaaugaaauaaauauuguguugugcagcauuaaaaaaucaauaaaaauuaaaaaugagcaagaucuaaaaaaaaaaaaaaaaaaaaaaaaaaaaaaaaaaaaaaaaaaaaaaaaaaaaaaaaaaaaaaaaugcaucccccccccccccccccccccccccccccccaaaggcucuuuucagagccaccagaauu

SEQ ID NO: 8222 - RNA, 1922 nt, Artificial Sequence
  mRNA product Design h-3 comprising derived and/or modified sequence from HRSV(A2)__F-del_DSCav1_mut8 (opt1)
gggagacccgugacccggaaguuguacggcuacgcgacuuucccucccacaaacccucgcgcccuuccuuuccuacuugggcccggcagaaagcuuaccauggagcugcucauccugaaggccaacgccaucaccaccauccugacggcggugaccuucugcuucgccagcggccagaacaucaccgaggaguucuaccaguccacgugcagcgccgucuccaagggguaccucggcgcccugcggaccggcugguacaccuccgugaucaccaucgagcugagcaacaucaaggagaucaagugcaacgggaccgacgccaaggugaagcucaucaagcaggagcuggacaaguacaagaacgcggucacggaccugcagcuccugaugcaguccaccccggcaaccggcuccggcuccgccaucgcgagcggcgucgccgugugcaaggugcugcaccucgagggggaggucaacaagaucaagagcgcccugcuguccaccaacaaggccguggugagccucuccggcugcggcgucagcgugcugaccuucaaggugcuggaccucaagaacuacaucgacaagcagcugcugcccauccugaacaagcagagcugcuccauccccaacaucgagacggugaucgaguuccagcagaagaacaaccggcuccuggagaucacccgcgaguucagcgugaacgccggggucaccacccccguguccacguacaugcugaccaacagcgagcuccugucccugaucaacgacaugccgaucaccaacgaccagaagaagcucaugagcaacaacgugcagaucguccggcagcaguccuacagcaucaugugcaucaucaaggaggaggugcuggcguacgugguccagcugccccucuacggcgugaucgacacccccugcuggaagcugcacacgagcccccugugcaccaccaacaccaaggagggguccaacaucugccucacgcgcaccgaccggggcugguacugcgacaacgccggcagcgucuccuucuucccgcaggccgagaccugcaaggugcagagcaaccgcguguucugcgacaccaugaacucccugacgcugcccagcgagguaaaccucugcaacgucgacaucuucaaccccaaguacgacugcaagaucaugaccuccaagaccgacgugagcuccagcgugaucaccucccugggggccaucgucagcugcuacggcaagacgaagugcaccgccagcaacaagugccgggggaucaucaagaccuucuccaacggcugcgacuacgugagcaacaagggcguggacaccguguccgucgggaacacccuguacuacgugaacaagcaggagggccagagccucuacgugaagggggagcccaucaucaacuucuacgacccgcuggucuuccccuccgacgaguucgacgcgagcaucucccaggugaacgagaagaucaaccagagccuggccuucauccgcaaguccgacgagcugcuccacaacgugaacgccggcaagagcacgaccaacaucaugaucaccaccaucaucaucgucaucaucgugauccugcugucccucaucgccguggggcugcugcucuacugcaaggcccggugaggacuaguggaagcauuuuccuggcugauuaaaagaaauuacucagcuauggucaucuguuccuguuagaaggcuaugcagcauauuauauacuaugcgcauguuaugaaaugcauaauaaaaaauuuuaaaaaaucuaaaagaucuaaaaaaaaaaaaaaaaaaaaaaaaaaaaaaaaaaaaaaaaaaaaaaaaaaaaaaaaaaaaaaaaugcaucccccccccccccccccccccccccccccccaaaggcucuuuucagagccaccagaauu

SEQ ID NO: 8223 - RNA, 1922 nt, Artificial Sequence
  mRNA product Design h-3 comprising derived and/or modified sequence from HRSV(A2)__F-del_DSCav1_mut8 (opt1)
gggagacccgugacccggaaguuguacggcuacgcgacuuucccucccacaaacccucgcgcccuuccuuuccuacuugggcccggcagaaagcuuaccauggagcugcucauccugaaggccaacgccaucaccaccauccugacggcggugaccuucugcuucgccagcggccagaacaucaccgaggaguucuaccaguccacgugcagcgccgucuccaagggguaccucggcgcccugcgcaccgggugguacaccagcgugaucaccaucgagcuguccaacaucaaggagaucaagugcaacggcaccgacgccaaggugaagcucaucaagcaggagcuggacaaguacaagaacgcggucacggaccugcagcuccugaugcagagcacccccgccaccggguccggcagcgccaucgccuccggcguggcggugugcaagguccugcaccucgagggggaggugaacaagaucaagagcgcccugcuguccaccaacaaggccguggucagccucuccggcugcggggugagcgugcugacguucaagguccuggaccucaagaacuacaucgacaagcagcugcugccgauccucaacaagcaguccugcagcauccccaacaucgagaccgugaucgaguuccagcagaagaacaaccggcugcuggagaucacccgcgaguucuccgugaacgccggcgucaccacgcccgugagcaccuacaugcucaccaacuccgagcugcugagccucaucaacgacaugcccaucaccaacgaccagaagaagcugaugagcaacaacgugcagaucguccggcagcaguccuacagcaucaugugcaucaucaaggaggaggugcuggccuacgugguccagcucccgcuguacggggugaucgacacgcccugcuggaagcugcacaccagcccccucugcaccaccaacacgaaggagggcuccaacaucugccugacccgcaccgaccggggcugguacugcgacaacgcgggguccgugagcuucuucccccaggccgagaccugcaagguccaguccaaccgcguguucugcgacacgaugaacagccugacccucccguccgaggucaaccugugcaacguggacaucuucaaccccaaguacgacugcaagaucaugaccagcaagaccgacguguccagcuccgucaucacgagccugggcgccaucguguccugcuacgggaagaccaagugcaccgccagcaacaagugccggggcaucaucaagaccuucuccaacggcugcgacuacgugagcaacaagggggucgacacgguguccgugggcaacacccucuacuacgucaacaagcaggaggggcagagccuguacgugaagggcgagcccaucaucaacuucuacgacccccugguguucccgagcgacgaguucgacgccuccaucagccaggucaacgagaagaucaaccagucccucgcguucauccgcaagagcgacgagcugcugcacaacgugaacgccgggaaguccaccaccaacaucaugaucaccacgaucaucaucgugaucaucgucauccuccugagccugaucgccgugggccuccugcuguacugcaaggcccggugaggacuaguggaagcauuuuccuggcugauuaaaagaaauuacucagcuauggucaucuguuccuguuagaaggcuaugcagcauauuauauacuaugcgcauguuaugaaaugcauaauaaaaaauuuuaaaaaaucuaaaagaucuaaaaaaaaaaaaaaaaaaaaaaaaaaaaaaaaaaaaaaaaaaaaaaaaaaaaaaaaaaaaaaaaugcaucccccccccccccccccccccccccccccccaaaggcucuuuucagagccaccagaauu

SEQ ID NO: 8224 - RNA, 1922 nt, Artificial Sequence
  mRNA product Design h-3 comprising derived and/or modified sequence from HRSV(A2)__F-del_DSCav1_mut8 (opt2)
gggagacccgugacccggaaguuguacggcuacgcgacuuucccucccacaaacccucgcgcccuuccuuuccuacuugggcccggcagaaagcuuaccauggagcuccucauccucaaggccaacgccaucaccaccauccucaccgccgucaccuucugcuucgccuccggccagaacaucaccgaggaguucuaccaguccaccugcuccgccgucuccaagggcuaccucggcgcccuccgcaccggcugguacaccuccgucaucaccaucgagcucuccaacaucaaggagaucaagugcaacggcaccgacgccaaggucaagcucaucaagcaggagcucgacaaguacaagaacgccgucaccgaccuccagcuccucaugcaguccacccccgccaccggcuccggcuccgccaucgccuccggcgucgccgucugcaagguccuccaccucgagggcgaggucaacaagaucaaguccgcccuccucuccaccaacaaggccgucgucucccucuccggcugcggcgucuccguccucaccuucaagguccucgaccucaagaacuacaucgacaagcagcuccuccccauccucaacaagcaguccugcuccauccccaacaucgagaccgucaucgaguuccagcagaagaacaaccgccuccucgagaucacccgcgaguucuccgucaacgccggcgucaccacccccgucuccaccuacaugcucaccaacuccgagcuccucucccucaucaacgacaugcccaucaccaacgaccagaagaagcucauguccaacaacguccagaucguccgccagcaguccuacuccaucaugugcaucaucaaggaggagguccucgccuacgucguccagcucccccucuacggcgucaucgacacccccugcuggaagcuccacaccuccccccucugcaccaccaacaccaaggagggcuccaacaucugccucacccgcaccgaccgcggcugguacugcgacaacgccggcuccgucuccuucuucccccaggccgagaccugcaagguccaguccaaccgcgucuucugcgacaccaugaacucccucacccuccccuccgaggucaaccucugcaacgucgacaucuucaaccccaaguacgacugcaagaucaugaccuccaagaccgacgucuccuccuccgucaucaccucccucggcgccaucgucuccugcuacggcaagaccaagugcaccgccuccaacaagugccgcggcaucaucaagaccuucuccaacggcugcgacuacgucuccaacaagggcgucgacaccgucuccgucggcaacacccucuacuacgucaacaagcaggagggccagucccucuacgucaagggcgagcccaucaucaacuucuacgacccccucgucuuccccuccgacgaguucgacgccuccaucucccaggucaacgagaagaucaaccagucccucgccuucauccgcaaguccgacgagcuccuccacaacgucaacgccggcaaguccaccaccaacaucaugaucaccaccaucaucaucgucaucaucgucauccuccucucccucaucgccgucggccuccuccucuacugcaaggcccgcugaggacuaguggaagcauuuuccuggcugauuaaaagaaauuacucagcuauggucaucuguuccuguuagaaggcuaugcagcauauuauauacuaugcgcauguuaugaaaugcauaauaaaaaauuuuaaaaaaucuaaaagaucuaaaaaaaaaaaaaaaaaaaaaaaaaaaaaaaaaaaaaaaaaaaaaaaaaaaaaaaaaaaaaaaaugcaucccccccccccccccccccccccccccccccaaaggcucuuuucagagccaccagaauu

SEQ ID NO: 8225 - RNA, 1922 nt, Artificial Sequence
  mRNA product Design h-3 comprising derived and/or modified sequence from HRSV(A2)__F-del_DSCav1_mut8 (opt3)
gggagacccgugacccggaaguuguacggcuacgcgacuuucccucccacaaacccucgcgcccuuccuuuccuacuugggcccggcagaaagcuuaccauggagcugcucauccuuaaggccaacgcuauuaccacaauacugacugcagugacguucugcuuugccagcggccagaauaucaccgaagaguucuaccaauccacauguucugcggucucaaaaggguauuugggagcuuuaagaacugguugguacaccaguguuauuacaaucgaacugagcaacauuaaggagaucaaaugcaauggcaccgacgccaaggugaaacuaauaaagcaggaacucgauaaguauaaaaacgcaguaacugaccugcagcuucugaugcaguccacacccgccaccgggucuggaucggcuaucgcaucaggcguggccgucuguaagguguugcaccucgagggugagguuaauaaaauuaagagcgcucugcugaguacgaacaaagccguggucucccucucugggugcggagugagcguauuaacuuuuaagguucuggaucuuaagaauuacaucgacaaacaauugcugccuauucuaaacaagcaguccuguucaaucccaaauauagaaaccgugauugaguuccagcagaaaaacaauaggcuccuggaaaucacacgggaguuuagugucaacgcgggcgugacuaccccggugagcacauauaugcuuaccaauucugagcuguugucccucauuaacgauaugcccaucacgaaugaccaaaagaaacugaugucaaacaacguccagaucguucgccagcagagcuacaguauuaugugcauaaucaaggaagagguguuagcauauguagugcaacugccucucuacggcgucauugauacuccauguuggaaacuucauacaucuccccugugcaccacuaauacaaaggaaggguccaacaucuguuugacccgaacggaccguggaugguacugcgauaaugccgguagcgugucguucuuuccucaggcugagaccuguaagguucagucuaacagaguguucugcgacacaaugaacucccuaacucugccaucagaagucaaucucugcaauguggauauauuuaaccccaaauaugacuguaagauuaugaccaguaaaacagauguaagcuccucuguuaucacuagccugggcgccaucgugucaugcuacgggaagaccaaauguacagcaaguaauaagugcaggggaauuaucaagaccuucuccaacggcugugacuaugucagcaauaaagguguggacacugucucuguggggaacacgcuuuacuauguuaauaagcaagagggacagucacuguacgugaaaggcgagccuauuauaaacuuuuaugauccauugguauucccgagugacgaauuugaugcuagcaucucccaggucaaugagaagauuaaccagucucucgccuucauccggaaaucggacgaacuguuacacaacgugaaugcgggcaagagcacaaccaacaucaugauuacuaccauaaucauuguuaucauugugauccugcuaucccucauagccgucgggcugcuuuuguacugcaaggcacgcugaggacuaguggaagcauuuuccuggcugauuaaaagaaauuacucagcuauggucaucuguuccuguuagaaggcuaugcagcauauuauauacuaugcgcauguuaugaaaugcauaauaaaaaauuuuaaaaaaucuaaaagaucuaaaaaaaaaaaaaaaaaaaaaaaaaaaaaaaaaaaaaaaaaaaaaaaaaaaaaaaaaaaaaaaaugcaucccccccccccccccccccccccccccccccaaaggcucuuuucagagccaccagaauu

SEQ ID NO: 8226 - RNA, 1922 nt, Artificial Sequence
  mRNA product Design h-3 comprising derived and/or modified sequence from HRSV(A2)__F-del_DSCav1_mut8 (opt4)
gggagacccgugacccggaaguuguacggcuacgcgacuuucccucccacaaacccucgcgcccuuccuuuccuacuugggcccggcagaaagcuuaccauggagcugcugauccugaaggccaacgccaucaccaccauccugaccgccgugaccuucugcuucgccagcggccagaacaucaccgaggaguucuaccagagcaccugcagcgccgugagcaagggcuaccugggcgcccugagaaccggcugguacaccagcgugaucaccaucgagcugagcaacaucaaggagaucaagugcaacggcaccgacgccaaggugaagcugaucaagcaggagcuggacaaguacaagaacgccgugaccgaccugcagcugcugaugcagagcacccccgccaccggcagcggcagcgccaucgccagcggcguggccgugugcaaggugcugcaccuggagggcgaggugaacaagaucaagagcgcccugcugagcaccaacaaggccguggugagccugagcggcugcggcgugagcgugcugaccuucaaggugcuggaccugaagaacuacaucgacaagcagcugcugcccauccugaacaagcagagcugcagcauccccaacaucgagaccgugaucgaguuccagcagaagaacaacagacugcuggagaucaccagagaguucagcgugaacgccggcgugaccacccccgugagcaccuacaugcugaccaacagcgagcugcugagccugaucaacgacaugcccaucaccaacgaccagaagaagcugaugagcaacaacgugcagaucgugagacagcagagcuacagcaucaugugcaucaucaaggaggaggugcuggccuacguggugcagcugccccuguacggcgugaucgacacccccugcuggaagcugcacaccagcccccugugcaccaccaacaccaaggagggcagcaacaucugccugaccagaaccgacagaggcugguacugcgacaacgccggcagcgugagcuucuucccccaggccgagaccugcaaggugcagagcaacagaguguucugcgacaccaugaacagccugacccugcccagcgaggugaaccugugcaacguggacaucuucaaccccaaguacgacugcaagaucaugaccagcaagaccgacgugagcagcagcgugaucaccagccugggcgccaucgugagcugcuacggcaagaccaagugcaccgccagcaacaagugcagaggcaucaucaagaccuucagcaacggcugcgacuacgugagcaacaagggcguggacaccgugagcgugggcaacacccuguacuacgugaacaagcaggagggccagagccuguacgugaagggcgagcccaucaucaacuucuacgacccccugguguuccccagcgacgaguucgacgccagcaucagccaggugaacgagaagaucaaccagagccuggccuucaucagaaagagcgacgagcugcugcacaacgugaacgccggcaagagcaccaccaacaucaugaucaccaccaucaucaucgugaucaucgugauccugcugagccugaucgccgugggccugcugcuguacugcaaggccagaugaggacuaguggaagcauuuuccuggcugauuaaaagaaauuacucagcuauggucaucuguuccuguuagaaggcuaugcagcauauuauauacuaugcgcauguuaugaaaugcauaauaaaaaauuuuaaaaaaucuaaaagaucuaaaaaaaaaaaaaaaaaaaaaaaaaaaaaaaaaaaaaaaaaaaaaaaaaaaaaaaaaaaaaaaaugcaucccccccccccccccccccccccccccccccaaaggcucuuuucagagccaccagaauu

SEQ ID NO: 8227 - RNA, 1922 nt, Artificial Sequence
  mRNA product Design h-3 comprising derived and/or modified sequence from HRSV(A2)__F-del_DSCav1_mut8 (opt5)
gggagacccgugacccggaaguuguacggcuacgcgacuuucccucccacaaacccucgcgcccuuccuuuccuacuugggcccggcagaaagcuuaccauggagcugcucauccugaaggccaacgcuauuaccacaauccuuacggccgugaccuucugcuuugcgagcggccagaauauuacagaagaguucuaccaauccaccuguucugcugucagcaaaggguaucugggagcccucagaacaggcugguacaccuccguuaucacaauugaacugucuaacaucaaggagaucaaaugcaaugggaccgacgccaaggugaaacuuauuaagcaggaacuggauaaguauaaaaacgcugugacggaccuccagcugcugaugcagagcacccccgccacaggauccggcucugcuaucgccagcggggucgcgguguguaagguucuccaccuggagggagaggugaauaaaauuaaguccgcccuucugagcaccaacaaagcugucgugucucucuccggcugcggcguuagcgugcugacauuuaagguccuugaucugaagaauuacaucgacaaacaacuccugccuauucugaacaagcagucuuguuccaucccgaauauugaaaccgugaucgaguuccagcagaaaaacaaucggcuccuggaaaucacgcgcgaguuuagcgugaacgccggggucacaacccccguuucuacauauaugcuuaccaauuccgagcugcucagccugauuaacgauaugccuaucaccaaugaccaaaagaaacuuauguccaacaacgugcagauugugagacagcagucuuacagcaucaugugcauuaucaaggaagagguccuggcuuaugugguucaacucccccuguacggagugaucgauacaccuuguuggaaacugcauacgagcccccucugcaccacaaauaccaaggaaggcagcaacauuugucugacacggaccgaccgcgggugguacugcgauaaugccggaucugucuccuucuuuccucaggcggagacguguaaggugcagagcaacagaguuuucugcgacacaaugaacucucuuacccugccgagcgaagugaaucucugcaaugucgauaucuuuaaccccaaauaugacuguaagauuaugaccuccaaaacagaugugucuagcuccgucaucaccagccugggcgccauugugucuugcuacgggaagacaaaauguacggcuuccaauaagugccggggaaucaucaagaccuucagcaacggcugugacuauguuucuaauaaaggcguggacacagucuccguggggaacacccuuuacuauguuaauaagcaagagggacagagccuguacgugaaaggcgagccuauuaucaacuuuuaugauccccucgucuucccuuccgacgaauuugaugccucuauuagccaggugaaugagaagaucaaccagucccuggcuuucauucgcaaaucugacgaacugcuccacaacgugaaugccgggaaguccacaaccaacaucaugauuacgaccaucaucauuguuaucauugucauccugcuuucccugauugccgugggacuccugcuguacugcaaggcuagaugaggacuaguggaagcauuuuccuggcugauuaaaagaaauuacucagcuauggucaucuguuccuguuagaaggcuaugcagcauauuauauacuaugcgcauguuaugaaaugcauaauaaaaaauuuuaaaaaaucuaaaagaucuaaaaaaaaaaaaaaaaaaaaaaaaaaaaaaaaaaaaaaaaaaaaaaaaaaaaaaaaaaaaaaaaugcaucccccccccccccccccccccccccccccccaaaggcucuuuucagagccaccagaauu

SEQ ID NO: 8228 - RNA, 1922 nt, Artificial Sequence
  mRNA product Design h-3 comprising derived and/or modified sequence from HRSV(A2)__F-del_DSCav1_mut8 (opt6)
gggagacccgugacccggaaguuguacggcuacgcgacuuucccucccacaaacccucgcgcccuuccuuuccuacuugggcccggcagaaagcuuaccauggaacuacucauauugaaagccaacgcaaucacaacaauacuaaccgccguaacauuuugcuucgcgucaggccaaaauauaacagaagaauuuuaccaaucaacaugcuccgccguaucaaaaggauaccuaggugcauuacgaaccgguugguacacaucaguaaucacaauagaacuuuccaacauuaaagaaauaaaaugcaauggcacagacgcaaaagucaaacuaauaaaacaagaacuagacaaauauaaaaacgccgucacagacuuacaacuauuaaugcaaagcacaccagcaacaggauccggaucagcaauagcaucaggaguagccgucuguaaaguacuacaccuagaaggcgaaguuaauaaaauuaaaucagcuuuauuaucaaccaacaaagcaguaguaucacuauccggaugcggagucuccguccuaacauucaaaguacuagaccucaagaauuacauagauaaacaacuacuaccaauacucaacaaacaaucauguucaauaccaaacaucgaaaccgucauagaauuucaacaaaaaaauaauagacucuuagaaauaacacgagaauuuagcguaaacgcaggagucacaaccccugucucaacauacaugcuaaccaauuccgaauuauuaucacucauaaaugacaugccaauaacuaaugaccaaaaaaaacuuaugucaaacaacguacaaauaguaagacaacaaucauauucaauaaugugcauaaucaaagaagaaguuuuagcauauguaguacaacuaccacuauauggcgucauagacacaccaugcuggaaauuacacacaucaccucuaugcacaacaaacacaaaagaaggaagcaacauuugccuaaccagaaccgauagaggaugguacugcgauaacgcaggcucaguaucauucuucccucaagccgaaacuugcaaaguccaaucaaauagagucuucugcgauacaaugaacuccuuaacuuuaccaucagaaguaaaucuaugcaacguagauaucuuuaauccaaaauacgauugcaaaaucaugacaucaaaaacagauguaucaucuaguguaauuaccucccuaggagcaauaguaagcugcuacggaaaaacaaaaugcaccgccucuaacaaaugucguggaauaauaaaaacauucucaaacggaugcgauuauguaucaaauaaaggugucgacaccguaucaguaggcaauacacuauacuauguaaauaaacaagaaggacaaucacucuacgucaaaggugaaccaauaauaaacuucuacgacccacuuguauucccaagcgacgaauuugacgcaucaauaagccaaguaaacgaaaaaauaaaccaaucacuagcauucaucagaaaaucagacgaacuacuccacaauguaaaugcaggaaaaucaacaaccaauaucaugauaacaaccauaauaauagucauaauaguaauacuauuaucccucauagccguuggacuacuccuauauuguaaagcacgauaaggacuaguggaagcauuuuccuggcugauuaaaagaaauuacucagcuauggucaucuguuccuguuagaaggcuaugcagcauauuauauacuaugcgcauguuaugaaaugcauaauaaaaaauuuuaaaaaaucuaaaagaucuaaaaaaaaaaaaaaaaaaaaaaaaaaaaaaaaaaaaaaaaaaaaaaaaaaaaaaaaaaaaaaaaugcaucccccccccccccccccccccccccccccccaaaggcucuuuucagagccaccagaauu

SEQ ID NO: 8229 - RNA, 1922 nt, Artificial Sequence
  mRNA product Design h-3 comprising derived and/or modified sequence from HRSV(A2)__F-del_DSCav1_mut8 (opt11)
gggagacccgugacccggaaguuguacggcuacgcgacuuucccucccacaaacccucgcgcccuuccuuuccuacuugggcccggcagaaagcuuaccauggaacuccucauccucaaagccaacgccaucaccaccauacucaccgcaguaaccuucugcuucgcauccggccaaaacaucacagaagaguucuaccagaguaccugcuccgccgucuccaaaggcuaccuuggcgcccuccguaccgggugguacacauccgucaucacaaucgaacucuccaacaucaaagaaauaaagugcaacggcacagacgccaaaguaaaacugauaaagcaagaacucgacaaauacaaaaacgccguaaccgaccuccagcuacuaaugcaauccacucccgccaccggcagcggauccgccaucgccuccggaguagccgucuguaaagucuuacaccucgaaggcgaagugaacaaaaucaaauccgcccuacucucaaccaacaaagccguaguaucacucuccgggugcggcguuucagugcuaacguucaaaguccuugaccucaaaaacuacaucgacaaacaacuccuccccauccuaaauaaacaauccugcuccauacccaacaucgagacugucaucgaguuccagcagaaaaacaaccgacuccucgaaaucacacgcgaguucucugucaacgccggcgucacaacccccgucuccacauacaugcucaccaacagcgaacuccucucccuaaucaaugacaugcccaucaccaacgaccaaaagaaacucaugucaaacaacguccaaaucguccgccaacaauccuacagcaucaugugcaucaucaaagaagaaguucucgcauacguaguacaacucccccucuacggagugaucgacacccccugcuggaaacuacacaccagcccgcuuugcaccacaaacaccaaggaaggcuccaacaucugccucacucgaaccgaccgcggcugguacugcgacaacgcaggcuccgucaguuucuuuccccaagcagaaacaugcaaaguccaauccaaccgaguauucugcgacaccaugaacucccucacccuaccauccgaaguuaaccuaugcaacguggacaucuucaaccccaaguacgacugcaaaauuaugaccuccaaaaccgacguauccuccagcgucaucaccagccucggagcaauagucuccugcuacggcaagaccaagugcaccgcuuccaacaagugucgcggaaucaucaaaaccuucucaaacggcugcgacuacgucuccaacaaaggcgucgacaccguauccguaggaaacacccuauacuacgucaacaaacaagaaggacaaucccucuaugucaaaggcgaacccaucaucaauuucuacgacccccuagucuucccuuccgacgaguucgacgcguccaucagccaagucaaugaaaagaucaaccagagccuggcauucauccgcaaauccgacgaacuccuccacaacgucaacgcgggaaaauccacgacaaacaucaugaucaccaccaucaucaucgucaucauagucauucuccuuucucucaucgccgugggacuacuucucuacugcaaagcccgauaaggacuaguggaagcauuuuccuggcugauuaaaagaaauuacucagcuauggucaucuguuccuguuagaaggcuaugcagcauauuauauacuaugcgcauguuaugaaaugcauaauaaaaaauuuuaaaaaaucuaaaagaucuaaaaaaaaaaaaaaaaaaaaaaaaaaaaaaaaaaaaaaaaaaaaaaaaaaaaaaaaaaaaaaaaugcaucccccccccccccccccccccccccccccccaaaggcucuuuucagagccaccagaauu

SEQ ID NO: 8230 - RNA, 1985 nt, Artificial Sequence
  mRNA product Design h-4 comprising derived and/or modified sequence from HRSV(A2)__F-del_DSCav1_mut8 (opt1)
gggagagggcgcuuggcuugcaaggacccugagcugcggcauugaagcacacccaacccaacucgacugaagucagccucacugaaccggaucugagaaucuucucucucugggcuugccagggcucuccgaaccuagcuagcauccucuucaauuccaacuagaaagcuuaccauggagcugcucauccugaaggccaacgccaucaccaccauccugacggcggugaccuucugcuucgccagcggccagaacaucaccgaggaguucuaccaguccacgugcagcgccgucuccaagggguaccucggcgcccugcggaccggcugguacaccuccgugaucaccaucgagcugagcaacaucaaggagaucaagugcaacgggaccgacgccaaggugaagcucaucaagcaggagcuggacaaguacaagaacgcggucacggaccugcagcuccugaugcaguccaccccggcaaccggcuccggcuccgccaucgcgagcggcgucgccgugugcaaggugcugcaccucgagggggaggucaacaagaucaagagcgcccugcuguccaccaacaaggccguggugagccucuccggcugcggcgucagcgugcugaccuucaaggugcuggaccucaagaacuacaucgacaagcagcugcugcccauccugaacaagcagagcugcuccauccccaacaucgagacggugaucgaguuccagcagaagaacaaccggcuccuggagaucacccgcgaguucagcgugaacgccggggucaccacccccguguccacguacaugcugaccaacagcgagcuccugucccugaucaacgacaugccgaucaccaacgaccagaagaagcucaugagcaacaacgugcagaucguccggcagcaguccuacagcaucaugugcaucaucaaggaggaggugcuggcguacgugguccagcugccccucuacggcgugaucgacacccccugcuggaagcugcacacgagcccccugugcaccaccaacaccaaggagggguccaacaucugccucacgcgcaccgaccggggcugguacugcgacaacgccggcagcgucuccuucuucccgcaggccgagaccugcaaggugcagagcaaccgcguguucugcgacaccaugaacucccugacgcugcccagcgagguaaaccucugcaacgucgacaucuucaaccccaaguacgacugcaagaucaugaccuccaagaccgacgugagcuccagcgugaucaccucccugggggccaucgucagcugcuacggcaagacgaagugcaccgccagcaacaagugccgggggaucaucaagaccuucuccaacggcugcgacuacgugagcaacaagggcguggacaccguguccgucgggaacacccuguacuacgugaacaagcaggagggccagagccucuacgugaagggggagcccaucaucaacuucuacgacccgcuggucuuccccuccgacgaguucgacgcgagcaucucccaggugaacgagaagaucaaccagagccuggccuucauccgcaaguccgacgagcugcuccacaacgugaacgccggcaagagcacgaccaacaucaugaucaccaccaucaucaucgucaucaucgugauccugcugucccucaucgccguggggcugcugcucuacugcaaggcccggugaggacuaguaauaaggaaacuguaugaaugucugugggcaggaagugaagagauccuucuguaaagguuuuuggaauuaugucugcugaauaauaaacuuuuuugaaauaauaaaucugguagaaaaaugagaucuaaaaaaaaaaaaaaaaaaaaaaaaaaaaaaaaaaaaaaaaaaaaaaaaaaaaaaaaaaaaaaaaugcaucccccccccccccccccccccccccccccccaaaggcucuuuucagagccaccagaauu

SEQ ID NO: 8231 - RNA, 1985 nt, Artificial Sequence
  mRNA product Design h-4 comprising derived and/or modified sequence from HRSV(A2)__F-del_DSCav1_mut8 (opt1)
gggagagggcgcuuggcuugcaaggacccugagcugcggcauugaagcacacccaacccaacucgacugaagucagccucacugaaccggaucugagaaucuucucucucugggcuugccagggcucuccgaaccuagcuagcauccucuucaauuccaacuagaaagcuuaccauggagcugcucauccugaaggccaacgccaucaccaccauccugacggcggugaccuucugcuucgccagcggccagaacaucaccgaggaguucuaccaguccacgugcagcgccgucuccaagggguaccucggcgcccugcgcaccgggugguacaccagcgugaucaccaucgagcuguccaacaucaaggagaucaagugcaacggcaccgacgccaaggugaagcucaucaagcaggagcuggacaaguacaagaacgcggucacggaccugcagcuccugaugcagagcacccccgccaccggguccggcagcgccaucgccuccggcguggcggugugcaagguccugcaccucgagggggaggugaacaagaucaagagcgcccugcuguccaccaacaaggccguggucagccucuccggcugcggggugagcgugcugacguucaagguccuggaccucaagaacuacaucgacaagcagcugcugccgauccucaacaagcaguccugcagcauccccaacaucgagaccgugaucgaguuccagcagaagaacaaccggcugcuggagaucacccgcgaguucuccgugaacgccggcgucaccacgcccgugagcaccuacaugcucaccaacuccgagcugcugagccucaucaacgacaugcccaucaccaacgaccagaagaagcugaugagcaacaacgugcagaucguccggcagcaguccuacagcaucaugugcaucaucaaggaggaggugcuggccuacgugguccagcucccgcuguacggggugaucgacacgcccugcuggaagcugcacaccagcccccucugcaccaccaacacgaaggagggcuccaacaucugccugacccgcaccgaccggggcugguacugcgacaacgcgggguccgugagcuucuucccccaggccgagaccugcaagguccaguccaaccgcguguucugcgacacgaugaacagccugacccucccguccgaggucaaccugugcaacguggacaucuucaaccccaaguacgacugcaagaucaugaccagcaagaccgacguguccagcuccgucaucacgagccugggcgccaucguguccugcuacgggaagaccaagugcaccgccagcaacaagugccggggcaucaucaagaccuucuccaacggcugcgacuacgugagcaacaagggggucgacacgguguccgugggcaacacccucuacuacgucaacaagcaggaggggcagagccuguacgugaagggcgagcccaucaucaacuucuacgacccccugguguucccgagcgacgaguucgacgccuccaucagccaggucaacgagaagaucaaccagucccucgcguucauccgcaagagcgacgagcugcugcacaacgugaacgccgggaaguccaccaccaacaucaugaucaccacgaucaucaucgugaucaucgucauccuccugagccugaucgccgugggccuccugcuguacugcaaggcccggugaggacuaguaauaaggaaacuguaugaaugucugugggcaggaagugaagagauccuucuguaaagguuuuuggaauuaugucugcugaauaauaaacuuuuuugaaauaauaaaucugguagaaaaaugagaucuaaaaaaaaaaaaaaaaaaaaaaaaaaaaaaaaaaaaaaaaaaaaaaaaaaaaaaaaaaaaaaaaugcaucccccccccccccccccccccccccccccccaaaggcucuuuucagagccaccagaauu

SEQ ID NO: 8232 - RNA, 1985 nt, Artificial Sequence
  mRNA product Design h-4 comprising derived and/or modified sequence from HRSV(A2)__F-del_DSCav1_mut8 (opt2)
gggagagggcgcuuggcuugcaaggacccugagcugcggcauugaagcacacccaacccaacucgacugaagucagccucacugaaccggaucugagaaucuucucucucugggcuugccagggcucuccgaaccuagcuagcauccucuucaauuccaacuagaaagcuuaccauggagcuccucauccucaaggccaacgccaucaccaccauccucaccgccgucaccuucugcuucgccuccggccagaacaucaccgaggaguucuaccaguccaccugcuccgccgucuccaagggcuaccucggcgcccuccgcaccggcugguacaccuccgucaucaccaucgagcucuccaacaucaaggagaucaagugcaacggcaccgacgccaaggucaagcucaucaagcaggagcucgacaaguacaagaacgccgucaccgaccuccagcuccucaugcaguccacccccgccaccggcuccggcuccgccaucgccuccggcgucgccgucugcaagguccuccaccucgagggcgaggucaacaagaucaaguccgcccuccucuccaccaacaaggccgucgucucccucuccggcugcggcgucuccguccucaccuucaagguccucgaccucaagaacuacaucgacaagcagcuccuccccauccucaacaagcaguccugcuccauccccaacaucgagaccgucaucgaguuccagcagaagaacaaccgccuccucgagaucacccgcgaguucuccgucaacgccggcgucaccacccccgucuccaccuacaugcucaccaacuccgagcuccucucccucaucaacgacaugcccaucaccaacgaccagaagaagcucauguccaacaacguccagaucguccgccagcaguccuacuccaucaugugcaucaucaaggaggagguccucgccuacgucguccagcucccccucuacggcgucaucgacacccccugcuggaagcuccacaccuccccccucugcaccaccaacaccaaggagggcuccaacaucugccucacccgcaccgaccgcggcugguacugcgacaacgccggcuccgucuccuucuucccccaggccgagaccugcaagguccaguccaaccgcgucuucugcgacaccaugaacucccucacccuccccuccgaggucaaccucugcaacgucgacaucuucaaccccaaguacgacugcaagaucaugaccuccaagaccgacgucuccuccuccgucaucaccucccucggcgccaucgucuccugcuacggcaagaccaagugcaccgccuccaacaagugccgcggcaucaucaagaccuucuccaacggcugcgacuacgucuccaacaagggcgucgacaccgucuccgucggcaacacccucuacuacgucaacaagcaggagggccagucccucuacgucaagggcgagcccaucaucaacuucuacgacccccucgucuuccccuccgacgaguucgacgccuccaucucccaggucaacgagaagaucaaccagucccucgccuucauccgcaaguccgacgagcuccuccacaacgucaacgccggcaaguccaccaccaacaucaugaucaccaccaucaucaucgucaucaucgucauccuccucucccucaucgccgucggccuccuccucuacugcaaggcccgcugaggacuaguaauaaggaaacuguaugaaugucugugggcaggaagugaagagauccuucuguaaagguuuuuggaauuaugucugcugaauaauaaacuuuuuugaaauaauaaaucugguagaaaaaugagaucuaaaaaaaaaaaaaaaaaaaaaaaaaaaaaaaaaaaaaaaaaaaaaaaaaaaaaaaaaaaaaaaaugcaucccccccccccccccccccccccccccccccaaaggcucuuuucagagccaccagaauu

SEQ ID NO: 8233 - RNA, 1985 nt, Artificial Sequence
  mRNA product Design h-4 comprising derived and/or modified sequence from HRSV(A2)__F-del_DSCav1_mut8 (opt3)
gggagagggcgcuuggcuugcaaggacccugagcugcggcauugaagcacacccaacccaacucgacugaagucagccucacugaaccggaucugagaaucuucucucucugggcuugccagggcucuccgaaccuagcuagcauccucuucaauuccaacuagaaagcuuaccauggagcugcucauccuuaaggccaacgcuauuaccacaauacugacugcagugacguucugcuuugccagcggccagaauaucaccgaagaguucuaccaauccacauguucugcggucucaaaaggguauuugggagcuuuaagaacugguugguacaccaguguuauuacaaucgaacugagcaacauuaaggagaucaaaugcaauggcaccgacgccaaggugaaacuaauaaagcaggaacucgauaaguauaaaaacgcaguaacugaccugcagcuucugaugcaguccacacccgccaccgggucuggaucggcuaucgcaucaggcguggccgucuguaagguguugcaccucgagggugagguuaauaaaauuaagagcgcucugcugaguacgaacaaagccguggucucccucucugggugcggagugagcguauuaacuuuuaagguucuggaucuuaagaauuacaucgacaaacaauugcugccuauucuaaacaagcaguccuguucaaucccaaauauagaaaccgugauugaguuccagcagaaaaacaauaggcuccuggaaaucacacgggaguuuagugucaacgcgggcgugacuaccccggugagcacauauaugcuuaccaauucugagcuguugucccucauuaacgauaugcccaucacgaaugaccaaaagaaacugaugucaaacaacguccagaucguucgccagcagagcuacaguauuaugugcauaaucaaggaagagguguuagcauauguagugcaacugccucucuacggcgucauugauacuccauguuggaaacuucauacaucuccccugugcaccacuaauacaaaggaaggguccaacaucuguuugacccgaacggaccguggaugguacugcgauaaugccgguagcgugucguucuuuccucaggcugagaccuguaagguucagucuaacagaguguucugcgacacaaugaacucccuaacucugccaucagaagucaaucucugcaauguggauauauuuaaccccaaauaugacuguaagauuaugaccaguaaaacagauguaagcuccucuguuaucacuagccugggcgccaucgugucaugcuacgggaagaccaaauguacagcaaguaauaagugcaggggaauuaucaagaccuucuccaacggcugugacuaugucagcaauaaagguguggacacugucucuguggggaacacgcuuuacuauguuaauaagcaagagggacagucacuguacgugaaaggcgagccuauuauaaacuuuuaugauccauugguauucccgagugacgaauuugaugcuagcaucucccaggucaaugagaagauuaaccagucucucgccuucauccggaaaucggacgaacuguuacacaacgugaaugcgggcaagagcacaaccaacaucaugauuacuaccauaaucauuguuaucauugugauccugcuaucccucauagccgucgggcugcuuuuguacugcaaggcacgcugaggacuaguaauaaggaaacuguaugaaugucugugggcaggaagugaagagauccuucuguaaagguuuuuggaauuaugucugcugaauaauaaacuuuuuugaaauaauaaaucugguagaaaaaugagaucuaaaaaaaaaaaaaaaaaaaaaaaaaaaaaaaaaaaaaaaaaaaaaaaaaaaaaaaaaaaaaaaaugcaucccccccccccccccccccccccccccccccaaaggcucuuuucagagccaccagaauu

SEQ ID NO: 8234 - RNA, 1985 nt, Artificial Sequence
  mRNA product Design h-4 comprising derived and/or modified sequence from HRSV(A2)__F-del_DSCav1_mut8 (opt4)
gggagagggcgcuuggcuugcaaggacccugagcugcggcauugaagcacacccaacccaacucgacugaagucagccucacugaaccggaucugagaaucuucucucucugggcuugccagggcucuccgaaccuagcuagcauccucuucaauuccaacuagaaagcuuaccauggagcugcugauccugaaggccaacgccaucaccaccauccugaccgccgugaccuucugcuucgccagcggccagaacaucaccgaggaguucuaccagagcaccugcagcgccgugagcaagggcuaccugggcgcccugagaaccggcugguacaccagcgugaucaccaucgagcugagcaacaucaaggagaucaagugcaacggcaccgacgccaaggugaagcugaucaagcaggagcuggacaaguacaagaacgccgugaccgaccugcagcugcugaugcagagcacccccgccaccggcagcggcagcgccaucgccagcggcguggccgugugcaaggugcugcaccuggagggcgaggugaacaagaucaagagcgcccugcugagcaccaacaaggccguggugagccugagcggcugcggcgugagcgugcugaccuucaaggugcuggaccugaagaacuacaucgacaagcagcugcugcccauccugaacaagcagagcugcagcauccccaacaucgagaccgugaucgaguuccagcagaagaacaacagacugcuggagaucaccagagaguucagcgugaacgccggcgugaccacccccgugagcaccuacaugcugaccaacagcgagcugcugagccugaucaacgacaugcccaucaccaacgaccagaagaagcugaugagcaacaacgugcagaucgugagacagcagagcuacagcaucaugugcaucaucaaggaggaggugcuggccuacguggugcagcugccccuguacggcgugaucgacacccccugcuggaagcugcacaccagcccccugugcaccaccaacaccaaggagggcagcaacaucugccugaccagaaccgacagaggcugguacugcgacaacgccggcagcgugagcuucuucccccaggccgagaccugcaaggugcagagcaacagaguguucugcgacaccaugaacagccugacccugcccagcgaggugaaccugugcaacguggacaucuucaaccccaaguacgacugcaagaucaugaccagcaagaccgacgugagcagcagcgugaucaccagccugggcgccaucgugagcugcuacggcaagaccaagugcaccgccagcaacaagugcagaggcaucaucaagaccuucagcaacggcugcgacuacgugagcaacaagggcguggacaccgugagcgugggcaacacccuguacuacgugaacaagcaggagggccagagccuguacgugaagggcgagcccaucaucaacuucuacgacccccugguguuccccagcgacgaguucgacgccagcaucagccaggugaacgagaagaucaaccagagccuggccuucaucagaaagagcgacgagcugcugcacaacgugaacgccggcaagagcaccaccaacaucaugaucaccaccaucaucaucgugaucaucgugauccugcugagccugaucgccgugggccugcugcuguacugcaaggccagaugaggacuaguaauaaggaaacuguaugaaugucugugggcaggaagugaagagauccuucuguaaagguuuuuggaauuaugucugcugaauaauaaacuuuuuugaaauaauaaaucugguagaaaaaugagaucuaaaaaaaaaaaaaaaaaaaaaaaaaaaaaaaaaaaaaaaaaaaaaaaaaaaaaaaaaaaaaaaaugcaucccccccccccccccccccccccccccccccaaaggcucuuuucagagccaccagaauu

SEQ ID NO: 8235 - RNA, 1985 nt, Artificial Sequence
  mRNA product Design h-4 comprising derived and/or modified sequence from HRSV(A2)__F-del_DSCav1_mut8 (opt5)
gggagagggcgcuuggcuugcaaggacccugagcugcggcauugaagcacacccaacccaacucgacugaagucagccucacugaaccggaucugagaaucuucucucucugggcuugccagggcucuccgaaccuagcuagcauccucuucaauuccaacuagaaagcuuaccauggagcugcucauccugaaggccaacgcuauuaccacaauccuuacggccgugaccuucugcuuugcgagcggccagaauauuacagaagaguucuaccaauccaccuguucugcugucagcaaaggguaucugggagcccucagaacaggcugguacaccuccguuaucacaauugaacugucuaacaucaaggagaucaaaugcaaugggaccgacgccaaggugaaacuuauuaagcaggaacuggauaaguauaaaaacgcugugacggaccuccagcugcugaugcagagcacccccgccacaggauccggcucugcuaucgccagcggggucgcgguguguaagguucuccaccuggagggagaggugaauaaaauuaaguccgcccuucugagcaccaacaaagcugucgugucucucuccggcugcggcguuagcgugcugacauuuaagguccuugaucugaagaauuacaucgacaaacaacuccugccuauucugaacaagcagucuuguuccaucccgaauauugaaaccgugaucgaguuccagcagaaaaacaaucggcuccuggaaaucacgcgcgaguuuagcgugaacgccggggucacaacccccguuucuacauauaugcuuaccaauuccgagcugcucagccugauuaacgauaugccuaucaccaaugaccaaaagaaacuuauguccaacaacgugcagauugugagacagcagucuuacagcaucaugugcauuaucaaggaagagguccuggcuuaugugguucaacucccccuguacggagugaucgauacaccuuguuggaaacugcauacgagcccccucugcaccacaaauaccaaggaaggcagcaacauuugucugacacggaccgaccgcgggugguacugcgauaaugccggaucugucuccuucuuuccucaggcggagacguguaaggugcagagcaacagaguuuucugcgacacaaugaacucucuuacccugccgagcgaagugaaucucugcaaugucgauaucuuuaaccccaaauaugacuguaagauuaugaccuccaaaacagaugugucuagcuccgucaucaccagccugggcgccauugugucuugcuacgggaagacaaaauguacggcuuccaauaagugccggggaaucaucaagaccuucagcaacggcugugacuauguuucuaauaaaggcguggacacagucuccguggggaacacccuuuacuauguuaauaagcaagagggacagagccuguacgugaaaggcgagccuauuaucaacuuuuaugauccccucgucuucccuuccgacgaauuugaugccucuauuagccaggugaaugagaagaucaaccagucccuggcuuucauucgcaaaucugacgaacugcuccacaacgugaaugccgggaaguccacaaccaacaucaugauuacgaccaucaucauuguuaucauugucauccugcuuucccugauugccgugggacuccugcuguacugcaaggcuagaugaggacuaguaauaaggaaacuguaugaaugucugugggcaggaagugaagagauccuucuguaaagguuuuuggaauuaugucugcugaauaauaaacuuuuuugaaauaauaaaucugguagaaaaaugagaucuaaaaaaaaaaaaaaaaaaaaaaaaaaaaaaaaaaaaaaaaaaaaaaaaaaaaaaaaaaaaaaaaugcaucccccccccccccccccccccccccccccccaaaggcucuuuucagagccaccagaauu

SEQ ID NO: 8236 - RNA, 1985 nt, Artificial Sequence
  mRNA product Design h-4 comprising derived and/or modified sequence from HRSV(A2)__F-del_DSCav1_mut8 (opt6)
gggagagggcgcuuggcuugcaaggacccugagcugcggcauugaagcacacccaacccaacucgacugaagucagccucacugaaccggaucugagaaucuucucucucugggcuugccagggcucuccgaaccuagcuagcauccucuucaauuccaacuagaaagcuuaccauggaacuacucauauugaaagccaacgcaaucacaacaauacuaaccgccguaacauuuugcuucgcgucaggccaaaauauaacagaagaauuuuaccaaucaacaugcuccgccguaucaaaaggauaccuaggugcauuacgaaccgguugguacacaucaguaaucacaauagaacuuuccaacauuaaagaaauaaaaugcaauggcacagacgcaaaagucaaacuaauaaaacaagaacuagacaaauauaaaaacgccgucacagacuuacaacuauuaaugcaaagcacaccagcaacaggauccggaucagcaauagcaucaggaguagccgucuguaaaguacuacaccuagaaggcgaaguuaauaaaauuaaaucagcuuuauuaucaaccaacaaagcaguaguaucacuauccggaugcggagucuccguccuaacauucaaaguacuagaccucaagaauuacauagauaaacaacuacuaccaauacucaacaaacaaucauguucaauaccaaacaucgaaaccgucauagaauuucaacaaaaaaauaauagacucuuagaaauaacacgagaauuuagcguaaacgcaggagucacaaccccugucucaacauacaugcuaaccaauuccgaauuauuaucacucauaaaugacaugccaauaacuaaugaccaaaaaaaacuuaugucaaacaacguacaaauaguaagacaacaaucauauucaauaaugugcauaaucaaagaagaaguuuuagcauauguaguacaacuaccacuauauggcgucauagacacaccaugcuggaaauuacacacaucaccucuaugcacaacaaacacaaaagaaggaagcaacauuugccuaaccagaaccgauagaggaugguacugcgauaacgcaggcucaguaucauucuucccucaagccgaaacuugcaaaguccaaucaaauagagucuucugcgauacaaugaacuccuuaacuuuaccaucagaaguaaaucuaugcaacguagauaucuuuaauccaaaauacgauugcaaaaucaugacaucaaaaacagauguaucaucuaguguaauuaccucccuaggagcaauaguaagcugcuacggaaaaacaaaaugcaccgccucuaacaaaugucguggaauaauaaaaacauucucaaacggaugcgauuauguaucaaauaaaggugucgacaccguaucaguaggcaauacacuauacuauguaaauaaacaagaaggacaaucacucuacgucaaaggugaaccaauaauaaacuucuacgacccacuuguauucccaagcgacgaauuugacgcaucaauaagccaaguaaacgaaaaaauaaaccaaucacuagcauucaucagaaaaucagacgaacuacuccacaauguaaaugcaggaaaaucaacaaccaauaucaugauaacaaccauaauaauagucauaauaguaauacuauuaucccucauagccguuggacuacuccuauauuguaaagcacgauaaggacuaguaauaaggaaacuguaugaaugucugugggcaggaagugaagagauccuucuguaaagguuuuuggaauuaugucugcugaauaauaaacuuuuuugaaauaauaaaucugguagaaaaaugagaucuaaaaaaaaaaaaaaaaaaaaaaaaaaaaaaaaaaaaaaaaaaaaaaaaaaaaaaaaaaaaaaaaugcaucccccccccccccccccccccccccccccccaaaggcucuuuucagagccaccagaauu

SEQ ID NO: 8237 - RNA, 1985 nt, Artificial Sequence
  mRNA product Design h-4 comprising derived and/or modified sequence from HRSV(A2)__F-del_DSCav1_mut8 (opt11)
gggagagggcgcuuggcuugcaaggacccugagcugcggcauugaagcacacccaacccaacucgacugaagucagccucacugaaccggaucugagaaucuucucucucugggcuugccagggcucuccgaaccuagcuagcauccucuucaauuccaacuagaaagcuuaccauggaacuccucauccucaaagccaacgccaucaccaccauacucaccgcaguaaccuucugcuucgcauccggccaaaacaucacagaagaguucuaccagaguaccugcuccgccgucuccaaaggcuaccuuggcgcccuccguaccgggugguacacauccgucaucacaaucgaacucuccaacaucaaagaaauaaagugcaacggcacagacgccaaaguaaaacugauaaagcaagaacucgacaaauacaaaaacgccguaaccgaccuccagcuacuaaugcaauccacucccgccaccggcagcggauccgccaucgccuccggaguagccgucuguaaagucuuacaccucgaaggcgaagugaacaaaaucaaauccgcccuacucucaaccaacaaagccguaguaucacucuccgggugcggcguuucagugcuaacguucaaaguccuugaccucaaaaacuacaucgacaaacaacuccuccccauccuaaauaaacaauccugcuccauacccaacaucgagacugucaucgaguuccagcagaaaaacaaccgacuccucgaaaucacacgcgaguucucugucaacgccggcgucacaacccccgucuccacauacaugcucaccaacagcgaacuccucucccuaaucaaugacaugcccaucaccaacgaccaaaagaaacucaugucaaacaacguccaaaucguccgccaacaauccuacagcaucaugugcaucaucaaagaagaaguucucgcauacguaguacaacucccccucuacggagugaucgacacccccugcuggaaacuacacaccagcccgcuuugcaccacaaacaccaaggaaggcuccaacaucugccucacucgaaccgaccgcggcugguacugcgacaacgcaggcuccgucaguuucuuuccccaagcagaaacaugcaaaguccaauccaaccgaguauucugcgacaccaugaacucccucacccuaccauccgaaguuaaccuaugcaacguggacaucuucaaccccaaguacgacugcaaaauuaugaccuccaaaaccgacguauccuccagcgucaucaccagccucggagcaauagucuccugcuacggcaagaccaagugcaccgcuuccaacaagugucgcggaaucaucaaaaccuucucaaacggcugcgacuacgucuccaacaaaggcgucgacaccguauccguaggaaacacccuauacuacgucaacaaacaagaaggacaaucccucuaugucaaaggcgaacccaucaucaauuucuacgacccccuagucuucccuuccgacgaguucgacgcguccaucagccaagucaaugaaaagaucaaccagagccuggcauucauccgcaaauccgacgaacuccuccacaacgucaacgcgggaaaauccacgacaaacaucaugaucaccaccaucaucaucgucaucauagucauucuccuuucucucaucgccgugggacuacuucucuacugcaaagcccgauaaggacuaguaauaaggaaacuguaugaaugucugugggcaggaagugaagagauccuucuguaaagguuuuuggaauuaugucugcugaauaauaaacuuuuuugaaauaauaaaucugguagaaaaaugagaucuaaaaaaaaaaaaaaaaaaaaaaaaaaaaaaaaaaaaaaaaaaaaaaaaaaaaaaaaaaaaaaaaugcaucccccccccccccccccccccccccccccccaaaggcucuuuucagagccaccagaauu

SEQ ID NO: 8238 - RNA, 2001 nt, Artificial Sequence
  mRNA product Design h-5 comprising derived and/or modified sequence from HRSV(A2)__F-del_DSCav1_mut8 (opt1)
gggagagggcgcuuggcuugcaaggacccugagcugcggcauugaagcacacccaacccaacucgacugaagucagccucacugaaccggaucugagaaucuucucucucugggcuugccagggcucuccgaaccuagcuagcauccucuucaauuccaacuagaaagcuuaccauggagcugcucauccugaaggccaacgccaucaccaccauccugacggcggugaccuucugcuucgccagcggccagaacaucaccgaggaguucuaccaguccacgugcagcgccgucuccaagggguaccucggcgcccugcggaccggcugguacaccuccgugaucaccaucgagcugagcaacaucaaggagaucaagugcaacgggaccgacgccaaggugaagcucaucaagcaggagcuggacaaguacaagaacgcggucacggaccugcagcuccugaugcaguccaccccggcaaccggcuccggcuccgccaucgcgagcggcgucgccgugugcaaggugcugcaccucgagggggaggucaacaagaucaagagcgcccugcuguccaccaacaaggccguggugagccucuccggcugcggcgucagcgugcugaccuucaaggugcuggaccucaagaacuacaucgacaagcagcugcugcccauccugaacaagcagagcugcuccauccccaacaucgagacggugaucgaguuccagcagaagaacaaccggcuccuggagaucacccgcgaguucagcgugaacgccggggucaccacccccguguccacguacaugcugaccaacagcgagcuccugucccugaucaacgacaugccgaucaccaacgaccagaagaagcucaugagcaacaacgugcagaucguccggcagcaguccuacagcaucaugugcaucaucaaggaggaggugcuggcguacgugguccagcugccccucuacggcgugaucgacacccccugcuggaagcugcacacgagcccccugugcaccaccaacaccaaggagggguccaacaucugccucacgcgcaccgaccggggcugguacugcgacaacgccggcagcgucuccuucuucccgcaggccgagaccugcaaggugcagagcaaccgcguguucugcgacaccaugaacucccugacgcugcccagcgagguaaaccucugcaacgucgacaucuucaaccccaaguacgacugcaagaucaugaccuccaagaccgacgugagcuccagcgugaucaccucccugggggccaucgucagcugcuacggcaagacgaagugcaccgccagcaacaagugccgggggaucaucaagaccuucuccaacggcugcgacuacgugagcaacaagggcguggacaccguguccgucgggaacacccuguacuacgugaacaagcaggagggccagagccucuacgugaagggggagcccaucaucaacuucuacgacccgcuggucuuccccuccgacgaguucgacgcgagcaucucccaggugaacgagaagaucaaccagagccuggccuucauccgcaaguccgacgagcugcuccacaacgugaacgccggcaagagcacgaccaacaucaugaucaccaccaucaucaucgucaucaucgugauccugcugucccucaucgccguggggcugcugcucuacugcaaggcccggugaggacuaguacuggcugcaucucccuuuccucuguccuccauccuucucccaggauggugaagggggaccugguacccagugauccccaccccaggauccuaaaucaugacuuaccugcuaauaaaaacucauuggaaaagugagaagaucuaaaaaaaaaaaaaaaaaaaaaaaaaaaaaaaaaaaaaaaaaaaaaaaaaaaaaaaaaaaaaaaaugcaucccccccccccccccccccccccccccccccaaaggcucuuuucagagccaccagaauu

SEQ ID NO: 8239 - RNA, 2001 nt, Artificial Sequence
  mRNA product Design h-5 comprising derived and/or modified sequence from HRSV(A2)__F-del_DSCav1_mut8 (opt1)
gggagagggcgcuuggcuugcaaggacccugagcugcggcauugaagcacacccaacccaacucgacugaagucagccucacugaaccggaucugagaaucuucucucucugggcuugccagggcucuccgaaccuagcuagcauccucuucaauuccaacuagaaagcuuaccauggagcugcucauccugaaggccaacgccaucaccaccauccugacggcggugaccuucugcuucgccagcggccagaacaucaccgaggaguucuaccaguccacgugcagcgccgucuccaagggguaccucggcgcccugcgcaccgggugguacaccagcgugaucaccaucgagcuguccaacaucaaggagaucaagugcaacggcaccgacgccaaggugaagcucaucaagcaggagcuggacaaguacaagaacgcggucacggaccugcagcuccugaugcagagcacccccgccaccggguccggcagcgccaucgccuccggcguggcggugugcaagguccugcaccucgagggggaggugaacaagaucaagagcgcccugcuguccaccaacaaggccguggucagccucuccggcugcggggugagcgugcugacguucaagguccuggaccucaagaacuacaucgacaagcagcugcugccgauccucaacaagcaguccugcagcauccccaacaucgagaccgugaucgaguuccagcagaagaacaaccggcugcuggagaucacccgcgaguucuccgugaacgccggcgucaccacgcccgugagcaccuacaugcucaccaacuccgagcugcugagccucaucaacgacaugcccaucaccaacgaccagaagaagcugaugagcaacaacgugcagaucguccggcagcaguccuacagcaucaugugcaucaucaaggaggaggugcuggccuacgugguccagcucccgcuguacggggugaucgacacgcccugcuggaagcugcacaccagcccccucugcaccaccaacacgaaggagggcuccaacaucugccugacccgcaccgaccggggcugguacugcgacaacgcgggguccgugagcuucuucccccaggccgagaccugcaagguccaguccaaccgcguguucugcgacacgaugaacagccugacccucccguccgaggucaaccugugcaacguggacaucuucaaccccaaguacgacugcaagaucaugaccagcaagaccgacguguccagcuccgucaucacgagccugggcgccaucguguccugcuacgggaagaccaagugcaccgccagcaacaagugccggggcaucaucaagaccuucuccaacggcugcgacuacgugagcaacaagggggucgacacgguguccgugggcaacacccucuacuacgucaacaagcaggaggggcagagccuguacgugaagggcgagcccaucaucaacuucuacgacccccugguguucccgagcgacgaguucgacgccuccaucagccaggucaacgagaagaucaaccagucccucgcguucauccgcaagagcgacgagcugcugcacaacgugaacgccgggaaguccaccaccaacaucaugaucaccacgaucaucaucgugaucaucgucauccuccugagccugaucgccgugggccuccugcuguacugcaaggcccggugaggacuaguacuggcugcaucucccuuuccucuguccuccauccuucucccaggauggugaagggggaccugguacccagugauccccaccccaggauccuaaaucaugacuuaccugcuaauaaaaacucauuggaaaagugagaagaucuaaaaaaaaaaaaaaaaaaaaaaaaaaaaaaaaaaaaaaaaaaaaaaaaaaaaaaaaaaaaaaaaugcaucccccccccccccccccccccccccccccccaaaggcucuuuucagagccaccagaauu

SEQ ID NO: 8240 - RNA, 2001 nt, Artificial Sequence
  mRNA product Design h-5 comprising derived and/or modified sequence from HRSV(A2)__F-del_DSCav1_mut8 (opt2)
gggagagggcgcuuggcuugcaaggacccugagcugcggcauugaagcacacccaacccaacucgacugaagucagccucacugaaccggaucugagaaucuucucucucugggcuugccagggcucuccgaaccuagcuagcauccucuucaauuccaacuagaaagcuuaccauggagcuccucauccucaaggccaacgccaucaccaccauccucaccgccgucaccuucugcuucgccuccggccagaacaucaccgaggaguucuaccaguccaccugcuccgccgucuccaagggcuaccucggcgcccuccgcaccggcugguacaccuccgucaucaccaucgagcucuccaacaucaaggagaucaagugcaacggcaccgacgccaaggucaagcucaucaagcaggagcucgacaaguacaagaacgccgucaccgaccuccagcuccucaugcaguccacccccgccaccggcuccggcuccgccaucgccuccggcgucgccgucugcaagguccuccaccucgagggcgaggucaacaagaucaaguccgcccuccucuccaccaacaaggccgucgucucccucuccggcugcggcgucuccguccucaccuucaagguccucgaccucaagaacuacaucgacaagcagcuccuccccauccucaacaagcaguccugcuccauccccaacaucgagaccgucaucgaguuccagcagaagaacaaccgccuccucgagaucacccgcgaguucuccgucaacgccggcgucaccacccccgucuccaccuacaugcucaccaacuccgagcuccucucccucaucaacgacaugcccaucaccaacgaccagaagaagcucauguccaacaacguccagaucguccgccagcaguccuacuccaucaugugcaucaucaaggaggagguccucgccuacgucguccagcucccccucuacggcgucaucgacacccccugcuggaagcuccacaccuccccccucugcaccaccaacaccaaggagggcuccaacaucugccucacccgcaccgaccgcggcugguacugcgacaacgccggcuccgucuccuucuucccccaggccgagaccugcaagguccaguccaaccgcgucuucugcgacaccaugaacucccucacccuccccuccgaggucaaccucugcaacgucgacaucuucaaccccaaguacgacugcaagaucaugaccuccaagaccgacgucuccuccuccgucaucaccucccucggcgccaucgucuccugcuacggcaagaccaagugcaccgccuccaacaagugccgcggcaucaucaagaccuucuccaacggcugcgacuacgucuccaacaagggcgucgacaccgucuccgucggcaacacccucuacuacgucaacaagcaggagggccagucccucuacgucaagggcgagcccaucaucaacuucuacgacccccucgucuuccccuccgacgaguucgacgccuccaucucccaggucaacgagaagaucaaccagucccucgccuucauccgcaaguccgacgagcuccuccacaacgucaacgccggcaaguccaccaccaacaucaugaucaccaccaucaucaucgucaucaucgucauccuccucucccucaucgccgucggccuccuccucuacugcaaggcccgcugaggacuaguacuggcugcaucucccuuuccucuguccuccauccuucucccaggauggugaagggggaccugguacccagugauccccaccccaggauccuaaaucaugacuuaccugcuaauaaaaacucauuggaaaagugagaagaucuaaaaaaaaaaaaaaaaaaaaaaaaaaaaaaaaaaaaaaaaaaaaaaaaaaaaaaaaaaaaaaaaugcaucccccccccccccccccccccccccccccccaaaggcucuuuucagagccaccagaauu

SEQ ID NO: 8241 - RNA, 2001 nt, Artificial Sequence
  mRNA product Design h-5 comprising derived and/or modified sequence from HRSV(A2)__F-del_DSCav1_mut8 (opt3)
gggagagggcgcuuggcuugcaaggacccugagcugcggcauugaagcacacccaacccaacucgacugaagucagccucacugaaccggaucugagaaucuucucucucugggcuugccagggcucuccgaaccuagcuagcauccucuucaauuccaacuagaaagcuuaccauggagcugcucauccuuaaggccaacgcuauuaccacaauacugacugcagugacguucugcuuugccagcggccagaauaucaccgaagaguucuaccaauccacauguucugcggucucaaaaggguauuugggagcuuuaagaacugguugguacaccaguguuauuacaaucgaacugagcaacauuaaggagaucaaaugcaauggcaccgacgccaaggugaaacuaauaaagcaggaacucgauaaguauaaaaacgcaguaacugaccugcagcuucugaugcaguccacacccgccaccgggucuggaucggcuaucgcaucaggcguggccgucuguaagguguugcaccucgagggugagguuaauaaaauuaagagcgcucugcugaguacgaacaaagccguggucucccucucugggugcggagugagcguauuaacuuuuaagguucuggaucuuaagaauuacaucgacaaacaauugcugccuauucuaaacaagcaguccuguucaaucccaaauauagaaaccgugauugaguuccagcagaaaaacaauaggcuccuggaaaucacacgggaguuuagugucaacgcgggcgugacuaccccggugagcacauauaugcuuaccaauucugagcuguugucccucauuaacgauaugcccaucacgaaugaccaaaagaaacugaugucaaacaacguccagaucguucgccagcagagcuacaguauuaugugcauaaucaaggaagagguguuagcauauguagugcaacugccucucuacggcgucauugauacuccauguuggaaacuucauacaucuccccugugcaccacuaauacaaaggaaggguccaacaucuguuugacccgaacggaccguggaugguacugcgauaaugccgguagcgugucguucuuuccucaggcugagaccuguaagguucagucuaacagaguguucugcgacacaaugaacucccuaacucugccaucagaagucaaucucugcaauguggauauauuuaaccccaaauaugacuguaagauuaugaccaguaaaacagauguaagcuccucuguuaucacuagccugggcgccaucgugucaugcuacgggaagaccaaauguacagcaaguaauaagugcaggggaauuaucaagaccuucuccaacggcugugacuaugucagcaauaaagguguggacacugucucuguggggaacacgcuuuacuauguuaauaagcaagagggacagucacuguacgugaaaggcgagccuauuauaaacuuuuaugauccauugguauucccgagugacgaauuugaugcuagcaucucccaggucaaugagaagauuaaccagucucucgccuucauccggaaaucggacgaacuguuacacaacgugaaugcgggcaagagcacaaccaacaucaugauuacuaccauaaucauuguuaucauugugauccugcuaucccucauagccgucgggcugcuuuuguacugcaaggcacgcugaggacuaguacuggcugcaucucccuuuccucuguccuccauccuucucccaggauggugaagggggaccugguacccagugauccccaccccaggauccuaaaucaugacuuaccugcuaauaaaaacucauuggaaaagugagaagaucuaaaaaaaaaaaaaaaaaaaaaaaaaaaaaaaaaaaaaaaaaaaaaaaaaaaaaaaaaaaaaaaaugcaucccccccccccccccccccccccccccccccaaaggcucuuuucagagccaccagaauu

SEQ ID NO: 8242 - RNA, 2001 nt, Artificial Sequence
  mRNA product Design h-5 comprising derived and/or modified sequence from HRSV(A2)__F-del_DSCav1_mut8 (opt4)
gggagagggcgcuuggcuugcaaggacccugagcugcggcauugaagcacacccaacccaacucgacugaagucagccucacugaaccggaucugagaaucuucucucucugggcuugccagggcucuccgaaccuagcuagcauccucuucaauuccaacuagaaagcuuaccauggagcugcugauccugaaggccaacgccaucaccaccauccugaccgccgugaccuucugcuucgccagcggccagaacaucaccgaggaguucuaccagagcaccugcagcgccgugagcaagggcuaccugggcgcccugagaaccggcugguacaccagcgugaucaccaucgagcugagcaacaucaaggagaucaagugcaacggcaccgacgccaaggugaagcugaucaagcaggagcuggacaaguacaagaacgccgugaccgaccugcagcugcugaugcagagcacccccgccaccggcagcggcagcgccaucgccagcggcguggccgugugcaaggugcugcaccuggagggcgaggugaacaagaucaagagcgcccugcugagcaccaacaaggccguggugagccugagcggcugcggcgugagcgugcugaccuucaaggugcuggaccugaagaacuacaucgacaagcagcugcugcccauccugaacaagcagagcugcagcauccccaacaucgagaccgugaucgaguuccagcagaagaacaacagacugcuggagaucaccagagaguucagcgugaacgccggcgugaccacccccgugagcaccuacaugcugaccaacagcgagcugcugagccugaucaacgacaugcccaucaccaacgaccagaagaagcugaugagcaacaacgugcagaucgugagacagcagagcuacagcaucaugugcaucaucaaggaggaggugcuggccuacguggugcagcugccccuguacggcgugaucgacacccccugcuggaagcugcacaccagcccccugugcaccaccaacaccaaggagggcagcaacaucugccugaccagaaccgacagaggcugguacugcgacaacgccggcagcgugagcuucuucccccaggccgagaccugcaaggugcagagcaacagaguguucugcgacaccaugaacagccugacccugcccagcgaggugaaccugugcaacguggacaucuucaaccccaaguacgacugcaagaucaugaccagcaagaccgacgugagcagcagcgugaucaccagccugggcgccaucgugagcugcuacggcaagaccaagugcaccgccagcaacaagugcagaggcaucaucaagaccuucagcaacggcugcgacuacgugagcaacaagggcguggacaccgugagcgugggcaacacccuguacuacgugaacaagcaggagggccagagccuguacgugaagggcgagcccaucaucaacuucuacgacccccugguguuccccagcgacgaguucgacgccagcaucagccaggugaacgagaagaucaaccagagccuggccuucaucagaaagagcgacgagcugcugcacaacgugaacgccggcaagagcaccaccaacaucaugaucaccaccaucaucaucgugaucaucgugauccugcugagccugaucgccgugggccugcugcuguacugcaaggccagaugaggacuaguacuggcugcaucucccuuuccucuguccuccauccuucucccaggauggugaagggggaccugguacccagugauccccaccccaggauccuaaaucaugacuuaccugcuaauaaaaacucauuggaaaagugagaagaucuaaaaaaaaaaaaaaaaaaaaaaaaaaaaaaaaaaaaaaaaaaaaaaaaaaaaaaaaaaaaaaaaugcaucccccccccccccccccccccccccccccccaaaggcucuuuucagagccaccagaauu

SEQ ID NO: 8243 - RNA, 2001 nt, Artificial Sequence
  mRNA product Design h-5 comprising derived and/or modified sequence from HRSV(A2)__F-del_DSCav1_mut8 (opt5)
gggagagggcgcuuggcuugcaaggacccugagcugcggcauugaagcacacccaacccaacucgacugaagucagccucacugaaccggaucugagaaucuucucucucugggcuugccagggcucuccgaaccuagcuagcauccucuucaauuccaacuagaaagcuuaccauggagcugcucauccugaaggccaacgcuauuaccacaauccuuacggccgugaccuucugcuuugcgagcggccagaauauuacagaagaguucuaccaauccaccuguucugcugucagcaaaggguaucugggagcccucagaacaggcugguacaccuccguuaucacaauugaacugucuaacaucaaggagaucaaaugcaaugggaccgacgccaaggugaaacuuauuaagcaggaacuggauaaguauaaaaacgcugugacggaccuccagcugcugaugcagagcacccccgccacaggauccggcucugcuaucgccagcggggucgcgguguguaagguucuccaccuggagggagaggugaauaaaauuaaguccgcccuucugagcaccaacaaagcugucgugucucucuccggcugcggcguuagcgugcugacauuuaagguccuugaucugaagaauuacaucgacaaacaacuccugccuauucugaacaagcagucuuguuccaucccgaauauugaaaccgugaucgaguuccagcagaaaaacaaucggcuccuggaaaucacgcgcgaguuuagcgugaacgccggggucacaacccccguuucuacauauaugcuuaccaauuccgagcugcucagccugauuaacgauaugccuaucaccaaugaccaaaagaaacuuauguccaacaacgugcagauugugagacagcagucuuacagcaucaugugcauuaucaaggaagagguccuggcuuaugugguucaacucccccuguacggagugaucgauacaccuuguuggaaacugcauacgagcccccucugcaccacaaauaccaaggaaggcagcaacauuugucugacacggaccgaccgcgggugguacugcgauaaugccggaucugucuccuucuuuccucaggcggagacguguaaggugcagagcaacagaguuuucugcgacacaaugaacucucuuacccugccgagcgaagugaaucucugcaaugucgauaucuuuaaccccaaauaugacuguaagauuaugaccuccaaaacagaugugucuagcuccgucaucaccagccugggcgccauugugucuugcuacgggaagacaaaauguacggcuuccaauaagugccggggaaucaucaagaccuucagcaacggcugugacuauguuucuaauaaaggcguggacacagucuccguggggaacacccuuuacuauguuaauaagcaagagggacagagccuguacgugaaaggcgagccuauuaucaacuuuuaugauccccucgucuucccuuccgacgaauuugaugccucuauuagccaggugaaugagaagaucaaccagucccuggcuuucauucgcaaaucugacgaacugcuccacaacgugaaugccgggaaguccacaaccaacaucaugauuacgaccaucaucauuguuaucauugucauccugcuuucccugauugccgugggacuccugcuguacugcaaggcuagaugaggacuaguacuggcugcaucucccuuuccucuguccuccauccuucucccaggauggugaagggggaccugguacccagugauccccaccccaggauccuaaaucaugacuuaccugcuaauaaaaacucauuggaaaagugagaagaucuaaaaaaaaaaaaaaaaaaaaaaaaaaaaaaaaaaaaaaaaaaaaaaaaaaaaaaaaaaaaaaaaugcaucccccccccccccccccccccccccccccccaaaggcucuuuucagagccaccagaauu

SEQ ID NO: 8244 - RNA, 2001 nt, Artificial Sequence
  mRNA product Design h-5 comprising derived and/or modified sequence from HRSV(A2)__F-del_DSCav1_mut8 (opt6)
gggagagggcgcuuggcuugcaaggacccugagcugcggcauugaagcacacccaacccaacucgacugaagucagccucacugaaccggaucugagaaucuucucucucugggcuugccagggcucuccgaaccuagcuagcauccucuucaauuccaacuagaaagcuuaccauggaacuacucauauugaaagccaacgcaaucacaacaauacuaaccgccguaacauuuugcuucgcgucaggccaaaauauaacagaagaauuuuaccaaucaacaugcuccgccguaucaaaaggauaccuaggugcauuacgaaccgguugguacacaucaguaaucacaauagaacuuuccaacauuaaagaaauaaaaugcaauggcacagacgcaaaagucaaacuaauaaaacaagaacuagacaaauauaaaaacgccgucacagacuuacaacuauuaaugcaaagcacaccagcaacaggauccggaucagcaauagcaucaggaguagccgucuguaaaguacuacaccuagaaggcgaaguuaauaaaauuaaaucagcuuuauuaucaaccaacaaagcaguaguaucacuauccggaugcggagucuccguccuaacauucaaaguacuagaccucaagaauuacauagauaaacaacuacuaccaauacucaacaaacaaucauguucaauaccaaacaucgaaaccgucauagaauuucaacaaaaaaauaauagacucuuagaaauaacacgagaauuuagcguaaacgcaggagucacaaccccugucucaacauacaugcuaaccaauuccgaauuauuaucacucauaaaugacaugccaauaacuaaugaccaaaaaaaacuuaugucaaacaacguacaaauaguaagacaacaaucauauucaauaaugugcauaaucaaagaagaaguuuuagcauauguaguacaacuaccacuauauggcgucauagacacaccaugcuggaaauuacacacaucaccucuaugcacaacaaacacaaaagaaggaagcaacauuugccuaaccagaaccgauagaggaugguacugcgauaacgcaggcucaguaucauucuucccucaagccgaaacuugcaaaguccaaucaaauagagucuucugcgauacaaugaacuccuuaacuuuaccaucagaaguaaaucuaugcaacguagauaucuuuaauccaaaauacgauugcaaaaucaugacaucaaaaacagauguaucaucuaguguaauuaccucccuaggagcaauaguaagcugcuacggaaaaacaaaaugcaccgccucuaacaaaugucguggaauaauaaaaacauucucaaacggaugcgauuauguaucaaauaaaggugucgacaccguaucaguaggcaauacacuauacuauguaaauaaacaagaaggacaaucacucuacgucaaaggugaaccaauaauaaacuucuacgacccacuuguauucccaagcgacgaauuugacgcaucaauaagccaaguaaacgaaaaaauaaaccaaucacuagcauucaucagaaaaucagacgaacuacuccacaauguaaaugcaggaaaaucaacaaccaauaucaugauaacaaccauaauaauagucauaauaguaauacuauuaucccucauagccguuggacuacuccuauauuguaaagcacgauaaggacuaguacuggcugcaucucccuuuccucuguccuccauccuucucccaggauggugaagggggaccugguacccagugauccccaccccaggauccuaaaucaugacuuaccugcuaauaaaaacucauuggaaaagugagaagaucuaaaaaaaaaaaaaaaaaaaaaaaaaaaaaaaaaaaaaaaaaaaaaaaaaaaaaaaaaaaaaaaaugcaucccccccccccccccccccccccccccccccaaaggcucuuuucagagccaccagaauu

SEQ ID NO: 8245 - RNA, 2001 nt, Artificial Sequence
  mRNA product Design h-5 comprising derived and/or modified sequence from HRSV(A2)__F-del_DSCav1_mut8 (opt11)
gggagagggcgcuuggcuugcaaggacccugagcugcggcauugaagcacacccaacccaacucgacugaagucagccucacugaaccggaucugagaaucuucucucucugggcuugccagggcucuccgaaccuagcuagcauccucuucaauuccaacuagaaagcuuaccauggaacuccucauccucaaagccaacgccaucaccaccauacucaccgcaguaaccuucugcuucgcauccggccaaaacaucacagaagaguucuaccagaguaccugcuccgccgucuccaaaggcuaccuuggcgcccuccguaccgggugguacacauccgucaucacaaucgaacucuccaacaucaaagaaauaaagugcaacggcacagacgccaaaguaaaacugauaaagcaagaacucgacaaauacaaaaacgccguaaccgaccuccagcuacuaaugcaauccacucccgccaccggcagcggauccgccaucgccuccggaguagccgucuguaaagucuuacaccucgaaggcgaagugaacaaaaucaaauccgcccuacucucaaccaacaaagccguaguaucacucuccgggugcggcguuucagugcuaacguucaaaguccuugaccucaaaaacuacaucgacaaacaacuccuccccauccuaaauaaacaauccugcuccauacccaacaucgagacugucaucgaguuccagcagaaaaacaaccgacuccucgaaaucacacgcgaguucucugucaacgccggcgucacaacccccgucuccacauacaugcucaccaacagcgaacuccucucccuaaucaaugacaugcccaucaccaacgaccaaaagaaacucaugucaaacaacguccaaaucguccgccaacaauccuacagcaucaugugcaucaucaaagaagaaguucucgcauacguaguacaacucccccucuacggagugaucgacacccccugcuggaaacuacacaccagcccgcuuugcaccacaaacaccaaggaaggcuccaacaucugccucacucgaaccgaccgcggcugguacugcgacaacgcaggcuccgucaguuucuuuccccaagcagaaacaugcaaaguccaauccaaccgaguauucugcgacaccaugaacucccucacccuaccauccgaaguuaaccuaugcaacguggacaucuucaaccccaaguacgacugcaaaauuaugaccuccaaaaccgacguauccuccagcgucaucaccagccucggagcaauagucuccugcuacggcaagaccaagugcaccgcuuccaacaagugucgcggaaucaucaaaaccuucucaaacggcugcgacuacgucuccaacaaaggcgucgacaccguauccguaggaaacacccuauacuacgucaacaaacaagaaggacaaucccucuaugucaaaggcgaacccaucaucaauuucuacgacccccuagucuucccuuccgacgaguucgacgcguccaucagccaagucaaugaaaagaucaaccagagccuggcauucauccgcaaauccgacgaacuccuccacaacgucaacgcgggaaaauccacgacaaacaucaugaucaccaccaucaucaucgucaucauagucauucuccuuucucucaucgccgugggacuacuucucuacugcaaagcccgauaaggacuaguacuggcugcaucucccuuuccucuguccuccauccuucucccaggauggugaagggggaccugguacccagugauccccaccccaggauccuaaaucaugacuuaccugcuaauaaaaacucauuggaaaagugagaagaucuaaaaaaaaaaaaaaaaaaaaaaaaaaaaaaaaaaaaaaaaaaaaaaaaaaaaaaaaaaaaaaaaugcaucccccccccccccccccccccccccccccccaaaggcucuuuucagagccaccagaauu

SEQ ID NO: 8246 - RNA, 1934 nt, Artificial Sequence
  mRNA product Design i-1 comprising derived and/or modified sequence from HRSV(A2)__F-del_DSCav1_mut8 (opt1)
gggagagggcgcuuggcuugcaaggacccugagcugcggcauugaagcacacccaacccaacucgacugaagucagccucacugaaccggaucugagaaucuucucucucugggcuugccagggcucuccgaaccuagcuagcauccucuucaauuccaacuagaaagcuuaccauggagcugcucauccugaaggccaacgccaucaccaccauccugacggcggugaccuucugcuucgccagcggccagaacaucaccgaggaguucuaccaguccacgugcagcgccgucuccaagggguaccucggcgcccugcggaccggcugguacaccuccgugaucaccaucgagcugagcaacaucaaggagaucaagugcaacgggaccgacgccaaggugaagcucaucaagcaggagcuggacaaguacaagaacgcggucacggaccugcagcuccugaugcaguccaccccggcaaccggcuccggcuccgccaucgcgagcggcgucgccgugugcaaggugcugcaccucgagggggaggucaacaagaucaagagcgcccugcuguccaccaacaaggccguggugagccucuccggcugcggcgucagcgugcugaccuucaaggugcuggaccucaagaacuacaucgacaagcagcugcugcccauccugaacaagcagagcugcuccauccccaacaucgagacggugaucgaguuccagcagaagaacaaccggcuccuggagaucacccgcgaguucagcgugaacgccggggucaccacccccguguccacguacaugcugaccaacagcgagcuccugucccugaucaacgacaugccgaucaccaacgaccagaagaagcucaugagcaacaacgugcagaucguccggcagcaguccuacagcaucaugugcaucaucaaggaggaggugcuggcguacgugguccagcugccccucuacggcgugaucgacacccccugcuggaagcugcacacgagcccccugugcaccaccaacaccaaggagggguccaacaucugccucacgcgcaccgaccggggcugguacugcgacaacgccggcagcgucuccuucuucccgcaggccgagaccugcaaggugcagagcaaccgcguguucugcgacaccaugaacucccugacgcugcccagcgagguaaaccucugcaacgucgacaucuucaaccccaaguacgacugcaagaucaugaccuccaagaccgacgugagcuccagcgugaucaccucccugggggccaucgucagcugcuacggcaagacgaagugcaccgccagcaacaagugccgggggaucaucaagaccuucuccaacggcugcgacuacgugagcaacaagggcguggacaccguguccgucgggaacacccuguacuacgugaacaagcaggagggccagagccucuacgugaagggggagcccaucaucaacuucuacgacccgcuggucuuccccuccgacgaguucgacgcgagcaucucccaggugaacgagaagaucaaccagagccuggccuucauccgcaaguccgacgagcugcuccacaacgugaacgccggcaagagcacgaccaacaucaugaucaccaccaucaucaucgucaucaucgugauccugcugucccucaucgccguggggcugcugcucuacugcaaggcccggugaggacuaguguccaccugucccuccugggcugcuggauugucucguuuuccugccaaauaaacaggaucagcgcuuuacagaucuaaaaaaaaaaaaaaaaaaaaaaaaaaaaaaaaaaaaaaaaaaaaaaaaaaaaaaaaaaaaaaaaugcaucccccccccccccccccccccccccccccccaaaggcucuuuucagagccaccagaauu

SEQ ID NO: 8247 - RNA, 1934 nt, Artificial Sequence
  mRNA product Design i-1 comprising derived and/or modified sequence from HRSV(A2)__F-del_DSCav1_mut8 (opt1)
gggagagggcgcuuggcuugcaaggacccugagcugcggcauugaagcacacccaacccaacucgacugaagucagccucacugaaccggaucugagaaucuucucucucugggcuugccagggcucuccgaaccuagcuagcauccucuucaauuccaacuagaaagcuuaccauggagcugcucauccugaaggccaacgccaucaccaccauccugacggcggugaccuucugcuucgccagcggccagaacaucaccgaggaguucuaccaguccacgugcagcgccgucuccaagggguaccucggcgcccugcgcaccgggugguacaccagcgugaucaccaucgagcuguccaacaucaaggagaucaagugcaacggcaccgacgccaaggugaagcucaucaagcaggagcuggacaaguacaagaacgcggucacggaccugcagcuccugaugcagagcacccccgccaccggguccggcagcgccaucgccuccggcguggcggugugcaagguccugcaccucgagggggaggugaacaagaucaagagcgcccugcuguccaccaacaaggccguggucagccucuccggcugcggggugagcgugcugacguucaagguccuggaccucaagaacuacaucgacaagcagcugcugccgauccucaacaagcaguccugcagcauccccaacaucgagaccgugaucgaguuccagcagaagaacaaccggcugcuggagaucacccgcgaguucuccgugaacgccggcgucaccacgcccgugagcaccuacaugcucaccaacuccgagcugcugagccucaucaacgacaugcccaucaccaacgaccagaagaagcugaugagcaacaacgugcagaucguccggcagcaguccuacagcaucaugugcaucaucaaggaggaggugcuggccuacgugguccagcucccgcuguacggggugaucgacacgcccugcuggaagcugcacaccagcccccucugcaccaccaacacgaaggagggcuccaacaucugccugacccgcaccgaccggggcugguacugcgacaacgcgggguccgugagcuucuucccccaggccgagaccugcaagguccaguccaaccgcguguucugcgacacgaugaacagccugacccucccguccgaggucaaccugugcaacguggacaucuucaaccccaaguacgacugcaagaucaugaccagcaagaccgacguguccagcuccgucaucacgagccugggcgccaucguguccugcuacgggaagaccaagugcaccgccagcaacaagugccggggcaucaucaagaccuucuccaacggcugcgacuacgugagcaacaagggggucgacacgguguccgugggcaacacccucuacuacgucaacaagcaggaggggcagagccuguacgugaagggcgagcccaucaucaacuucuacgacccccugguguucccgagcgacgaguucgacgccuccaucagccaggucaacgagaagaucaaccagucccucgcguucauccgcaagagcgacgagcugcugcacaacgugaacgccgggaaguccaccaccaacaucaugaucaccacgaucaucaucgugaucaucgucauccuccugagccugaucgccgugggccuccugcuguacugcaaggcccggugaggacuaguguccaccugucccuccugggcugcuggauugucucguuuuccugccaaauaaacaggaucagcgcuuuacagaucuaaaaaaaaaaaaaaaaaaaaaaaaaaaaaaaaaaaaaaaaaaaaaaaaaaaaaaaaaaaaaaaaugcaucccccccccccccccccccccccccccccccaaaggcucuuuucagagccaccagaauu

SEQ ID NO: 8248 - RNA, 1934 nt, Artificial Sequence
  mRNA product Design i-1 comprising derived and/or modified sequence from HRSV(A2)__F-del_DSCav1_mut8 (opt2)
gggagagggcgcuuggcuugcaaggacccugagcugcggcauugaagcacacccaacccaacucgacugaagucagccucacugaaccggaucugagaaucuucucucucugggcuugccagggcucuccgaaccuagcuagcauccucuucaauuccaacuagaaagcuuaccauggagcuccucauccucaaggccaacgccaucaccaccauccucaccgccgucaccuucugcuucgccuccggccagaacaucaccgaggaguucuaccaguccaccugcuccgccgucuccaagggcuaccucggcgcccuccgcaccggcugguacaccuccgucaucaccaucgagcucuccaacaucaaggagaucaagugcaacggcaccgacgccaaggucaagcucaucaagcaggagcucgacaaguacaagaacgccgucaccgaccuccagcuccucaugcaguccacccccgccaccggcuccggcuccgccaucgccuccggcgucgccgucugcaagguccuccaccucgagggcgaggucaacaagaucaaguccgcccuccucuccaccaacaaggccgucgucucccucuccggcugcggcgucuccguccucaccuucaagguccucgaccucaagaacuacaucgacaagcagcuccuccccauccucaacaagcaguccugcuccauccccaacaucgagaccgucaucgaguuccagcagaagaacaaccgccuccucgagaucacccgcgaguucuccgucaacgccggcgucaccacccccgucuccaccuacaugcucaccaacuccgagcuccucucccucaucaacgacaugcccaucaccaacgaccagaagaagcucauguccaacaacguccagaucguccgccagcaguccuacuccaucaugugcaucaucaaggaggagguccucgccuacgucguccagcucccccucuacggcgucaucgacacccccugcuggaagcuccacaccuccccccucugcaccaccaacaccaaggagggcuccaacaucugccucacccgcaccgaccgcggcugguacugcgacaacgccggcuccgucuccuucuucccccaggccgagaccugcaagguccaguccaaccgcgucuucugcgacaccaugaacucccucacccuccccuccgaggucaaccucugcaacgucgacaucuucaaccccaaguacgacugcaagaucaugaccuccaagaccgacgucuccuccuccgucaucaccucccucggcgccaucgucuccugcuacggcaagaccaagugcaccgccuccaacaagugccgcggcaucaucaagaccuucuccaacggcugcgacuacgucuccaacaagggcgucgacaccgucuccgucggcaacacccucuacuacgucaacaagcaggagggccagucccucuacgucaagggcgagcccaucaucaacuucuacgacccccucgucuuccccuccgacgaguucgacgccuccaucucccaggucaacgagaagaucaaccagucccucgccuucauccgcaaguccgacgagcuccuccacaacgucaacgccggcaaguccaccaccaacaucaugaucaccaccaucaucaucgucaucaucgucauccuccucucccucaucgccgucggccuccuccucuacugcaaggcccgcugaggacuaguguccaccugucccuccugggcugcuggauugucucguuuuccugccaaauaaacaggaucagcgcuuuacagaucuaaaaaaaaaaaaaaaaaaaaaaaaaaaaaaaaaaaaaaaaaaaaaaaaaaaaaaaaaaaaaaaaugcaucccccccccccccccccccccccccccccccaaaggcucuuuucagagccaccagaauu

SEQ ID NO: 8249 - RNA, 1934 nt, Artificial Sequence
  mRNA product Design i-1 comprising derived and/or modified sequence from HRSV(A2)__F-del_DSCav1_mut8 (opt3)
gggagagggcgcuuggcuugcaaggacccugagcugcggcauugaagcacacccaacccaacucgacugaagucagccucacugaaccggaucugagaaucuucucucucugggcuugccagggcucuccgaaccuagcuagcauccucuucaauuccaacuagaaagcuuaccauggagcugcucauccuuaaggccaacgcuauuaccacaauacugacugcagugacguucugcuuugccagcggccagaauaucaccgaagaguucuaccaauccacauguucugcggucucaaaaggguauuugggagcuuuaagaacugguugguacaccaguguuauuacaaucgaacugagcaacauuaaggagaucaaaugcaauggcaccgacgccaaggugaaacuaauaaagcaggaacucgauaaguauaaaaacgcaguaacugaccugcagcuucugaugcaguccacacccgccaccgggucuggaucggcuaucgcaucaggcguggccgucuguaagguguugcaccucgagggugagguuaauaaaauuaagagcgcucugcugaguacgaacaaagccguggucucccucucugggugcggagugagcguauuaacuuuuaagguucuggaucuuaagaauuacaucgacaaacaauugcugccuauucuaaacaagcaguccuguucaaucccaaauauagaaaccgugauugaguuccagcagaaaaacaauaggcuccuggaaaucacacgggaguuuagugucaacgcgggcgugacuaccccggugagcacauauaugcuuaccaauucugagcuguugucccucauuaacgauaugcccaucacgaaugaccaaaagaaacugaugucaaacaacguccagaucguucgccagcagagcuacaguauuaugugcauaaucaaggaagagguguuagcauauguagugcaacugccucucuacggcgucauugauacuccauguuggaaacuucauacaucuccccugugcaccacuaauacaaaggaaggguccaacaucuguuugacccgaacggaccguggaugguacugcgauaaugccgguagcgugucguucuuuccucaggcugagaccuguaagguucagucuaacagaguguucugcgacacaaugaacucccuaacucugccaucagaagucaaucucugcaauguggauauauuuaaccccaaauaugacuguaagauuaugaccaguaaaacagauguaagcuccucuguuaucacuagccugggcgccaucgugucaugcuacgggaagaccaaauguacagcaaguaauaagugcaggggaauuaucaagaccuucuccaacggcugugacuaugucagcaauaaagguguggacacugucucuguggggaacacgcuuuacuauguuaauaagcaagagggacagucacuguacgugaaaggcgagccuauuauaaacuuuuaugauccauugguauucccgagugacgaauuugaugcuagcaucucccaggucaaugagaagauuaaccagucucucgccuucauccggaaaucggacgaacuguuacacaacgugaaugcgggcaagagcacaaccaacaucaugauuacuaccauaaucauuguuaucauugugauccugcuaucccucauagccgucgggcugcuuuuguacugcaaggcacgcugaggacuaguguccaccugucccuccugggcugcuggauugucucguuuuccugccaaauaaacaggaucagcgcuuuacagaucuaaaaaaaaaaaaaaaaaaaaaaaaaaaaaaaaaaaaaaaaaaaaaaaaaaaaaaaaaaaaaaaaugcaucccccccccccccccccccccccccccccccaaaggcucuuuucagagccaccagaauu

SEQ ID NO: 8250 - RNA, 1934 nt, Artificial Sequence
  mRNA product Design i-1 comprising derived and/or modified sequence from HRSV(A2)__F-del_DSCav1_mut8 (opt4)
gggagagggcgcuuggcuugcaaggacccugagcugcggcauugaagcacacccaacccaacucgacugaagucagccucacugaaccggaucugagaaucuucucucucugggcuugccagggcucuccgaaccuagcuagcauccucuucaauuccaacuagaaagcuuaccauggagcugcugauccugaaggccaacgccaucaccaccauccugaccgccgugaccuucugcuucgccagcggccagaacaucaccgaggaguucuaccagagcaccugcagcgccgugagcaagggcuaccugggcgcccugagaaccggcugguacaccagcgugaucaccaucgagcugagcaacaucaaggagaucaagugcaacggcaccgacgccaaggugaagcugaucaagcaggagcuggacaaguacaagaacgccgugaccgaccugcagcugcugaugcagagcacccccgccaccggcagcggcagcgccaucgccagcggcguggccgugugcaaggugcugcaccuggagggcgaggugaacaagaucaagagcgcccugcugagcaccaacaaggccguggugagccugagcggcugcggcgugagcgugcugaccuucaaggugcuggaccugaagaacuacaucgacaagcagcugcugcccauccugaacaagcagagcugcagcauccccaacaucgagaccgugaucgaguuccagcagaagaacaacagacugcuggagaucaccagagaguucagcgugaacgccggcgugaccacccccgugagcaccuacaugcugaccaacagcgagcugcugagccugaucaacgacaugcccaucaccaacgaccagaagaagcugaugagcaacaacgugcagaucgugagacagcagagcuacagcaucaugugcaucaucaaggaggaggugcuggccuacguggugcagcugccccuguacggcgugaucgacacccccugcuggaagcugcacaccagcccccugugcaccaccaacaccaaggagggcagcaacaucugccugaccagaaccgacagaggcugguacugcgacaacgccggcagcgugagcuucuucccccaggccgagaccugcaaggugcagagcaacagaguguucugcgacaccaugaacagccugacccugcccagcgaggugaaccugugcaacguggacaucuucaaccccaaguacgacugcaagaucaugaccagcaagaccgacgugagcagcagcgugaucaccagccugggcgccaucgugagcugcuacggcaagaccaagugcaccgccagcaacaagugcagaggcaucaucaagaccuucagcaacggcugcgacuacgugagcaacaagggcguggacaccgugagcgugggcaacacccuguacuacgugaacaagcaggagggccagagccuguacgugaagggcgagcccaucaucaacuucuacgacccccugguguuccccagcgacgaguucgacgccagcaucagccaggugaacgagaagaucaaccagagccuggccuucaucagaaagagcgacgagcugcugcacaacgugaacgccggcaagagcaccaccaacaucaugaucaccaccaucaucaucgugaucaucgugauccugcugagccugaucgccgugggccugcugcuguacugcaaggccagaugaggacuaguguccaccugucccuccugggcugcuggauugucucguuuuccugccaaauaaacaggaucagcgcuuuacagaucuaaaaaaaaaaaaaaaaaaaaaaaaaaaaaaaaaaaaaaaaaaaaaaaaaaaaaaaaaaaaaaaaugcaucccccccccccccccccccccccccccccccaaaggcucuuuucagagccaccagaauu

SEQ ID NO: 8251 - RNA, 1934 nt, Artificial Sequence
  mRNA product Design i-1 comprising derived and/or modified sequence from HRSV(A2)__F-del_DSCav1_mut8 (opt5)
gggagagggcgcuuggcuugcaaggacccugagcugcggcauugaagcacacccaacccaacucgacugaagucagccucacugaaccggaucugagaaucuucucucucugggcuugccagggcucuccgaaccuagcuagcauccucuucaauuccaacuagaaagcuuaccauggagcugcucauccugaaggccaacgcuauuaccacaauccuuacggccgugaccuucugcuuugcgagcggccagaauauuacagaagaguucuaccaauccaccuguucugcugucagcaaaggguaucugggagcccucagaacaggcugguacaccuccguuaucacaauugaacugucuaacaucaaggagaucaaaugcaaugggaccgacgccaaggugaaacuuauuaagcaggaacuggauaaguauaaaaacgcugugacggaccuccagcugcugaugcagagcacccccgccacaggauccggcucugcuaucgccagcggggucgcgguguguaagguucuccaccuggagggagaggugaauaaaauuaaguccgcccuucugagcaccaacaaagcugucgugucucucuccggcugcggcguuagcgugcugacauuuaagguccuugaucugaagaauuacaucgacaaacaacuccugccuauucugaacaagcagucuuguuccaucccgaauauugaaaccgugaucgaguuccagcagaaaaacaaucggcuccuggaaaucacgcgcgaguuuagcgugaacgccggggucacaacccccguuucuacauauaugcuuaccaauuccgagcugcucagccugauuaacgauaugccuaucaccaaugaccaaaagaaacuuauguccaacaacgugcagauugugagacagcagucuuacagcaucaugugcauuaucaaggaagagguccuggcuuaugugguucaacucccccuguacggagugaucgauacaccuuguuggaaacugcauacgagcccccucugcaccacaaauaccaaggaaggcagcaacauuugucugacacggaccgaccgcgggugguacugcgauaaugccggaucugucuccuucuuuccucaggcggagacguguaaggugcagagcaacagaguuuucugcgacacaaugaacucucuuacccugccgagcgaagugaaucucugcaaugucgauaucuuuaaccccaaauaugacuguaagauuaugaccuccaaaacagaugugucuagcuccgucaucaccagccugggcgccauugugucuugcuacgggaagacaaaauguacggcuuccaauaagugccggggaaucaucaagaccuucagcaacggcugugacuauguuucuaauaaaggcguggacacagucuccguggggaacacccuuuacuauguuaauaagcaagagggacagagccuguacgugaaaggcgagccuauuaucaacuuuuaugauccccucgucuucccuuccgacgaauuugaugccucuauuagccaggugaaugagaagaucaaccagucccuggcuuucauucgcaaaucugacgaacugcuccacaacgugaaugccgggaaguccacaaccaacaucaugauuacgaccaucaucauuguuaucauugucauccugcuuucccugauugccgugggacuccugcuguacugcaaggcuagaugaggacuaguguccaccugucccuccugggcugcuggauugucucguuuuccugccaaauaaacaggaucagcgcuuuacagaucuaaaaaaaaaaaaaaaaaaaaaaaaaaaaaaaaaaaaaaaaaaaaaaaaaaaaaaaaaaaaaaaaugcaucccccccccccccccccccccccccccccccaaaggcucuuuucagagccaccagaauu

SEQ ID NO: 8252 - RNA, 1934 nt, Artificial Sequence
  mRNA product Design i-1 comprising derived and/or modified sequence from HRSV(A2)__F-del_DSCav1_mut8 (opt6)
gggagagggcgcuuggcuugcaaggacccugagcugcggcauugaagcacacccaacccaacucgacugaagucagccucacugaaccggaucugagaaucuucucucucugggcuugccagggcucuccgaaccuagcuagcauccucuucaauuccaacuagaaagcuuaccauggaacuacucauauugaaagccaacgcaaucacaacaauacuaaccgccguaacauuuugcuucgcgucaggccaaaauauaacagaagaauuuuaccaaucaacaugcuccgccguaucaaaaggauaccuaggugcauuacgaaccgguugguacacaucaguaaucacaauagaacuuuccaacauuaaagaaauaaaaugcaauggcacagacgcaaaagucaaacuaauaaaacaagaacuagacaaauauaaaaacgccgucacagacuuacaacuauuaaugcaaagcacaccagcaacaggauccggaucagcaauagcaucaggaguagccgucuguaaaguacuacaccuagaaggcgaaguuaauaaaauuaaaucagcuuuauuaucaaccaacaaagcaguaguaucacuauccggaugcggagucuccguccuaacauucaaaguacuagaccucaagaauuacauagauaaacaacuacuaccaauacucaacaaacaaucauguucaauaccaaacaucgaaaccgucauagaauuucaacaaaaaaauaauagacucuuagaaauaacacgagaauuuagcguaaacgcaggagucacaaccccugucucaacauacaugcuaaccaauuccgaauuauuaucacucauaaaugacaugccaauaacuaaugaccaaaaaaaacuuaugucaaacaacguacaaauaguaagacaacaaucauauucaauaaugugcauaaucaaagaagaaguuuuagcauauguaguacaacuaccacuauauggcgucauagacacaccaugcuggaaauuacacacaucaccucuaugcacaacaaacacaaaagaaggaagcaacauuugccuaaccagaaccgauagaggaugguacugcgauaacgcaggcucaguaucauucuucccucaagccgaaacuugcaaaguccaaucaaauagagucuucugcgauacaaugaacuccuuaacuuuaccaucagaaguaaaucuaugcaacguagauaucuuuaauccaaaauacgauugcaaaaucaugacaucaaaaacagauguaucaucuaguguaauuaccucccuaggagcaauaguaagcugcuacggaaaaacaaaaugcaccgccucuaacaaaugucguggaauaauaaaaacauucucaaacggaugcgauuauguaucaaauaaaggugucgacaccguaucaguaggcaauacacuauacuauguaaauaaacaagaaggacaaucacucuacgucaaaggugaaccaauaauaaacuucuacgacccacuuguauucccaagcgacgaauuugacgcaucaauaagccaaguaaacgaaaaaauaaaccaaucacuagcauucaucagaaaaucagacgaacuacuccacaauguaaaugcaggaaaaucaacaaccaauaucaugauaacaaccauaauaauagucauaauaguaauacuauuaucccucauagccguuggacuacuccuauauuguaaagcacgauaaggacuaguguccaccugucccuccugggcugcuggauugucucguuuuccugccaaauaaacaggaucagcgcuuuacagaucuaaaaaaaaaaaaaaaaaaaaaaaaaaaaaaaaaaaaaaaaaaaaaaaaaaaaaaaaaaaaaaaaugcaucccccccccccccccccccccccccccccccaaaggcucuuuucagagccaccagaauu

SEQ ID NO: 8253 - RNA, 1934 nt, Artificial Sequence
  mRNA product Design i-1 comprising derived and/or modified sequence from HRSV(A2)__F-del_DSCav1_mut8 (opt11)
gggagagggcgcuuggcuugcaaggacccugagcugcggcauugaagcacacccaacccaacucgacugaagucagccucacugaaccggaucugagaaucuucucucucugggcuugccagggcucuccgaaccuagcuagcauccucuucaauuccaacuagaaagcuuaccauggaacuccucauccucaaagccaacgccaucaccaccauacucaccgcaguaaccuucugcuucgcauccggccaaaacaucacagaagaguucuaccagaguaccugcuccgccgucuccaaaggcuaccuuggcgcccuccguaccgggugguacacauccgucaucacaaucgaacucuccaacaucaaagaaauaaagugcaacggcacagacgccaaaguaaaacugauaaagcaagaacucgacaaauacaaaaacgccguaaccgaccuccagcuacuaaugcaauccacucccgccaccggcagcggauccgccaucgccuccggaguagccgucuguaaagucuuacaccucgaaggcgaagugaacaaaaucaaauccgcccuacucucaaccaacaaagccguaguaucacucuccgggugcggcguuucagugcuaacguucaaaguccuugaccucaaaaacuacaucgacaaacaacuccuccccauccuaaauaaacaauccugcuccauacccaacaucgagacugucaucgaguuccagcagaaaaacaaccgacuccucgaaaucacacgcgaguucucugucaacgccggcgucacaacccccgucuccacauacaugcucaccaacagcgaacuccucucccuaaucaaugacaugcccaucaccaacgaccaaaagaaacucaugucaaacaacguccaaaucguccgccaacaauccuacagcaucaugugcaucaucaaagaagaaguucucgcauacguaguacaacucccccucuacggagugaucgacacccccugcuggaaacuacacaccagcccgcuuugcaccacaaacaccaaggaaggcuccaacaucugccucacucgaaccgaccgcggcugguacugcgacaacgcaggcuccgucaguuucuuuccccaagcagaaacaugcaaaguccaauccaaccgaguauucugcgacaccaugaacucccucacccuaccauccgaaguuaaccuaugcaacguggacaucuucaaccccaaguacgacugcaaaauuaugaccuccaaaaccgacguauccuccagcgucaucaccagccucggagcaauagucuccugcuacggcaagaccaagugcaccgcuuccaacaagugucgcggaaucaucaaaaccuucucaaacggcugcgacuacgucuccaacaaaggcgucgacaccguauccguaggaaacacccuauacuacgucaacaaacaagaaggacaaucccucuaugucaaaggcgaacccaucaucaauuucuacgacccccuagucuucccuuccgacgaguucgacgcguccaucagccaagucaaugaaaagaucaaccagagccuggcauucauccgcaaauccgacgaacuccuccacaacgucaacgcgggaaaauccacgacaaacaucaugaucaccaccaucaucaucgucaucauagucauucuccuuucucucaucgccgugggacuacuucucuacugcaaagcccgauaaggacuaguguccaccugucccuccugggcugcuggauugucucguuuuccugccaaauaaacaggaucagcgcuuuacagaucuaaaaaaaaaaaaaaaaaaaaaaaaaaaaaaaaaaaaaaaaaaaaaaaaaaaaaaaaaaaaaaaaugcaucccccccccccccccccccccccccccccccaaaggcucuuuucagagccaccagaauu

SEQ ID NO: 8254 - RNA, 1934 nt, Artificial Sequence
  mRNA product Design i-2 comprising derived and/or modified sequence from HRSV(A2)__F-del_DSCav1_mut8 (opt1)
gggagaggcgcugccuacggagguggcagccaucuccuucucggcaucaagcuuaccauggagcugcucauccugaaggccaacgccaucaccaccauccugacggcggugaccuucugcuucgccagcggccagaacaucaccgaggaguucuaccaguccacgugcagcgccgucuccaagggguaccucggcgcccugcggaccggcugguacaccuccgugaucaccaucgagcugagcaacaucaaggagaucaagugcaacgggaccgacgccaaggugaagcucaucaagcaggagcuggacaaguacaagaacgcggucacggaccugcagcuccugaugcaguccaccccggcaaccggcuccggcuccgccaucgcgagcggcgucgccgugugcaaggugcugcaccucgagggggaggucaacaagaucaagagcgcccugcuguccaccaacaaggccguggugagccucuccggcugcggcgucagcgugcugaccuucaaggugcuggaccucaagaacuacaucgacaagcagcugcugcccauccugaacaagcagagcugcuccauccccaacaucgagacggugaucgaguuccagcagaagaacaaccggcuccuggagaucacccgcgaguucagcgugaacgccggggucaccacccccguguccacguacaugcugaccaacagcgagcuccugucccugaucaacgacaugccgaucaccaacgaccagaagaagcucaugagcaacaacgugcagaucguccggcagcaguccuacagcaucaugugcaucaucaaggaggaggugcuggcguacgugguccagcugccccucuacggcgugaucgacacccccugcuggaagcugcacacgagcccccugugcaccaccaacaccaaggagggguccaacaucugccucacgcgcaccgaccggggcugguacugcgacaacgccggcagcgucuccuucuucccgcaggccgagaccugcaaggugcagagcaaccgcguguucugcgacaccaugaacucccugacgcugcccagcgagguaaaccucugcaacgucgacaucuucaaccccaaguacgacugcaagaucaugaccuccaagaccgacgugagcuccagcgugaucaccucccugggggccaucgucagcugcuacggcaagacgaagugcaccgccagcaacaagugccgggggaucaucaagaccuucuccaacggcugcgacuacgugagcaacaagggcguggacaccguguccgucgggaacacccuguacuacgugaacaagcaggagggccagagccucuacgugaagggggagcccaucaucaacuucuacgacccgcuggucuuccccuccgacgaguucgacgcgagcaucucccaggugaacgagaagaucaaccagagccuggccuucauccgcaaguccgacgagcugcuccacaacgugaacgccggcaagagcacgaccaacaucaugaucaccaccaucaucaucgucaucaucgugauccugcugucccucaucgccguggggcugcugcucuacugcaaggcccggugaggacuagugcaucacauuuaaaagcaucucagccuaccaugagaauaagagaaagaaaaugaagaucaauagcuuauucaucucuuuuucuuuuucguugguguaaagccaacacccugucuaaaaaacauaaauuucuuuaaucauuuugccucuuuucucugugcuucaauuaauaaaaaauggaaagaaccuagaucuaaaaaaaaaaaaaaaaaaaaaaaaaaaaaaaaaaaaaaaaaaaaaaaaaaaaaaaaaaaaaaaaugcaucccccccccccccccccccccccccccccccaaaggcucuuuucagagccaccagaauu

SEQ ID NO: 8255 - RNA, 1934 nt, Artificial Sequence
  mRNA product Design i-2 comprising derived and/or modified sequence from HRSV(A2)__F-del_DSCav1_mut8 (opt1)
gggagaggcgcugccuacggagguggcagccaucuccuucucggcaucaagcuuaccauggagcugcucauccugaaggccaacgccaucaccaccauccugacggcggugaccuucugcuucgccagcggccagaacaucaccgaggaguucuaccaguccacgugcagcgccgucuccaagggguaccucggcgcccugcgcaccgggugguacaccagcgugaucaccaucgagcuguccaacaucaaggagaucaagugcaacggcaccgacgccaaggugaagcucaucaagcaggagcuggacaaguacaagaacgcggucacggaccugcagcuccugaugcagagcacccccgccaccggguccggcagcgccaucgccuccggcguggcggugugcaagguccugcaccucgagggggaggugaacaagaucaagagcgcccugcuguccaccaacaaggccguggucagccucuccggcugcggggugagcgugcugacguucaagguccuggaccucaagaacuacaucgacaagcagcugcugccgauccucaacaagcaguccugcagcauccccaacaucgagaccgugaucgaguuccagcagaagaacaaccggcugcuggagaucacccgcgaguucuccgugaacgccggcgucaccacgcccgugagcaccuacaugcucaccaacuccgagcugcugagccucaucaacgacaugcccaucaccaacgaccagaagaagcugaugagcaacaacgugcagaucguccggcagcaguccuacagcaucaugugcaucaucaaggaggaggugcuggccuacgugguccagcucccgcuguacggggugaucgacacgcccugcuggaagcugcacaccagcccccucugcaccaccaacacgaaggagggcuccaacaucugccugacccgcaccgaccggggcugguacugcgacaacgcgggguccgugagcuucuucccccaggccgagaccugcaagguccaguccaaccgcguguucugcgacacgaugaacagccugacccucccguccgaggucaaccugugcaacguggacaucuucaaccccaaguacgacugcaagaucaugaccagcaagaccgacguguccagcuccgucaucacgagccugggcgccaucguguccugcuacgggaagaccaagugcaccgccagcaacaagugccggggcaucaucaagaccuucuccaacggcugcgacuacgugagcaacaagggggucgacacgguguccgugggcaacacccucuacuacgucaacaagcaggaggggcagagccuguacgugaagggcgagcccaucaucaacuucuacgacccccugguguucccgagcgacgaguucgacgccuccaucagccaggucaacgagaagaucaaccagucccucgcguucauccgcaagagcgacgagcugcugcacaacgugaacgccgggaaguccaccaccaacaucaugaucaccacgaucaucaucgugaucaucgucauccuccugagccugaucgccgugggccuccugcuguacugcaaggcccggugaggacuagugcaucacauuuaaaagcaucucagccuaccaugagaauaagagaaagaaaaugaagaucaauagcuuauucaucucuuuuucuuuuucguugguguaaagccaacacccugucuaaaaaacauaaauuucuuuaaucauuuugccucuuuucucugugcuucaauuaauaaaaaauggaaagaaccuagaucuaaaaaaaaaaaaaaaaaaaaaaaaaaaaaaaaaaaaaaaaaaaaaaaaaaaaaaaaaaaaaaaaugcaucccccccccccccccccccccccccccccccaaaggcucuuuucagagccaccagaauu

SEQ ID NO: 8256 - RNA, 1934 nt, Artificial Sequence
  mRNA product Design i-2 comprising derived and/or modified sequence from HRSV(A2)__F-del_DSCav1_mut8 (opt2)
gggagaggcgcugccuacggagguggcagccaucuccuucucggcaucaagcuuaccauggagcuccucauccucaaggccaacgccaucaccaccauccucaccgccgucaccuucugcuucgccuccggccagaacaucaccgaggaguucuaccaguccaccugcuccgccgucuccaagggcuaccucggcgcccuccgcaccggcugguacaccuccgucaucaccaucgagcucuccaacaucaaggagaucaagugcaacggcaccgacgccaaggucaagcucaucaagcaggagcucgacaaguacaagaacgccgucaccgaccuccagcuccucaugcaguccacccccgccaccggcuccggcuccgccaucgccuccggcgucgccgucugcaagguccuccaccucgagggcgaggucaacaagaucaaguccgcccuccucuccaccaacaaggccgucgucucccucuccggcugcggcgucuccguccucaccuucaagguccucgaccucaagaacuacaucgacaagcagcuccuccccauccucaacaagcaguccugcuccauccccaacaucgagaccgucaucgaguuccagcagaagaacaaccgccuccucgagaucacccgcgaguucuccgucaacgccggcgucaccacccccgucuccaccuacaugcucaccaacuccgagcuccucucccucaucaacgacaugcccaucaccaacgaccagaagaagcucauguccaacaacguccagaucguccgccagcaguccuacuccaucaugugcaucaucaaggaggagguccucgccuacgucguccagcucccccucuacggcgucaucgacacccccugcuggaagcuccacaccuccccccucugcaccaccaacaccaaggagggcuccaacaucugccucacccgcaccgaccgcggcugguacugcgacaacgccggcuccgucuccuucuucccccaggccgagaccugcaagguccaguccaaccgcgucuucugcgacaccaugaacucccucacccuccccuccgaggucaaccucugcaacgucgacaucuucaaccccaaguacgacugcaagaucaugaccuccaagaccgacgucuccuccuccgucaucaccucccucggcgccaucgucuccugcuacggcaagaccaagugcaccgccuccaacaagugccgcggcaucaucaagaccuucuccaacggcugcgacuacgucuccaacaagggcgucgacaccgucuccgucggcaacacccucuacuacgucaacaagcaggagggccagucccucuacgucaagggcgagcccaucaucaacuucuacgacccccucgucuuccccuccgacgaguucgacgccuccaucucccaggucaacgagaagaucaaccagucccucgccuucauccgcaaguccgacgagcuccuccacaacgucaacgccggcaaguccaccaccaacaucaugaucaccaccaucaucaucgucaucaucgucauccuccucucccucaucgccgucggccuccuccucuacugcaaggcccgcugaggacuagugcaucacauuuaaaagcaucucagccuaccaugagaauaagagaaagaaaaugaagaucaauagcuuauucaucucuuuuucuuuuucguugguguaaagccaacacccugucuaaaaaacauaaauuucuuuaaucauuuugccucuuuucucugugcuucaauuaauaaaaaauggaaagaaccuagaucuaaaaaaaaaaaaaaaaaaaaaaaaaaaaaaaaaaaaaaaaaaaaaaaaaaaaaaaaaaaaaaaaugcaucccccccccccccccccccccccccccccccaaaggcucuuuucagagccaccagaauu

SEQ ID NO: 8257 - RNA, 1934 nt, Artificial Sequence
  mRNA product Design i-2 comprising derived and/or modified sequence from HRSV(A2)__F-del_DSCav1_mut8 (opt3)
gggagaggcgcugccuacggagguggcagccaucuccuucucggcaucaagcuuaccauggagcugcucauccuuaaggccaacgcuauuaccacaauacugacugcagugacguucugcuuugccagcggccagaauaucaccgaagaguucuaccaauccacauguucugcggucucaaaaggguauuugggagcuuuaagaacugguugguacaccaguguuauuacaaucgaacugagcaacauuaaggagaucaaaugcaauggcaccgacgccaaggugaaacuaauaaagcaggaacucgauaaguauaaaaacgcaguaacugaccugcagcuucugaugcaguccacacccgccaccgggucuggaucggcuaucgcaucaggcguggccgucuguaagguguugcaccucgagggugagguuaauaaaauuaagagcgcucugcugaguacgaacaaagccguggucucccucucugggugcggagugagcguauuaacuuuuaagguucuggaucuuaagaauuacaucgacaaacaauugcugccuauucuaaacaagcaguccuguucaaucccaaauauagaaaccgugauugaguuccagcagaaaaacaauaggcuccuggaaaucacacgggaguuuagugucaacgcgggcgugacuaccccggugagcacauauaugcuuaccaauucugagcuguugucccucauuaacgauaugcccaucacgaaugaccaaaagaaacugaugucaaacaacguccagaucguucgccagcagagcuacaguauuaugugcauaaucaaggaagagguguuagcauauguagugcaacugccucucuacggcgucauugauacuccauguuggaaacuucauacaucuccccugugcaccacuaauacaaaggaaggguccaacaucuguuugacccgaacggaccguggaugguacugcgauaaugccgguagcgugucguucuuuccucaggcugagaccuguaagguucagucuaacagaguguucugcgacacaaugaacucccuaacucugccaucagaagucaaucucugcaauguggauauauuuaaccccaaauaugacuguaagauuaugaccaguaaaacagauguaagcuccucuguuaucacuagccugggcgccaucgugucaugcuacgggaagaccaaauguacagcaaguaauaagugcaggggaauuaucaagaccuucuccaacggcugugacuaugucagcaauaaagguguggacacugucucuguggggaacacgcuuuacuauguuaauaagcaagagggacagucacuguacgugaaaggcgagccuauuauaaacuuuuaugauccauugguauucccgagugacgaauuugaugcuagcaucucccaggucaaugagaagauuaaccagucucucgccuucauccggaaaucggacgaacuguuacacaacgugaaugcgggcaagagcacaaccaacaucaugauuacuaccauaaucauuguuaucauugugauccugcuaucccucauagccgucgggcugcuuuuguacugcaaggcacgcugaggacuagugcaucacauuuaaaagcaucucagccuaccaugagaauaagagaaagaaaaugaagaucaauagcuuauucaucucuuuuucuuuuucguugguguaaagccaacacccugucuaaaaaacauaaauuucuuuaaucauuuugccucuuuucucugugcuucaauuaauaaaaaauggaaagaaccuagaucuaaaaaaaaaaaaaaaaaaaaaaaaaaaaaaaaaaaaaaaaaaaaaaaaaaaaaaaaaaaaaaaaugcaucccccccccccccccccccccccccccccccaaaggcucuuuucagagccaccagaauu

SEQ ID NO: 8258 - RNA, 1934 nt, Artificial Sequence
  mRNA product Design i-2 comprising derived and/or modified sequence from HRSV(A2)__F-del_DSCav1_mut8 (opt4)
gggagaggcgcugccuacggagguggcagccaucuccuucucggcaucaagcuuaccauggagcugcugauccugaaggccaacgccaucaccaccauccugaccgccgugaccuucugcuucgccagcggccagaacaucaccgaggaguucuaccagagcaccugcagcgccgugagcaagggcuaccugggcgcccugagaaccggcugguacaccagcgugaucaccaucgagcugagcaacaucaaggagaucaagugcaacggcaccgacgccaaggugaagcugaucaagcaggagcuggacaaguacaagaacgccgugaccgaccugcagcugcugaugcagagcacccccgccaccggcagcggcagcgccaucgccagcggcguggccgugugcaaggugcugcaccuggagggcgaggugaacaagaucaagagcgcccugcugagcaccaacaaggccguggugagccugagcggcugcggcgugagcgugcugaccuucaaggugcuggaccugaagaacuacaucgacaagcagcugcugcccauccugaacaagcagagcugcagcauccccaacaucgagaccgugaucgaguuccagcagaagaacaacagacugcuggagaucaccagagaguucagcgugaacgccggcgugaccacccccgugagcaccuacaugcugaccaacagcgagcugcugagccugaucaacgacaugcccaucaccaacgaccagaagaagcugaugagcaacaacgugcagaucgugagacagcagagcuacagcaucaugugcaucaucaaggaggaggugcuggccuacguggugcagcugccccuguacggcgugaucgacacccccugcuggaagcugcacaccagcccccugugcaccaccaacaccaaggagggcagcaacaucugccugaccagaaccgacagaggcugguacugcgacaacgccggcagcgugagcuucuucccccaggccgagaccugcaaggugcagagcaacagaguguucugcgacaccaugaacagccugacccugcccagcgaggugaaccugugcaacguggacaucuucaaccccaaguacgacugcaagaucaugaccagcaagaccgacgugagcagcagcgugaucaccagccugggcgccaucgugagcugcuacggcaagaccaagugcaccgccagcaacaagugcagaggcaucaucaagaccuucagcaacggcugcgacuacgugagcaacaagggcguggacaccgugagcgugggcaacacccuguacuacgugaacaagcaggagggccagagccuguacgugaagggcgagcccaucaucaacuucuacgacccccugguguuccccagcgacgaguucgacgccagcaucagccaggugaacgagaagaucaaccagagccuggccuucaucagaaagagcgacgagcugcugcacaacgugaacgccggcaagagcaccaccaacaucaugaucaccaccaucaucaucgugaucaucgugauccugcugagccugaucgccgugggccugcugcuguacugcaaggccagaugaggacuagugcaucacauuuaaaagcaucucagccuaccaugagaauaagagaaagaaaaugaagaucaauagcuuauucaucucuuuuucuuuuucguugguguaaagccaacacccugucuaaaaaacauaaauuucuuuaaucauuuugccucuuuucucugugcuucaauuaauaaaaaauggaaagaaccuagaucuaaaaaaaaaaaaaaaaaaaaaaaaaaaaaaaaaaaaaaaaaaaaaaaaaaaaaaaaaaaaaaaaugcaucccccccccccccccccccccccccccccccaaaggcucuuuucagagccaccagaauu

SEQ ID NO: 8259 - RNA, 1934 nt, Artificial Sequence
  mRNA product Design i-2 comprising derived and/or modified sequence from HRSV(A2)__F-del_DSCav1_mut8 (opt5)
gggagaggcgcugccuacggagguggcagccaucuccuucucggcaucaagcuuaccauggagcugcucauccugaaggccaacgcuauuaccacaauccuuacggccgugaccuucugcuuugcgagcggccagaauauuacagaagaguucuaccaauccaccuguucugcugucagcaaaggguaucugggagcccucagaacaggcugguacaccuccguuaucacaauugaacugucuaacaucaaggagaucaaaugcaaugggaccgacgccaaggugaaacuuauuaagcaggaacuggauaaguauaaaaacgcugugacggaccuccagcugcugaugcagagcacccccgccacaggauccggcucugcuaucgccagcggggucgcgguguguaagguucuccaccuggagggagaggugaauaaaauuaaguccgcccuucugagcaccaacaaagcugucgugucucucuccggcugcggcguuagcgugcugacauuuaagguccuugaucugaagaauuacaucgacaaacaacuccugccuauucugaacaagcagucuuguuccaucccgaauauugaaaccgugaucgaguuccagcagaaaaacaaucggcuccuggaaaucacgcgcgaguuuagcgugaacgccggggucacaacccccguuucuacauauaugcuuaccaauuccgagcugcucagccugauuaacgauaugccuaucaccaaugaccaaaagaaacuuauguccaacaacgugcagauugugagacagcagucuuacagcaucaugugcauuaucaaggaagagguccuggcuuaugugguucaacucccccuguacggagugaucgauacaccuuguuggaaacugcauacgagcccccucugcaccacaaauaccaaggaaggcagcaacauuugucugacacggaccgaccgcgggugguacugcgauaaugccggaucugucuccuucuuuccucaggcggagacguguaaggugcagagcaacagaguuuucugcgacacaaugaacucucuuacccugccgagcgaagugaaucucugcaaugucgauaucuuuaaccccaaauaugacuguaagauuaugaccuccaaaacagaugugucuagcuccgucaucaccagccugggcgccauugugucuugcuacgggaagacaaaauguacggcuuccaauaagugccggggaaucaucaagaccuucagcaacggcugugacuauguuucuaauaaaggcguggacacagucuccguggggaacacccuuuacuauguuaauaagcaagagggacagagccuguacgugaaaggcgagccuauuaucaacuuuuaugauccccucgucuucccuuccgacgaauuugaugccucuauuagccaggugaaugagaagaucaaccagucccuggcuuucauucgcaaaucugacgaacugcuccacaacgugaaugccgggaaguccacaaccaacaucaugauuacgaccaucaucauuguuaucauugucauccugcuuucccugauugccgugggacuccugcuguacugcaaggcuagaugaggacuagugcaucacauuuaaaagcaucucagccuaccaugagaauaagagaaagaaaaugaagaucaauagcuuauucaucucuuuuucuuuuucguugguguaaagccaacacccugucuaaaaaacauaaauuucuuuaaucauuuugccucuuuucucugugcuucaauuaauaaaaaauggaaagaaccuagaucuaaaaaaaaaaaaaaaaaaaaaaaaaaaaaaaaaaaaaaaaaaaaaaaaaaaaaaaaaaaaaaaaugcaucccccccccccccccccccccccccccccccaaaggcucuuuucagagccaccagaauu

SEQ ID NO: 8260 - RNA, 1934 nt, Artificial Sequence
  mRNA product Design i-2 comprising derived and/or modified sequence from HRSV(A2)__F-del_DSCav1_mut8 (opt6)
gggagaggcgcugccuacggagguggcagccaucuccuucucggcaucaagcuuaccauggaacuacucauauugaaagccaacgcaaucacaacaauacuaaccgccguaacauuuugcuucgcgucaggccaaaauauaacagaagaauuuuaccaaucaacaugcuccgccguaucaaaaggauaccuaggugcauuacgaaccgguugguacacaucaguaaucacaauagaacuuuccaacauuaaagaaauaaaaugcaauggcacagacgcaaaagucaaacuaauaaaacaagaacuagacaaauauaaaaacgccgucacagacuuacaacuauuaaugcaaagcacaccagcaacaggauccggaucagcaauagcaucaggaguagccgucuguaaaguacuacaccuagaaggcgaaguuaauaaaauuaaaucagcuuuauuaucaaccaacaaagcaguaguaucacuauccggaugcggagucuccguccuaacauucaaaguacuagaccucaagaauuacauagauaaacaacuacuaccaauacucaacaaacaaucauguucaauaccaaacaucgaaaccgucauagaauuucaacaaaaaaauaauagacucuuagaaauaacacgagaauuuagcguaaacgcaggagucacaaccccugucucaacauacaugcuaaccaauuccgaauuauuaucacucauaaaugacaugccaauaacuaaugaccaaaaaaaacuuaugucaaacaacguacaaauaguaagacaacaaucauauucaauaaugugcauaaucaaagaagaaguuuuagcauauguaguacaacuaccacuauauggcgucauagacacaccaugcuggaaauuacacacaucaccucuaugcacaacaaacacaaaagaaggaagcaacauuugccuaaccagaaccgauagaggaugguacugcgauaacgcaggcucaguaucauucuucccucaagccgaaacuugcaaaguccaaucaaauagagucuucugcgauacaaugaacuccuuaacuuuaccaucagaaguaaaucuaugcaacguagauaucuuuaauccaaaauacgauugcaaaaucaugacaucaaaaacagauguaucaucuaguguaauuaccucccuaggagcaauaguaagcugcuacggaaaaacaaaaugcaccgccucuaacaaaugucguggaauaauaaaaacauucucaaacggaugcgauuauguaucaaauaaaggugucgacaccguaucaguaggcaauacacuauacuauguaaauaaacaagaaggacaaucacucuacgucaaaggugaaccaauaauaaacuucuacgacccacuuguauucccaagcgacgaauuugacgcaucaauaagccaaguaaacgaaaaaauaaaccaaucacuagcauucaucagaaaaucagacgaacuacuccacaauguaaaugcaggaaaaucaacaaccaauaucaugauaacaaccauaauaauagucauaauaguaauacuauuaucccucauagccguuggacuacuccuauauuguaaagcacgauaaggacuagugcaucacauuuaaaagcaucucagccuaccaugagaauaagagaaagaaaaugaagaucaauagcuuauucaucucuuuuucuuuuucguugguguaaagccaacacccugucuaaaaaacauaaauuucuuuaaucauuuugccucuuuucucugugcuucaauuaauaaaaaauggaaagaaccuagaucuaaaaaaaaaaaaaaaaaaaaaaaaaaaaaaaaaaaaaaaaaaaaaaaaaaaaaaaaaaaaaaaaugcaucccccccccccccccccccccccccccccccaaaggcucuuuucagagccaccagaauu

SEQ ID NO: 8261 - RNA, 1934 nt, Artificial Sequence
  mRNA product Design i-2 comprising derived and/or modified sequence from HRSV(A2)__F-del_DSCav1_mut8 (opt11)
gggagaggcgcugccuacggagguggcagccaucuccuucucggcaucaagcuuaccauggaacuccucauccucaaagccaacgccaucaccaccauacucaccgcaguaaccuucugcuucgcauccggccaaaacaucacagaagaguucuaccagaguaccugcuccgccgucuccaaaggcuaccuuggcgcccuccguaccgggugguacacauccgucaucacaaucgaacucuccaacaucaaagaaauaaagugcaacggcacagacgccaaaguaaaacugauaaagcaagaacucgacaaauacaaaaacgccguaaccgaccuccagcuacuaaugcaauccacucccgccaccggcagcggauccgccaucgccuccggaguagccgucuguaaagucuuacaccucgaaggcgaagugaacaaaaucaaauccgcccuacucucaaccaacaaagccguaguaucacucuccgggugcggcguuucagugcuaacguucaaaguccuugaccucaaaaacuacaucgacaaacaacuccuccccauccuaaauaaacaauccugcuccauacccaacaucgagacugucaucgaguuccagcagaaaaacaaccgacuccucgaaaucacacgcgaguucucugucaacgccggcgucacaacccccgucuccacauacaugcucaccaacagcgaacuccucucccuaaucaaugacaugcccaucaccaacgaccaaaagaaacucaugucaaacaacguccaaaucguccgccaacaauccuacagcaucaugugcaucaucaaagaagaaguucucgcauacguaguacaacucccccucuacggagugaucgacacccccugcuggaaacuacacaccagcccgcuuugcaccacaaacaccaaggaaggcuccaacaucugccucacucgaaccgaccgcggcugguacugcgacaacgcaggcuccgucaguuucuuuccccaagcagaaacaugcaaaguccaauccaaccgaguauucugcgacaccaugaacucccucacccuaccauccgaaguuaaccuaugcaacguggacaucuucaaccccaaguacgacugcaaaauuaugaccuccaaaaccgacguauccuccagcgucaucaccagccucggagcaauagucuccugcuacggcaagaccaagugcaccgcuuccaacaagugucgcggaaucaucaaaaccuucucaaacggcugcgacuacgucuccaacaaaggcgucgacaccguauccguaggaaacacccuauacuacgucaacaaacaagaaggacaaucccucuaugucaaaggcgaacccaucaucaauuucuacgacccccuagucuucccuuccgacgaguucgacgcguccaucagccaagucaaugaaaagaucaaccagagccuggcauucauccgcaaauccgacgaacuccuccacaacgucaacgcgggaaaauccacgacaaacaucaugaucaccaccaucaucaucgucaucauagucauucuccuuucucucaucgccgugggacuacuucucuacugcaaagcccgauaaggacuagugcaucacauuuaaaagcaucucagccuaccaugagaauaagagaaagaaaaugaagaucaauagcuuauucaucucuuuuucuuuuucguugguguaaagccaacacccugucuaaaaaacauaaauuucuuuaaucauuuugccucuuuucucugugcuucaauuaauaaaaaauggaaagaaccuagaucuaaaaaaaaaaaaaaaaaaaaaaaaaaaaaaaaaaaaaaaaaaaaaaaaaaaaaaaaaaaaaaaaugcaucccccccccccccccccccccccccccccccaaaggcucuuuucagagccaccagaauu

SEQ ID NO: 8262 - RNA, 1930 nt, Artificial Sequence
  mRNA product Design i-2 comprising derived and/or modified sequence from HRSV(A2)__F-del_DSCav1_mut8 (opt1)
ggggcgcugccuacggagguggcagccaucuccuucucggcaucaagcuuaccauggagcugcucauccugaaggccaacgccaucaccaccauccugacggcggugaccuucugcuucgccagcggccagaacaucaccgaggaguucuaccaguccacgugcagcgccgucuccaagggguaccucggcgcccugcggaccggcugguacaccuccgugaucaccaucgagcugagcaacaucaaggagaucaagugcaacgggaccgacgccaaggugaagcucaucaagcaggagcuggacaaguacaagaacgcggucacggaccugcagcuccugaugcaguccaccccggcaaccggcuccggcuccgccaucgcgagcggcgucgccgugugcaaggugcugcaccucgagggggaggucaacaagaucaagagcgcccugcuguccaccaacaaggccguggugagccucuccggcugcggcgucagcgugcugaccuucaaggugcuggaccucaagaacuacaucgacaagcagcugcugcccauccugaacaagcagagcugcuccauccccaacaucgagacggugaucgaguuccagcagaagaacaaccggcuccuggagaucacccgcgaguucagcgugaacgccggggucaccacccccguguccacguacaugcugaccaacagcgagcuccugucccugaucaacgacaugccgaucaccaacgaccagaagaagcucaugagcaacaacgugcagaucguccggcagcaguccuacagcaucaugugcaucaucaaggaggaggugcuggcguacgugguccagcugccccucuacggcgugaucgacacccccugcuggaagcugcacacgagcccccugugcaccaccaacaccaaggagggguccaacaucugccucacgcgcaccgaccggggcugguacugcgacaacgccggcagcgucuccuucuucccgcaggccgagaccugcaaggugcagagcaaccgcguguucugcgacaccaugaacucccugacgcugcccagcgagguaaaccucugcaacgucgacaucuucaaccccaaguacgacugcaagaucaugaccuccaagaccgacgugagcuccagcgugaucaccucccugggggccaucgucagcugcuacggcaagacgaagugcaccgccagcaacaagugccgggggaucaucaagaccuucuccaacggcugcgacuacgugagcaacaagggcguggacaccguguccgucgggaacacccuguacuacgugaacaagcaggagggccagagccucuacgugaagggggagcccaucaucaacuucuacgacccgcuggucuuccccuccgacgaguucgacgcgagcaucucccaggugaacgagaagaucaaccagagccuggccuucauccgcaaguccgacgagcugcuccacaacgugaacgccggcaagagcacgaccaacaucaugaucaccaccaucaucaucgucaucaucgugauccugcugucccucaucgccguggggcugcugcucuacugcaaggcccggugaggacuagugcaucacauuuaaaagcaucucagccuaccaugagaauaagagaaagaaaaugaagaucaauagcuuauucaucucuuuuucuuuuucguugguguaaagccaacacccugucuaaaaaacauaaauuucuuuaaucauuuugccucuuuucucugugcuucaauuaauaaaaaauggaaagaaccuagaucuaaaaaaaaaaaaaaaaaaaaaaaaaaaaaaaaaaaaaaaaaaaaaaaaaaaaaaaaaaaaaaaaugcaucccccccccccccccccccccccccccccccaaaggcucuuuucagagccaccagaauu

SEQ ID NO: 8263 - RNA, 1930 nt, Artificial Sequence
  mRNA product Design i-2 comprising derived and/or modified sequence from HRSV(A2)__F-del_DSCav1_mut8 (opt1)
ggggcgcugccuacggagguggcagccaucuccuucucggcaucaagcuuaccauggagcugcucauccugaaggccaacgccaucaccaccauccugacggcggugaccuucugcuucgccagcggccagaacaucaccgaggaguucuaccaguccacgugcagcgccgucuccaagggguaccucggcgcccugcgcaccgggugguacaccagcgugaucaccaucgagcuguccaacaucaaggagaucaagugcaacggcaccgacgccaaggugaagcucaucaagcaggagcuggacaaguacaagaacgcggucacggaccugcagcuccugaugcagagcacccccgccaccggguccggcagcgccaucgccuccggcguggcggugugcaagguccugcaccucgagggggaggugaacaagaucaagagcgcccugcuguccaccaacaaggccguggucagccucuccggcugcggggugagcgugcugacguucaagguccuggaccucaagaacuacaucgacaagcagcugcugccgauccucaacaagcaguccugcagcauccccaacaucgagaccgugaucgaguuccagcagaagaacaaccggcugcuggagaucacccgcgaguucuccgugaacgccggcgucaccacgcccgugagcaccuacaugcucaccaacuccgagcugcugagccucaucaacgacaugcccaucaccaacgaccagaagaagcugaugagcaacaacgugcagaucguccggcagcaguccuacagcaucaugugcaucaucaaggaggaggugcuggccuacgugguccagcucccgcuguacggggugaucgacacgcccugcuggaagcugcacaccagcccccucugcaccaccaacacgaaggagggcuccaacaucugccugacccgcaccgaccggggcugguacugcgacaacgcgggguccgugagcuucuucccccaggccgagaccugcaagguccaguccaaccgcguguucugcgacacgaugaacagccugacccucccguccgaggucaaccugugcaacguggacaucuucaaccccaaguacgacugcaagaucaugaccagcaagaccgacguguccagcuccgucaucacgagccugggcgccaucguguccugcuacgggaagaccaagugcaccgccagcaacaagugccggggcaucaucaagaccuucuccaacggcugcgacuacgugagcaacaagggggucgacacgguguccgugggcaacacccucuacuacgucaacaagcaggaggggcagagccuguacgugaagggcgagcccaucaucaacuucuacgacccccugguguucccgagcgacgaguucgacgccuccaucagccaggucaacgagaagaucaaccagucccucgcguucauccgcaagagcgacgagcugcugcacaacgugaacgccgggaaguccaccaccaacaucaugaucaccacgaucaucaucgugaucaucgucauccuccugagccugaucgccgugggccuccugcuguacugcaaggcccggugaggacuagugcaucacauuuaaaagcaucucagccuaccaugagaauaagagaaagaaaaugaagaucaauagcuuauucaucucuuuuucuuuuucguugguguaaagccaacacccugucuaaaaaacauaaauuucuuuaaucauuuugccucuuuucucugugcuucaauuaauaaaaaauggaaagaaccuagaucuaaaaaaaaaaaaaaaaaaaaaaaaaaaaaaaaaaaaaaaaaaaaaaaaaaaaaaaaaaaaaaaaugcaucccccccccccccccccccccccccccccccaaaggcucuuuucagagccaccagaauu

SEQ ID NO: 8264 - RNA, 1930 nt, Artificial Sequence
  mRNA product Design i-2 comprising derived and/or modified sequence from HRSV(A2)__F-del_DSCav1_mut8 (opt2)
ggggcgcugccuacggagguggcagccaucuccuucucggcaucaagcuuaccauggagcuccucauccucaaggccaacgccaucaccaccauccucaccgccgucaccuucugcuucgccuccggccagaacaucaccgaggaguucuaccaguccaccugcuccgccgucuccaagggcuaccucggcgcccuccgcaccggcugguacaccuccgucaucaccaucgagcucuccaacaucaaggagaucaagugcaacggcaccgacgccaaggucaagcucaucaagcaggagcucgacaaguacaagaacgccgucaccgaccuccagcuccucaugcaguccacccccgccaccggcuccggcuccgccaucgccuccggcgucgccgucugcaagguccuccaccucgagggcgaggucaacaagaucaaguccgcccuccucuccaccaacaaggccgucgucucccucuccggcugcggcgucuccguccucaccuucaagguccucgaccucaagaacuacaucgacaagcagcuccuccccauccucaacaagcaguccugcuccauccccaacaucgagaccgucaucgaguuccagcagaagaacaaccgccuccucgagaucacccgcgaguucuccgucaacgccggcgucaccacccccgucuccaccuacaugcucaccaacuccgagcuccucucccucaucaacgacaugcccaucaccaacgaccagaagaagcucauguccaacaacguccagaucguccgccagcaguccuacuccaucaugugcaucaucaaggaggagguccucgccuacgucguccagcucccccucuacggcgucaucgacacccccugcuggaagcuccacaccuccccccucugcaccaccaacaccaaggagggcuccaacaucugccucacccgcaccgaccgcggcugguacugcgacaacgccggcuccgucuccuucuucccccaggccgagaccugcaagguccaguccaaccgcgucuucugcgacaccaugaacucccucacccuccccuccgaggucaaccucugcaacgucgacaucuucaaccccaaguacgacugcaagaucaugaccuccaagaccgacgucuccuccuccgucaucaccucccucggcgccaucgucuccugcuacggcaagaccaagugcaccgccuccaacaagugccgcggcaucaucaagaccuucuccaacggcugcgacuacgucuccaacaagggcgucgacaccgucuccgucggcaacacccucuacuacgucaacaagcaggagggccagucccucuacgucaagggcgagcccaucaucaacuucuacgacccccucgucuuccccuccgacgaguucgacgccuccaucucccaggucaacgagaagaucaaccagucccucgccuucauccgcaaguccgacgagcuccuccacaacgucaacgccggcaaguccaccaccaacaucaugaucaccaccaucaucaucgucaucaucgucauccuccucucccucaucgccgucggccuccuccucuacugcaaggcccgcugaggacuagugcaucacauuuaaaagcaucucagccuaccaugagaauaagagaaagaaaaugaagaucaauagcuuauucaucucuuuuucuuuuucguugguguaaagccaacacccugucuaaaaaacauaaauuucuuuaaucauuuugccucuuuucucugugcuucaauuaauaaaaaauggaaagaaccuagaucuaaaaaaaaaaaaaaaaaaaaaaaaaaaaaaaaaaaaaaaaaaaaaaaaaaaaaaaaaaaaaaaaugcaucccccccccccccccccccccccccccccccaaaggcucuuuucagagccaccagaauu

SEQ ID NO: 8265 - RNA, 1930 nt, Artificial Sequence
  mRNA product Design i-2 comprising derived and/or modified sequence from HRSV(A2)__F-del_DSCav1_mut8 (opt3)
ggggcgcugccuacggagguggcagccaucuccuucucggcaucaagcuuaccauggagcugcucauccuuaaggccaacgcuauuaccacaauacugacugcagugacguucugcuuugccagcggccagaauaucaccgaagaguucuaccaauccacauguucugcggucucaaaaggguauuugggagcuuuaagaacugguugguacaccaguguuauuacaaucgaacugagcaacauuaaggagaucaaaugcaauggcaccgacgccaaggugaaacuaauaaagcaggaacucgauaaguauaaaaacgcaguaacugaccugcagcuucugaugcaguccacacccgccaccgggucuggaucggcuaucgcaucaggcguggccgucuguaagguguugcaccucgagggugagguuaauaaaauuaagagcgcucugcugaguacgaacaaagccguggucucccucucugggugcggagugagcguauuaacuuuuaagguucuggaucuuaagaauuacaucgacaaacaauugcugccuauucuaaacaagcaguccuguucaaucccaaauauagaaaccgugauugaguuccagcagaaaaacaauaggcuccuggaaaucacacgggaguuuagugucaacgcgggcgugacuaccccggugagcacauauaugcuuaccaauucugagcuguugucccucauuaacgauaugcccaucacgaaugaccaaaagaaacugaugucaaacaacguccagaucguucgccagcagagcuacaguauuaugugcauaaucaaggaagagguguuagcauauguagugcaacugccucucuacggcgucauugauacuccauguuggaaacuucauacaucuccccugugcaccacuaauacaaaggaaggguccaacaucuguuugacccgaacggaccguggaugguacugcgauaaugccgguagcgugucguucuuuccucaggcugagaccuguaagguucagucuaacagaguguucugcgacacaaugaacucccuaacucugccaucagaagucaaucucugcaauguggauauauuuaaccccaaauaugacuguaagauuaugaccaguaaaacagauguaagcuccucuguuaucacuagccugggcgccaucgugucaugcuacgggaagaccaaauguacagcaaguaauaagugcaggggaauuaucaagaccuucuccaacggcugugacuaugucagcaauaaagguguggacacugucucuguggggaacacgcuuuacuauguuaauaagcaagagggacagucacuguacgugaaaggcgagccuauuauaaacuuuuaugauccauugguauucccgagugacgaauuugaugcuagcaucucccaggucaaugagaagauuaaccagucucucgccuucauccggaaaucggacgaacuguuacacaacgugaaugcgggcaagagcacaaccaacaucaugauuacuaccauaaucauuguuaucauugugauccugcuaucccucauagccgucgggcugcuuuuguacugcaaggcacgcugaggacuagugcaucacauuuaaaagcaucucagccuaccaugagaauaagagaaagaaaaugaagaucaauagcuuauucaucucuuuuucuuuuucguugguguaaagccaacacccugucuaaaaaacauaaauuucuuuaaucauuuugccucuuuucucugugcuucaauuaauaaaaaauggaaagaaccuagaucuaaaaaaaaaaaaaaaaaaaaaaaaaaaaaaaaaaaaaaaaaaaaaaaaaaaaaaaaaaaaaaaaugcaucccccccccccccccccccccccccccccccaaaggcucuuuucagagccaccagaauu

SEQ ID NO: 8266 - RNA, 1930 nt, Artificial Sequence
  mRNA product Design i-2 comprising derived and/or modified sequence from HRSV(A2)__F-del_DSCav1_mut8 (opt4)
ggggcgcugccuacggagguggcagccaucuccuucucggcaucaagcuuaccauggagcugcugauccugaaggccaacgccaucaccaccauccugaccgccgugaccuucugcuucgccagcggccagaacaucaccgaggaguucuaccagagcaccugcagcgccgugagcaagggcuaccugggcgcccugagaaccggcugguacaccagcgugaucaccaucgagcugagcaacaucaaggagaucaagugcaacggcaccgacgccaaggugaagcugaucaagcaggagcuggacaaguacaagaacgccgugaccgaccugcagcugcugaugcagagcacccccgccaccggcagcggcagcgccaucgccagcggcguggccgugugcaaggugcugcaccuggagggcgaggugaacaagaucaagagcgcccugcugagcaccaacaaggccguggugagccugagcggcugcggcgugagcgugcugaccuucaaggugcuggaccugaagaacuacaucgacaagcagcugcugcccauccugaacaagcagagcugcagcauccccaacaucgagaccgugaucgaguuccagcagaagaacaacagacugcuggagaucaccagagaguucagcgugaacgccggcgugaccacccccgugagcaccuacaugcugaccaacagcgagcugcugagccugaucaacgacaugcccaucaccaacgaccagaagaagcugaugagcaacaacgugcagaucgugagacagcagagcuacagcaucaugugcaucaucaaggaggaggugcuggccuacguggugcagcugccccuguacggcgugaucgacacccccugcuggaagcugcacaccagcccccugugcaccaccaacaccaaggagggcagcaacaucugccugaccagaaccgacagaggcugguacugcgacaacgccggcagcgugagcuucuucccccaggccgagaccugcaaggugcagagcaacagaguguucugcgacaccaugaacagccugacccugcccagcgaggugaaccugugcaacguggacaucuucaaccccaaguacgacugcaagaucaugaccagcaagaccgacgugagcagcagcgugaucaccagccugggcgccaucgugagcugcuacggcaagaccaagugcaccgccagcaacaagugcagaggcaucaucaagaccuucagcaacggcugcgacuacgugagcaacaagggcguggacaccgugagcgugggcaacacccuguacuacgugaacaagcaggagggccagagccuguacgugaagggcgagcccaucaucaacuucuacgacccccugguguuccccagcgacgaguucgacgccagcaucagccaggugaacgagaagaucaaccagagccuggccuucaucagaaagagcgacgagcugcugcacaacgugaacgccggcaagagcaccaccaacaucaugaucaccaccaucaucaucgugaucaucgugauccugcugagccugaucgccgugggccugcugcuguacugcaaggccagaugaggacuagugcaucacauuuaaaagcaucucagccuaccaugagaauaagagaaagaaaaugaagaucaauagcuuauucaucucuuuuucuuuuucguugguguaaagccaacacccugucuaaaaaacauaaauuucuuuaaucauuuugccucuuuucucugugcuucaauuaauaaaaaauggaaagaaccuagaucuaaaaaaaaaaaaaaaaaaaaaaaaaaaaaaaaaaaaaaaaaaaaaaaaaaaaaaaaaaaaaaaaugcaucccccccccccccccccccccccccccccccaaaggcucuuuucagagccaccagaauu

SEQ ID NO: 8267 - RNA, 1930 nt, Artificial Sequence
  mRNA product Design i-2 comprising derived and/or modified sequence from HRSV(A2)__F-del_DSCav1_mut8 (opt5)
ggggcgcugccuacggagguggcagccaucuccuucucggcaucaagcuuaccauggagcugcucauccugaaggccaacgcuauuaccacaauccuuacggccgugaccuucugcuuugcgagcggccagaauauuacagaagaguucuaccaauccaccuguucugcugucagcaaaggguaucugggagcccucagaacaggcugguacaccuccguuaucacaauugaacugucuaacaucaaggagaucaaaugcaaugggaccgacgccaaggugaaacuuauuaagcaggaacuggauaaguauaaaaacgcugugacggaccuccagcugcugaugcagagcacccccgccacaggauccggcucugcuaucgccagcggggucgcgguguguaagguucuccaccuggagggagaggugaauaaaauuaaguccgcccuucugagcaccaacaaagcugucgugucucucuccggcugcggcguuagcgugcugacauuuaagguccuugaucugaagaauuacaucgacaaacaacuccugccuauucugaacaagcagucuuguuccaucccgaauauugaaaccgugaucgaguuccagcagaaaaacaaucggcuccuggaaaucacgcgcgaguuuagcgugaacgccggggucacaacccccguuucuacauauaugcuuaccaauuccgagcugcucagccugauuaacgauaugccuaucaccaaugaccaaaagaaacuuauguccaacaacgugcagauugugagacagcagucuuacagcaucaugugcauuaucaaggaagagguccuggcuuaugugguucaacucccccuguacggagugaucgauacaccuuguuggaaacugcauacgagcccccucugcaccacaaauaccaaggaaggcagcaacauuugucugacacggaccgaccgcgggugguacugcgauaaugccggaucugucuccuucuuuccucaggcggagacguguaaggugcagagcaacagaguuuucugcgacacaaugaacucucuuacccugccgagcgaagugaaucucugcaaugucgauaucuuuaaccccaaauaugacuguaagauuaugaccuccaaaacagaugugucuagcuccgucaucaccagccugggcgccauugugucuugcuacgggaagacaaaauguacggcuuccaauaagugccggggaaucaucaagaccuucagcaacggcugugacuauguuucuaauaaaggcguggacacagucuccguggggaacacccuuuacuauguuaauaagcaagagggacagagccuguacgugaaaggcgagccuauuaucaacuuuuaugauccccucgucuucccuuccgacgaauuugaugccucuauuagccaggugaaugagaagaucaaccagucccuggcuuucauucgcaaaucugacgaacugcuccacaacgugaaugccgggaaguccacaaccaacaucaugauuacgaccaucaucauuguuaucauugucauccugcuuucccugauugccgugggacuccugcuguacugcaaggcuagaugaggacuagugcaucacauuuaaaagcaucucagccuaccaugagaauaagagaaagaaaaugaagaucaauagcuuauucaucucuuuuucuuuuucguugguguaaagccaacacccugucuaaaaaacauaaauuucuuuaaucauuuugccucuuuucucugugcuucaauuaauaaaaaauggaaagaaccuagaucuaaaaaaaaaaaaaaaaaaaaaaaaaaaaaaaaaaaaaaaaaaaaaaaaaaaaaaaaaaaaaaaaugcaucccccccccccccccccccccccccccccccaaaggcucuuuucagagccaccagaauu

SEQ ID NO: 8268 - RNA, 1930 nt, Artificial Sequence
  mRNA product Design i-2 comprising derived and/or modified sequence from HRSV(A2)__F-del_DSCav1_mut8 (opt6)
ggggcgcugccuacggagguggcagccaucuccuucucggcaucaagcuuaccauggaacuacucauauugaaagccaacgcaaucacaacaauacuaaccgccguaacauuuugcuucgcgucaggccaaaauauaacagaagaauuuuaccaaucaacaugcuccgccguaucaaaaggauaccuaggugcauuacgaaccgguugguacacaucaguaaucacaauagaacuuuccaacauuaaagaaauaaaaugcaauggcacagacgcaaaagucaaacuaauaaaacaagaacuagacaaauauaaaaacgccgucacagacuuacaacuauuaaugcaaagcacaccagcaacaggauccggaucagcaauagcaucaggaguagccgucuguaaaguacuacaccuagaaggcgaaguuaauaaaauuaaaucagcuuuauuaucaaccaacaaagcaguaguaucacuauccggaugcggagucuccguccuaacauucaaaguacuagaccucaagaauuacauagauaaacaacuacuaccaauacucaacaaacaaucauguucaauaccaaacaucgaaaccgucauagaauuucaacaaaaaaauaauagacucuuagaaauaacacgagaauuuagcguaaacgcaggagucacaaccccugucucaacauacaugcuaaccaauuccgaauuauuaucacucauaaaugacaugccaauaacuaaugaccaaaaaaaacuuaugucaaacaacguacaaauaguaagacaacaaucauauucaauaaugugcauaaucaaagaagaaguuuuagcauauguaguacaacuaccacuauauggcgucauagacacaccaugcuggaaauuacacacaucaccucuaugcacaacaaacacaaaagaaggaagcaacauuugccuaaccagaaccgauagaggaugguacugcgauaacgcaggcucaguaucauucuucccucaagccgaaacuugcaaaguccaaucaaauagagucuucugcgauacaaugaacuccuuaacuuuaccaucagaaguaaaucuaugcaacguagauaucuuuaauccaaaauacgauugcaaaaucaugacaucaaaaacagauguaucaucuaguguaauuaccucccuaggagcaauaguaagcugcuacggaaaaacaaaaugcaccgccucuaacaaaugucguggaauaauaaaaacauucucaaacggaugcgauuauguaucaaauaaaggugucgacaccguaucaguaggcaauacacuauacuauguaaauaaacaagaaggacaaucacucuacgucaaaggugaaccaauaauaaacuucuacgacccacuuguauucccaagcgacgaauuugacgcaucaauaagccaaguaaacgaaaaaauaaaccaaucacuagcauucaucagaaaaucagacgaacuacuccacaauguaaaugcaggaaaaucaacaaccaauaucaugauaacaaccauaauaauagucauaauaguaauacuauuaucccucauagccguuggacuacuccuauauuguaaagcacgauaaggacuagugcaucacauuuaaaagcaucucagccuaccaugagaauaagagaaagaaaaugaagaucaauagcuuauucaucucuuuuucuuuuucguugguguaaagccaacacccugucuaaaaaacauaaauuucuuuaaucauuuugccucuuuucucugugcuucaauuaauaaaaaauggaaagaaccuagaucuaaaaaaaaaaaaaaaaaaaaaaaaaaaaaaaaaaaaaaaaaaaaaaaaaaaaaaaaaaaaaaaaugcaucccccccccccccccccccccccccccccccaaaggcucuuuucagagccaccagaauu

SEQ ID NO: 8269 - RNA, 1930 nt, Artificial Sequence
  mRNA product Design i-2 comprising derived and/or modified sequence from HRSV(A2)__F-del_DSCav1_mut8 (opt11)
ggggcgcugccuacggagguggcagccaucuccuucucggcaucaagcuuaccauggaacuccucauccucaaagccaacgccaucaccaccauacucaccgcaguaaccuucugcuucgcauccggccaaaacaucacagaagaguucuaccagaguaccugcuccgccgucuccaaaggcuaccuuggcgcccuccguaccgggugguacacauccgucaucacaaucgaacucuccaacaucaaagaaauaaagugcaacggcacagacgccaaaguaaaacugauaaagcaagaacucgacaaauacaaaaacgccguaaccgaccuccagcuacuaaugcaauccacucccgccaccggcagcggauccgccaucgccuccggaguagccgucuguaaagucuuacaccucgaaggcgaagugaacaaaaucaaauccgcccuacucucaaccaacaaagccguaguaucacucuccgggugcggcguuucagugcuaacguucaaaguccuugaccucaaaaacuacaucgacaaacaacuccuccccauccuaaauaaacaauccugcuccauacccaacaucgagacugucaucgaguuccagcagaaaaacaaccgacuccucgaaaucacacgcgaguucucugucaacgccggcgucacaacccccgucuccacauacaugcucaccaacagcgaacuccucucccuaaucaaugacaugcccaucaccaacgaccaaaagaaacucaugucaaacaacguccaaaucguccgccaacaauccuacagcaucaugugcaucaucaaagaagaaguucucgcauacguaguacaacucccccucuacggagugaucgacacccccugcuggaaacuacacaccagcccgcuuugcaccacaaacaccaaggaaggcuccaacaucugccucacucgaaccgaccgcggcugguacugcgacaacgcaggcuccgucaguuucuuuccccaagcagaaacaugcaaaguccaauccaaccgaguauucugcgacaccaugaacucccucacccuaccauccgaaguuaaccuaugcaacguggacaucuucaaccccaaguacgacugcaaaauuaugaccuccaaaaccgacguauccuccagcgucaucaccagccucggagcaauagucuccugcuacggcaagaccaagugcaccgcuuccaacaagugucgcggaaucaucaaaaccuucucaaacggcugcgacuacgucuccaacaaaggcgucgacaccguauccguaggaaacacccuauacuacgucaacaaacaagaaggacaaucccucuaugucaaaggcgaacccaucaucaauuucuacgacccccuagucuucccuuccgacgaguucgacgcguccaucagccaagucaaugaaaagaucaaccagagccuggcauucauccgcaaauccgacgaacuccuccacaacgucaacgcgggaaaauccacgacaaacaucaugaucaccaccaucaucaucgucaucauagucauucuccuuucucucaucgccgugggacuacuucucuacugcaaagcccgauaaggacuagugcaucacauuuaaaagcaucucagccuaccaugagaauaagagaaagaaaaugaagaucaauagcuuauucaucucuuuuucuuuuucguugguguaaagccaacacccugucuaaaaaacauaaauuucuuuaaucauuuugccucuuuucucugugcuucaauuaauaaaaaauggaaagaaccuagaucuaaaaaaaaaaaaaaaaaaaaaaaaaaaaaaaaaaaaaaaaaaaaaaaaaaaaaaaaaaaaaaaaugcaucccccccccccccccccccccccccccccccaaaggcucuuuucagagccaccagaauu

SEQ ID NO: 8270 - RNA, 1765 nt, Artificial Sequence
  mRNA product Design i-3 comprising derived and/or modified sequence from HRSV(A2)__F-del_DSCav1_mut8 (opt1)
gggagaaagcuuaccauggagcugcucauccugaaggccaacgccaucaccaccauccugacggcggugaccuucugcuucgccagcggccagaacaucaccgaggaguucuaccaguccacgugcagcgccgucuccaagggguaccucggcgcccugcggaccggcugguacaccuccgugaucaccaucgagcugagcaacaucaaggagaucaagugcaacgggaccgacgccaaggugaagcucaucaagcaggagcuggacaaguacaagaacgcggucacggaccugcagcuccugaugcaguccaccccggcaaccggcuccggcuccgccaucgcgagcggcgucgccgugugcaaggugcugcaccucgagggggaggucaacaagaucaagagcgcccugcuguccaccaacaaggccguggugagccucuccggcugcggcgucagcgugcugaccuucaaggugcuggaccucaagaacuacaucgacaagcagcugcugcccauccugaacaagcagagcugcuccauccccaacaucgagacggugaucgaguuccagcagaagaacaaccggcuccuggagaucacccgcgaguucagcgugaacgccggggucaccacccccguguccacguacaugcugaccaacagcgagcuccugucccugaucaacgacaugccgaucaccaacgaccagaagaagcucaugagcaacaacgugcagaucguccggcagcaguccuacagcaucaugugcaucaucaaggaggaggugcuggcguacgugguccagcugccccucuacggcgugaucgacacccccugcuggaagcugcacacgagcccccugugcaccaccaacaccaaggagggguccaacaucugccucacgcgcaccgaccggggcugguacugcgacaacgccggcagcgucuccuucuucccgcaggccgagaccugcaaggugcagagcaaccgcguguucugcgacaccaugaacucccugacgcugcccagcgagguaaaccucugcaacgucgacaucuucaaccccaaguacgacugcaagaucaugaccuccaagaccgacgugagcuccagcgugaucaccucccugggggccaucgucagcugcuacggcaagacgaagugcaccgccagcaacaagugccgggggaucaucaagaccuucuccaacggcugcgacuacgugagcaacaagggcguggacaccguguccgucgggaacacccuguacuacgugaacaagcaggagggccagagccucuacgugaagggggagcccaucaucaacuucuacgacccgcuggucuuccccuccgacgaguucgacgcgagcaucucccaggugaacgagaagaucaaccagagccuggccuucauccgcaaguccgacgagcugcuccacaacgugaacgccggcaagagcacgaccaacaucaugaucaccaccaucaucaucgucaucaucgugauccugcugucccucaucgccguggggcugcugcucuacugcaaggcccggugaggacuaguuauaagacugacuagcccgaugggccucccaacgggcccuccuccccuccuugcaccgagauuaauaaaaaaaaaaaaaaaaaaaaaaaaaaaaaaaaaaaaaaaaaaaaaaaaaaaaaaaaaaaaaaaaugcaucccccccccccccccccccccccccccccccaaaggcucuuuucagagccaccagaauu

SEQ ID NO: 8271 - RNA, 1765 nt, Artificial Sequence
  mRNA product Design i-3 comprising derived and/or modified sequence from HRSV(A2)__F-del_DSCav1_mut8 (opt1)
gggagaaagcuuaccauggagcugcucauccugaaggccaacgccaucaccaccauccugacggcggugaccuucugcuucgccagcggccagaacaucaccgaggaguucuaccaguccacgugcagcgccgucuccaagggguaccucggcgcccugcgcaccgggugguacaccagcgugaucaccaucgagcuguccaacaucaaggagaucaagugcaacggcaccgacgccaaggugaagcucaucaagcaggagcuggacaaguacaagaacgcggucacggaccugcagcuccugaugcagagcacccccgccaccggguccggcagcgccaucgccuccggcguggcggugugcaagguccugcaccucgagggggaggugaacaagaucaagagcgcccugcuguccaccaacaaggccguggucagccucuccggcugcggggugagcgugcugacguucaagguccuggaccucaagaacuacaucgacaagcagcugcugccgauccucaacaagcaguccugcagcauccccaacaucgagaccgugaucgaguuccagcagaagaacaaccggcugcuggagaucacccgcgaguucuccgugaacgccggcgucaccacgcccgugagcaccuacaugcucaccaacuccgagcugcugagccucaucaacgacaugcccaucaccaacgaccagaagaagcugaugagcaacaacgugcagaucguccggcagcaguccuacagcaucaugugcaucaucaaggaggaggugcuggccuacgugguccagcucccgcuguacggggugaucgacacgcccugcuggaagcugcacaccagcccccucugcaccaccaacacgaaggagggcuccaacaucugccugacccgcaccgaccggggcugguacugcgacaacgcgggguccgugagcuucuucccccaggccgagaccugcaagguccaguccaaccgcguguucugcgacacgaugaacagccugacccucccguccgaggucaaccugugcaacguggacaucuucaaccccaaguacgacugcaagaucaugaccagcaagaccgacguguccagcuccgucaucacgagccugggcgccaucguguccugcuacgggaagaccaagugcaccgccagcaacaagugccggggcaucaucaagaccuucuccaacggcugcgacuacgugagcaacaagggggucgacacgguguccgugggcaacacccucuacuacgucaacaagcaggaggggcagagccuguacgugaagggcgagcccaucaucaacuucuacgacccccugguguucccgagcgacgaguucgacgccuccaucagccaggucaacgagaagaucaaccagucccucgcguucauccgcaagagcgacgagcugcugcacaacgugaacgccgggaaguccaccaccaacaucaugaucaccacgaucaucaucgugaucaucgucauccuccugagccugaucgccgugggccuccugcuguacugcaaggcccggugaggacuaguuauaagacugacuagcccgaugggccucccaacgggcccuccuccccuccuugcaccgagauuaauaaaaaaaaaaaaaaaaaaaaaaaaaaaaaaaaaaaaaaaaaaaaaaaaaaaaaaaaaaaaaaaaugcaucccccccccccccccccccccccccccccccaaaggcucuuuucagagccaccagaauu

SEQ ID NO: 8272 - RNA, 1765 nt, Artificial Sequence
  mRNA product Design i-3 comprising derived and/or modified sequence from HRSV(A2)__F-del_DSCav1_mut8 (opt2)
gggagaaagcuuaccauggagcuccucauccucaaggccaacgccaucaccaccauccucaccgccgucaccuucugcuucgccuccggccagaacaucaccgaggaguucuaccaguccaccugcuccgccgucuccaagggcuaccucggcgcccuccgcaccggcugguacaccuccgucaucaccaucgagcucuccaacaucaaggagaucaagugcaacggcaccgacgccaaggucaagcucaucaagcaggagcucgacaaguacaagaacgccgucaccgaccuccagcuccucaugcaguccacccccgccaccggcuccggcuccgccaucgccuccggcgucgccgucugcaagguccuccaccucgagggcgaggucaacaagaucaaguccgcccuccucuccaccaacaaggccgucgucucccucuccggcugcggcgucuccguccucaccuucaagguccucgaccucaagaacuacaucgacaagcagcuccuccccauccucaacaagcaguccugcuccauccccaacaucgagaccgucaucgaguuccagcagaagaacaaccgccuccucgagaucacccgcgaguucuccgucaacgccggcgucaccacccccgucuccaccuacaugcucaccaacuccgagcuccucucccucaucaacgacaugcccaucaccaacgaccagaagaagcucauguccaacaacguccagaucguccgccagcaguccuacuccaucaugugcaucaucaaggaggagguccucgccuacgucguccagcucccccucuacggcgucaucgacacccccugcuggaagcuccacaccuccccccucugcaccaccaacaccaaggagggcuccaacaucugccucacccgcaccgaccgcggcugguacugcgacaacgccggcuccgucuccuucuucccccaggccgagaccugcaagguccaguccaaccgcgucuucugcgacaccaugaacucccucacccuccccuccgaggucaaccucugcaacgucgacaucuucaaccccaaguacgacugcaagaucaugaccuccaagaccgacgucuccuccuccgucaucaccucccucggcgccaucgucuccugcuacggcaagaccaagugcaccgccuccaacaagugccgcggcaucaucaagaccuucuccaacggcugcgacuacgucuccaacaagggcgucgacaccgucuccgucggcaacacccucuacuacgucaacaagcaggagggccagucccucuacgucaagggcgagcccaucaucaacuucuacgacccccucgucuuccccuccgacgaguucgacgccuccaucucccaggucaacgagaagaucaaccagucccucgccuucauccgcaaguccgacgagcuccuccacaacgucaacgccggcaaguccaccaccaacaucaugaucaccaccaucaucaucgucaucaucgucauccuccucucccucaucgccgucggccuccuccucuacugcaaggcccgcugaggacuaguuauaagacugacuagcccgaugggccucccaacgggcccuccuccccuccuugcaccgagauuaauaaaaaaaaaaaaaaaaaaaaaaaaaaaaaaaaaaaaaaaaaaaaaaaaaaaaaaaaaaaaaaaaugcaucccccccccccccccccccccccccccccccaaaggcucuuuucagagccaccagaauu

SEQ ID NO: 8273 - RNA, 1765 nt, Artificial Sequence
  mRNA product Design i-3 comprising derived and/or modified sequence from HRSV(A2)__F-del_DSCav1_mut8 (opt3)
gggagaaagcuuaccauggagcugcucauccuuaaggccaacgcuauuaccacaauacugacugcagugacguucugcuuugccagcggccagaauaucaccgaagaguucuaccaauccacauguucugcggucucaaaaggguauuugggagcuuuaagaacugguugguacaccaguguuauuacaaucgaacugagcaacauuaaggagaucaaaugcaauggcaccgacgccaaggugaaacuaauaaagcaggaacucgauaaguauaaaaacgcaguaacugaccugcagcuucugaugcaguccacacccgccaccgggucuggaucggcuaucgcaucaggcguggccgucuguaagguguugcaccucgagggugagguuaauaaaauuaagagcgcucugcugaguacgaacaaagccguggucucccucucugggugcggagugagcguauuaacuuuuaagguucuggaucuuaagaauuacaucgacaaacaauugcugccuauucuaaacaagcaguccuguucaaucccaaauauagaaaccgugauugaguuccagcagaaaaacaauaggcuccuggaaaucacacgggaguuuagugucaacgcgggcgugacuaccccggugagcacauauaugcuuaccaauucugagcuguugucccucauuaacgauaugcccaucacgaaugaccaaaagaaacugaugucaaacaacguccagaucguucgccagcagagcuacaguauuaugugcauaaucaaggaagagguguuagcauauguagugcaacugccucucuacggcgucauugauacuccauguuggaaacuucauacaucuccccugugcaccacuaauacaaaggaaggguccaacaucuguuugacccgaacggaccguggaugguacugcgauaaugccgguagcgugucguucuuuccucaggcugagaccuguaagguucagucuaacagaguguucugcgacacaaugaacucccuaacucugccaucagaagucaaucucugcaauguggauauauuuaaccccaaauaugacuguaagauuaugaccaguaaaacagauguaagcuccucuguuaucacuagccugggcgccaucgugucaugcuacgggaagaccaaauguacagcaaguaauaagugcaggggaauuaucaagaccuucuccaacggcugugacuaugucagcaauaaagguguggacacugucucuguggggaacacgcuuuacuauguuaauaagcaagagggacagucacuguacgugaaaggcgagccuauuauaaacuuuuaugauccauugguauucccgagugacgaauuugaugcuagcaucucccaggucaaugagaagauuaaccagucucucgccuucauccggaaaucggacgaacuguuacacaacgugaaugcgggcaagagcacaaccaacaucaugauuacuaccauaaucauuguuaucauugugauccugcuaucccucauagccgucgggcugcuuuuguacugcaaggcacgcugaggacuaguuauaagacugacuagcccgaugggccucccaacgggcccuccuccccuccuugcaccgagauuaauaaaaaaaaaaaaaaaaaaaaaaaaaaaaaaaaaaaaaaaaaaaaaaaaaaaaaaaaaaaaaaaaugcaucccccccccccccccccccccccccccccccaaaggcucuuuucagagccaccagaauu

SEQ ID NO: 8274 - RNA, 1765 nt, Artificial Sequence
  mRNA product Design i-3 comprising derived and/or modified sequence from HRSV(A2)__F-del_DSCav1_mut8 (opt4)
gggagaaagcuuaccauggagcugcugauccugaaggccaacgccaucaccaccauccugaccgccgugaccuucugcuucgccagcggccagaacaucaccgaggaguucuaccagagcaccugcagcgccgugagcaagggcuaccugggcgcccugagaaccggcugguacaccagcgugaucaccaucgagcugagcaacaucaaggagaucaagugcaacggcaccgacgccaaggugaagcugaucaagcaggagcuggacaaguacaagaacgccgugaccgaccugcagcugcugaugcagagcacccccgccaccggcagcggcagcgccaucgccagcggcguggccgugugcaaggugcugcaccuggagggcgaggugaacaagaucaagagcgcccugcugagcaccaacaaggccguggugagccugagcggcugcggcgugagcgugcugaccuucaaggugcuggaccugaagaacuacaucgacaagcagcugcugcccauccugaacaagcagagcugcagcauccccaacaucgagaccgugaucgaguuccagcagaagaacaacagacugcuggagaucaccagagaguucagcgugaacgccggcgugaccacccccgugagcaccuacaugcugaccaacagcgagcugcugagccugaucaacgacaugcccaucaccaacgaccagaagaagcugaugagcaacaacgugcagaucgugagacagcagagcuacagcaucaugugcaucaucaaggaggaggugcuggccuacguggugcagcugccccuguacggcgugaucgacacccccugcuggaagcugcacaccagcccccugugcaccaccaacaccaaggagggcagcaacaucugccugaccagaaccgacagaggcugguacugcgacaacgccggcagcgugagcuucuucccccaggccgagaccugcaaggugcagagcaacagaguguucugcgacaccaugaacagccugacccugcccagcgaggugaaccugugcaacguggacaucuucaaccccaaguacgacugcaagaucaugaccagcaagaccgacgugagcagcagcgugaucaccagccugggcgccaucgugagcugcuacggcaagaccaagugcaccgccagcaacaagugcagaggcaucaucaagaccuucagcaacggcugcgacuacgugagcaacaagggcguggacaccgugagcgugggcaacacccuguacuacgugaacaagcaggagggccagagccuguacgugaagggcgagcccaucaucaacuucuacgacccccugguguuccccagcgacgaguucgacgccagcaucagccaggugaacgagaagaucaaccagagccuggccuucaucagaaagagcgacgagcugcugcacaacgugaacgccggcaagagcaccaccaacaucaugaucaccaccaucaucaucgugaucaucgugauccugcugagccugaucgccgugggccugcugcuguacugcaaggccagaugaggacuaguuauaagacugacuagcccgaugggccucccaacgggcccuccuccccuccuugcaccgagauuaauaaaaaaaaaaaaaaaaaaaaaaaaaaaaaaaaaaaaaaaaaaaaaaaaaaaaaaaaaaaaaaaaugcaucccccccccccccccccccccccccccccccaaaggcucuuuucagagccaccagaauu

SEQ ID NO: 8275 - RNA, 1765 nt, Artificial Sequence
  mRNA product Design i-3 comprising derived and/or modified sequence from HRSV(A2)__F-del_DSCav1_mut8 (opt5)
gggagaaagcuuaccauggagcugcucauccugaaggccaacgcuauuaccacaauccuuacggccgugaccuucugcuuugcgagcggccagaauauuacagaagaguucuaccaauccaccuguucugcugucagcaaaggguaucugggagcccucagaacaggcugguacaccuccguuaucacaauugaacugucuaacaucaaggagaucaaaugcaaugggaccgacgccaaggugaaacuuauuaagcaggaacuggauaaguauaaaaacgcugugacggaccuccagcugcugaugcagagcacccccgccacaggauccggcucugcuaucgccagcggggucgcgguguguaagguucuccaccuggagggagaggugaauaaaauuaaguccgcccuucugagcaccaacaaagcugucgugucucucuccggcugcggcguuagcgugcugacauuuaagguccuugaucugaagaauuacaucgacaaacaacuccugccuauucugaacaagcagucuuguuccaucccgaauauugaaaccgugaucgaguuccagcagaaaaacaaucggcuccuggaaaucacgcgcgaguuuagcgugaacgccggggucacaacccccguuucuacauauaugcuuaccaauuccgagcugcucagccugauuaacgauaugccuaucaccaaugaccaaaagaaacuuauguccaacaacgugcagauugugagacagcagucuuacagcaucaugugcauuaucaaggaagagguccuggcuuaugugguucaacucccccuguacggagugaucgauacaccuuguuggaaacugcauacgagcccccucugcaccacaaauaccaaggaaggcagcaacauuugucugacacggaccgaccgcgggugguacugcgauaaugccggaucugucuccuucuuuccucaggcggagacguguaaggugcagagcaacagaguuuucugcgacacaaugaacucucuuacccugccgagcgaagugaaucucugcaaugucgauaucuuuaaccccaaauaugacuguaagauuaugaccuccaaaacagaugugucuagcuccgucaucaccagccugggcgccauugugucuugcuacgggaagacaaaauguacggcuuccaauaagugccggggaaucaucaagaccuucagcaacggcugugacuauguuucuaauaaaggcguggacacagucuccguggggaacacccuuuacuauguuaauaagcaagagggacagagccuguacgugaaaggcgagccuauuaucaacuuuuaugauccccucgucuucccuuccgacgaauuugaugccucuauuagccaggugaaugagaagaucaaccagucccuggcuuucauucgcaaaucugacgaacugcuccacaacgugaaugccgggaaguccacaaccaacaucaugauuacgaccaucaucauuguuaucauugucauccugcuuucccugauugccgugggacuccugcuguacugcaaggcuagaugaggacuaguuauaagacugacuagcccgaugggccucccaacgggcccuccuccccuccuugcaccgagauuaauaaaaaaaaaaaaaaaaaaaaaaaaaaaaaaaaaaaaaaaaaaaaaaaaaaaaaaaaaaaaaaaaugcaucccccccccccccccccccccccccccccccaaaggcucuuuucagagccaccagaauu

SEQ ID NO: 8276 - RNA, 1765 nt, Artificial Sequence
  mRNA product Design i-3 comprising derived and/or modified sequence from HRSV(A2)__F-del_DSCav1_mut8 (opt6)
gggagaaagcuuaccauggaacuacucauauugaaagccaacgcaaucacaacaauacuaaccgccguaacauuuugcuucgcgucaggccaaaauauaacagaagaauuuuaccaaucaacaugcuccgccguaucaaaaggauaccuaggugcauuacgaaccgguugguacacaucaguaaucacaauagaacuuuccaacauuaaagaaauaaaaugcaauggcacagacgcaaaagucaaacuaauaaaacaagaacuagacaaauauaaaaacgccgucacagacuuacaacuauuaaugcaaagcacaccagcaacaggauccggaucagcaauagcaucaggaguagccgucuguaaaguacuacaccuagaaggcgaaguuaauaaaauuaaaucagcuuuauuaucaaccaacaaagcaguaguaucacuauccggaugcggagucuccguccuaacauucaaaguacuagaccucaagaauuacauagauaaacaacuacuaccaauacucaacaaacaaucauguucaauaccaaacaucgaaaccgucauagaauuucaacaaaaaaauaauagacucuuagaaauaacacgagaauuuagcguaaacgcaggagucacaaccccugucucaacauacaugcuaaccaauuccgaauuauuaucacucauaaaugacaugccaauaacuaaugaccaaaaaaaacuuaugucaaacaacguacaaauaguaagacaacaaucauauucaauaaugugcauaaucaaagaagaaguuuuagcauauguaguacaacuaccacuauauggcgucauagacacaccaugcuggaaauuacacacaucaccucuaugcacaacaaacacaaaagaaggaagcaacauuugccuaaccagaaccgauagaggaugguacugcgauaacgcaggcucaguaucauucuucccucaagccgaaacuugcaaaguccaaucaaauagagucuucugcgauacaaugaacuccuuaacuuuaccaucagaaguaaaucuaugcaacguagauaucuuuaauccaaaauacgauugcaaaaucaugacaucaaaaacagauguaucaucuaguguaauuaccucccuaggagcaauaguaagcugcuacggaaaaacaaaaugcaccgccucuaacaaaugucguggaauaauaaaaacauucucaaacggaugcgauuauguaucaaauaaaggugucgacaccguaucaguaggcaauacacuauacuauguaaauaaacaagaaggacaaucacucuacgucaaaggugaaccaauaauaaacuucuacgacccacuuguauucccaagcgacgaauuugacgcaucaauaagccaaguaaacgaaaaaauaaaccaaucacuagcauucaucagaaaaucagacgaacuacuccacaauguaaaugcaggaaaaucaacaaccaauaucaugauaacaaccauaauaauagucauaauaguaauacuauuaucccucauagccguuggacuacuccuauauuguaaagcacgauaaggacuaguuauaagacugacuagcccgaugggccucccaacgggcccuccuccccuccuugcaccgagauuaauaaaaaaaaaaaaaaaaaaaaaaaaaaaaaaaaaaaaaaaaaaaaaaaaaaaaaaaaaaaaaaaaugcaucccccccccccccccccccccccccccccccaaaggcucuuuucagagccaccagaauu

SEQ ID NO: 8277 - RNA, 1765 nt, Artificial Sequence
  mRNA product Design i-3 comprising derived and/or modified sequence from HRSV(A2)__F-del_DSCav1_mut8 (opt11)
gggagaaagcuuaccauggaacuccucauccucaaagccaacgccaucaccaccauacucaccgcaguaaccuucugcuucgcauccggccaaaacaucacagaagaguucuaccagaguaccugcuccgccgucuccaaaggcuaccuuggcgcccuccguaccgggugguacacauccgucaucacaaucgaacucuccaacaucaaagaaauaaagugcaacggcacagacgccaaaguaaaacugauaaagcaagaacucgacaaauacaaaaacgccguaaccgaccuccagcuacuaaugcaauccacucccgccaccggcagcggauccgccaucgccuccggaguagccgucuguaaagucuuacaccucgaaggcgaagugaacaaaaucaaauccgcccuacucucaaccaacaaagccguaguaucacucuccgggugcggcguuucagugcuaacguucaaaguccuugaccucaaaaacuacaucgacaaacaacuccuccccauccuaaauaaacaauccugcuccauacccaacaucgagacugucaucgaguuccagcagaaaaacaaccgacuccucgaaaucacacgcgaguucucugucaacgccggcgucacaacccccgucuccacauacaugcucaccaacagcgaacuccucucccuaaucaaugacaugcccaucaccaacgaccaaaagaaacucaugucaaacaacguccaaaucguccgccaacaauccuacagcaucaugugcaucaucaaagaagaaguucucgcauacguaguacaacucccccucuacggagugaucgacacccccugcuggaaacuacacaccagcccgcuuugcaccacaaacaccaaggaaggcuccaacaucugccucacucgaaccgaccgcggcugguacugcgacaacgcaggcuccgucaguuucuuuccccaagcagaaacaugcaaaguccaauccaaccgaguauucugcgacaccaugaacucccucacccuaccauccgaaguuaaccuaugcaacguggacaucuucaaccccaaguacgacugcaaaauuaugaccuccaaaaccgacguauccuccagcgucaucaccagccucggagcaauagucuccugcuacggcaagaccaagugcaccgcuuccaacaagugucgcggaaucaucaaaaccuucucaaacggcugcgacuacgucuccaacaaaggcgucgacaccguauccguaggaaacacccuauacuacgucaacaaacaagaaggacaaucccucuaugucaaaggcgaacccaucaucaauuucuacgacccccuagucuucccuuccgacgaguucgacgcguccaucagccaagucaaugaaaagaucaaccagagccuggcauucauccgcaaauccgacgaacuccuccacaacgucaacgcgggaaaauccacgacaaacaucaugaucaccaccaucaucaucgucaucauagucauucuccuuucucucaucgccgugggacuacuucucuacugcaaagcccgauaaggacuaguuauaagacugacuagcccgaugggccucccaacgggcccuccuccccuccuugcaccgagauuaauaaaaaaaaaaaaaaaaaaaaaaaaaaaaaaaaaaaaaaaaaaaaaaaaaaaaaaaaaaaaaaaaugcaucccccccccccccccccccccccccccccccaaaggcucuuuucagagccaccagaauu

SEQ ID NO: 8278 - RNA, 2068 nt, Artificial Sequence
  mRNA product Design i-4 comprising derived and/or modified sequence from HRSV(A2)__F-del_DSCav1 (opt1) R4745/R5717
gggagagucccgcagucggcguccagcggcucugcuuguucgugugugugucguugcaggccuuauucaagcuuaccauggagcugcucauccugaaggccaacgccaucaccaccauccugacggcggugaccuucugcuucgccagcggccagaacaucaccgaggaguucuaccaguccacgugcagcgccgucuccaagggguaccucagcgcccugcggaccggcugguacaccuccgugaucaccaucgagcugagcaacaucaaggagaacaagugcaacgggaccgacgccaaggugaagcucaucaagcaggagcuggacaaguacaagaacgcggucacggagcugcagcuccugaugcaguccaccccggcaaccaacaaccgcgcccggcgcgagcugccccgguucaugaacuacacccucaacaacgccaagaagacgaacgugacccugagcaagaagcgcaagcggcgcuuccugggcuuccuccugggggugggcuccgccaucgcgagcggcgucgccgugugcaaggugcugcaccucgagggggaggucaacaagaucaagagcgcccugcuguccaccaacaaggccguggugagccucuccaacggcgucagcgugcugaccuucaaggugcuggaccucaagaacuacaucgacaagcagcugcugcccauccugaacaagcagagcugcuccaucagcaacaucgagacggugaucgaguuccagcagaagaacaaccggcuccuggagaucacccgcgaguucagcgugaacgccggggucaccacccccguguccacguacaugcugaccaacagcgagcuccugucccugaucaacgacaugccgaucaccaacgaccagaagaagcucaugagcaacaacgugcagaucguccggcagcaguccuacagcaucaugugcaucaucaaggaggaggugcuggcguacgugguccagcugccccucuacggcgugaucgacacccccugcuggaagcugcacacgagcccccugugcaccaccaacaccaaggagggguccaacaucugccucacgcgcaccgaccggggcugguacugcgacaacgccggcagcgucuccuucuucccgcaggccgagaccugcaaggugcagagcaaccgcguguucugcgacaccaugaacucccugacgcugcccagcgagguaaaccucugcaacgucgacaucuucaaccccaaguacgacugcaagaucaugaccuccaagaccgacgugagcuccagcgugaucaccucccugggggccaucgucagcugcuacggcaagacgaagugcaccgccagcaacaagaaccgggggaucaucaagaccuucuccaacggcugcgacuacgugagcaacaagggcguggacaccguguccgucgggaacacccuguacuacgugaacaagcaggagggcaagagccucuacgugaagggggagcccaucaucaacuucuacgacccgcuggucuuccccuccgacgaguucgacgcgagcaucucccaggugaacgagaagaucaaccagagccuggccuucauccgcaaguccgacgagcugcuccacaacgugaacgccggcaagagcacgaccaacaucaugaucaccaccaucaucaucgucaucaucgugauccugcugucccucaucgccguggggcugcugcucuacugcaaggcccggugaggacuagugcaucacauuuaaaagcaucucagccuaccaugagaauaagagaaagaaaaugaagaucaauagcuuauucaucucuuuuucuuuuucguugguguaaagccaacacccugucuaaaaaacauaaauuucuuuaaucauuuugccucuuuucucugugcuucaauuaauaaaaaauggaaagaaccuagaucuaaaaaaaaaaaaaaaaaaaaaaaaaaaaaaaaaaaaaaaaaaaaaaaaaaaaaaaaaaaaaaaaugcaucccccccccccccccccccccccccccccccaaaggcucuuuucagagccaccagaauu

SEQ ID NO: 8279 - protein, 589 aa, Artificial Sequence
  derived and/or modified protein sequence (wt) from HRSV__AJF44801.1__F0
MIPQARTKLNLGQITMELLIHRSSAIFLTLAINALYLTSSQNITEEFYQSTCSAVSRGYLSALRTGWYTSVITIELSNIKETKCNGTDTKVKLIKQELDKYKNAVTELQLLMQNTPAANNRARREAPQYMNYTINTTGSLNVSISKKRKRRFLGFLLGVGSAIASGIAVSKVLHLEGEVNKIKNALLSTNKAVVSLSNGVSVLTSKVLDLKNYINNQLLPIVNQQSCRISNIETVIEFQQKNSRLLEITREFSVNAGVTTPLSTYMLTNSELLSLINDMPITNDQKKLMSSNVQIVRQQSYSIMSIIKEEVLAYVVQLPIYGVIDTPCWKLHTSPLCTTNIKEGSNICLTRTDRGWYCDNAGSVSFFPQADTCKVQSNRVFCDTMNSLTLPSEVSLCNTDIFNSKYDCKIMTSKTDISSSVITSLGAIVSCYGKTKCTASNKNRGIIKTFSNGCDYVSNKGVDTVSVGNTLYYVNKLEGKNLYVKGEPIINYYDPLVFPSDEFDASISQVNEKINQSLAFIRRSDELLHNVNTGKSTTNIMITAIIIVIIVVLLSLIAIGLLLYCKAKNTPVTLSKDQLSGINNIAFSK

SEQ ID NO: 8280 - protein, 589 aa, Artificial Sequence
  derived and/or modified protein sequence (wt) from HRSV__AJF44759.1__F0
MIPQARTKLNLGQITMELLIHRSSAIFLTLAINALYLTSSQNITEEFYQSTCSAVSRGYLSALRTGWYTSVITIELSNIKETKCNGTDTKVKLIKQELDKYKNAVTELQLLMQNTPAANNRARREAPQYMNYTINTTRSLNVSISKKRKRRFLGFLLGVGSAIASGIAVSKVLHLEGEVNKIKNALLSTNKAVVSLSNGVSVLTSKVLDLKNYINNQLLPIVNQQSCRISNIETVIEFQQKNSRLLEITREFSVNAGVTTPLSTYMLTNSELLSLINDMPITNDQKKLMSSNVQIVRQQSYSIMSIIKEEVLAYVVQLPIYGVIDTPCWKLHTSPLCTTNIKEGSNICLTRTDRGWYCDNAGSVSFFPQADTCKVQSNRVFCDTMNSLTLPSEVSLCNTDIFNSKYDCKIMTSKTDISSSVITSLGAIVSCYGKTKCTASNKNRGIIKTFSNGCDYVSNKGVDTVSVGNTLYYVNKLEGKNLYVKGEPIINYYDPLVFPSDEFDASISQVNEKINQSLAFIRRSDELLHNVNTGKSTTNIMITAIIIVIIVVLLSLIAIGLLLYCKAKNTPVTLSKDQLSGINNIAFSK

SEQ ID NO: 8281 - protein, 589 aa, Artificial Sequence
  derived and/or modified protein sequence (wt) from HRSV__AJF44661.1__F0
MIPQARTELNLGQITMELLIHRSSAIFLTLAINALYLTSSQNITEEFYQSTCSAVSRGYLSALRTGWYTSVITIELSNIKETKCNGTDTKVKLIKQELDKYKNAVTELQLLMQNTPAANNRARREAPQYMNYTINTTGSLNVSISKKRKRRFLGFLLGVGSAIASGIAVSKVLHLEGEVNKIKNALLSTNKAVVSLSNGVSVLTSKVLDLKNYINNQLLPIVNQQSCRISNIETVIEFQQKNSRLLEITREFSVNAGVTTPLSTYMLTNSELLSLINDMPITNDQKKLMSSNVQIVRQQSYSIMSIIKEEVLAYVVQLPIYGVIDTPCWELHTSPLCTTNIKEGSNICLTRTDRGWYCDNAGSVSFFPQADTCKVQSNRVFCDTMNSLTLPSEVSLCNTDIFNSKYDCKIMTSKTDISSSVITSLGAIVSCYGKTKCTASNKNRGIIKTFSNGCDYVSNKGVDTVSVGNTLYYVNKLEGKNLYVKGEPIINYYDPLVFPSDEFDASISQVNEKINQSLAFIRRSDELLHNVNTGKSTTNIMITAIIIVIIVVLLSLIAIGLLLYCKAKNTPVTLSKDQLSGINNIAFSK

SEQ ID NO: 8282 - protein, 589 aa, Artificial Sequence
  derived and/or modified protein sequence (wt) from HRSV__AJF44602.1__F0
MIPQARTELNLGQITMELLIHRSSAIFLTLAINALYLTSSQNITEEFYQSTCSAVSRGYLSALRTGWYTSVITIELSNIKETKCNGTDTKVKLIKQELDKYKNAVTELQLLMQNTPAANNRARREAPQYMNYTINTTGSLNVSISKKRKRRFLGFLLGVGSAIASGIAVSKVLHLEGEVNKIKNALLSTNKAVVSLSNGVSVLTSKVLDLKNYINNQLLPIVNQQSCRISNIETVIEFQQKNSRLLEITREFSVNAGVTTPLSTYMLTNSELLSLINDMPITNDQKKLMSSNVQIVRQQSYSIMSIIKEEVLAYVVQLPIYGVIDTPCWKLHTSPLCTTNIKEGSNICLTRTDRGWYCDNAGSVSFFPQADTCKVQSNRVFCDTMNSLTLPSEVSLCNTDIFNSKYDCKIMTSKTDISSSVITSLGAIVSCYGKTKCTASNKNRGIIKTFSNGCDYVSNKGVDTVSVGNTLYYVNKLEGKNLYVKGEPIINYYDPLVFPSDEFDASISQVNEKINQSLAFIRRSDELLHNVNTGKSTTNIMITAIIIVIIVVLLSLIAIGLLLYCKAKNTPVTLSKDQLSGINNIAFSK

SEQ ID NO: 8283 - protein, 575 aa, Artificial Sequence
  derived and/or modified protein sequence (wt) from HRSV__2207424A__F0
MELPILKTNAITTILAAVTLCFASSQNITEEFYQSTCSAVSKGYLSALRTGWYTSVITIELSNIKENKCNGTDAKVKLIKQELDKYKNAVTELQLLMQSTPAANSRARRELPRFMNYTLNNTKNTNVTLSKKRKRRFLGFLLGVGSAIASGIAVSKVLHLEGEVNKIKSALLSTNKAVVSLSNGVSVLTSKVLDLKNYIDKQLLPIVNKQSCSISNIETVIEFQQKNNRLLEITREFSVNAGVTTPVSTYMLTNSELLSLINDMPITNDQKKLMSNNVQIVRQQSYSIMSIIKEEVLAYVVQLPLYGVIDTPCWKLHTSPLCTTNTKEGSNICLTSTDRGWYCDNAGSVSFFPQAETCKVQSNRVFCDTMNSLTLPSEVNLCNVDIFNPKYDCKIMTSKTDVSSSVITSLGAIVSCYGKTKCTASNKNRGIIKTFSNGCDYVSNKGVDTVSVGNTLYYVNKQEGKSLYVKGEPIINFYDPLVFPSDEFDASISQVNEKINQSLAFIRKSDELLHNVNAGKSTTNIMITTIIIVIIVILLLLIAVGLFLYCKARSTPVTLSKDQLSGIINNIAFSN

SEQ ID NO: 8284 - protein, 575 aa, Artificial Sequence
  derived and/or modified protein sequence (wt) from HRSV__AAB38520.1__F0
MELPILKTNAITTILAAVTLCFASSQNITEEFYQSTCSAVSKGYLSALRTGWYTSVITIELSNIKENKCNGTDAKVKLIKQELDKYKNAVTELQLLMQSTSAANNRARRELPRFMNYTLNNTKNTNVTLSKKRKRRFLGFLLGVGSAIASGIAVSKVLHLEGEVNKIKSALLSTNKAVVSLSNGVSVLTSKVLDLKNYIDKQLLPIVNKQSCSISNIETVIEFQQKNNRLLEITREFSVNAGVTTPVSTYMLTNSELLSLINDMPITNDQKKLMSNNVQIVRQQSYSIMSIIKEEVLAYVVQLPLYGVIDTPCWKLHTSPLCTTNTKEGSNICLTRTDRGWYCDNAGSVSFFPQAETCKVQSNRVLCDTMNSLTLPSEVNLCNIDIFNPKYDCKIMTSKTDVSSSVITSLGAIVSCYGKTKCTASNKNRGIIKTFSNGCDYVSNKGVDTVSVGNTLYYVNKQEGKSLYVKGEPIINFYDPLVFPSDEFDASISQVNEKINQSLAFIRKSDELLHNVNAGKSTTNIMITTIIIVIIVILLLLIAVGLLLYCKARSTPVTLSKDQLSGIINNIAFSN

SEQ ID NO: 8285 - protein, 575 aa, Artificial Sequence
  derived and/or modified protein sequence (wt) from HRSV__AAB38517.1__F0
MELPILKTNAITAILAAVTLCFASGQNITEEFYQSTCSAVSKGYLSALRTGWYTSVITIELSNIKENKCNGTDAKVKLIKQELDKYKSAVTELQLLTQSTPATNNRARRELPRFMNYTLNNTKNTNVTLSKKRKRRFLGFLLGVGSAIASGIAVSKVLHLEGEVNKIKSALLSTNKAVVSLSNGVSVLTSKVLDLKNYIDKQLLPIVNKQSCSISNIETVIEFQQKNNRLLEITREFSVNAGVTTPVSTYMLTNSELLSLINDMPITNDQKKLMSNNVQIVRQQSYSIMSIIKEEVLAYVVQLPLYGVIDTPCWKLHTSPLCTTNTKEGSNICLTSTDRGWYCDNAGSVSFFPLAETCKVQSNRVFCDTMNSLTLPSEVNLCNIDIFNPKYDCKIMTSKTDVSSSVITSLGAIVSCYGKTKCTASNKNRGIIKTFSNGCDYVSNKGVDTVSVGNTLYYVNKQEGKSLYVKGEPIINFYDPLVFPSDEFDASISQVNEKINQSLAFIRKSDELLHNVNAGKSTTNIMITTIIIVIIVILLSLIAVGLLLYCKARSTPVTLSKDQLSGIINNIAFSN

SEQ ID NO: 8286 - protein, 575 aa, Artificial Sequence
  derived and/or modified protein sequence (wt) from HRSV__AAB38519.1__F0
MELPILKTNAITTILAAVTLCFASSQNITEEFYQSTCSVVSKGYLSALRIGWYTSVITIELSNIKENKCNGTDAKVKLIKQELDKYKNAVTELQLLMQSTPAANNRARRELPRFMNYTLNNTKNTNVTLSKKRKRRFLGFLLGVGSAIASGIAVSKVLHLEGEVNKIKSALLSTNKAVVSLSNGVSVLTSKVLDLKTYIDKQLLPIVNKQSCSISNIETVIEFQQKNNRLLEITREFSVNAGVTTPVSTYMLTNSELLSLINDMPITNDQKKLMSNNVQIVRQQSYSIMSIIKEEVLAYVVQLPLYGVIDTPCWKLHTSPLCTTNTKEGSNICLTRTDRGWYCDNAGSVSFFPQAETCKVQSNRVLCDTMNSLTLPSEVNLCNIDIFNPKYDCKIMTSKTDVSSSVITSLGAIVSCYGKTKCTASNKNRGIIKTFSNGCDYVSNKGVDTVSVGNTLYYVNKQEGKSLYVKGEPIINFYDPLVFPSDEFDASISQVNEKINQSLAFIRKSDELLHNVNAGKSTTNIMITTIIIVIIVILLLLIAVGLLLYCKARSTPVTLSKDQLSGIINNIAFSN

SEQ ID NO: 8287 - protein, 575 aa, Artificial Sequence
  derived and/or modified protein sequence (wt) from HRSV__AAB38518.1__F0
MELPIIKANAITTILIAVTFCFASSQNITEEFYQSTCSAVSKGYLSALRTGWYTSVITIELSNIKENKCNGTDAKVKLIKQELDKYKNAVTELQLLMQSTPAANSRARRELPRFMNYTLNNAKKTNVTLSKKRKRRFLGFLLGVGSATASGIAVSKVLHLEGEVNKIKSALLTTNKAVVSLSNGVSVLTSKVLDLKNYIDKQLLPIVNKQSCSISNIETVIEFQQKNNRLLEITREFSVNAGVTTPVSTYMLTNSELLSLINDMPITNDQKKLMSNNVQIVRQQSYSIMSIIKEEVLAYVVQLPLYGVIDTPCWKLHTSPLCTTNTKEGSNICLTSTDRGWYCDNAGSVSFFPQADTCKVQSNRVFWDTMNSLTLPSEVNLCNIDIFNPKYDCKIMTSKTDVSSSVITSLGAIVSCYGKTKCTASNKNRGIIKTFSNGCDYVSNKGVDTVSVGNTLYYVNKQEGKSLYVKGEPIINFYDPLVFPSDEFDASISQVNEKINQSLAFIRKSDELLHNVNAGKSTTNIMITTIIIVIIVILLSLIAVGLLLYCKARSTPVTLSKDQLSGIINNIAFSN

SEQ ID NO: 8288 - protein, 574 aa, Artificial Sequence
  derived and/or modified protein sequence (wt) from HRSV__AVQ93587.1__F0
MELLIHRSSAIFLTLAINALYLTSSQNITEEFYQSTCSAVSRGYLSALRTGWYTSVITIELSNIKETKCNGTDTKVKLIKQELDKYKNAVTELQLLMQNTPAVNNRARREAPQYMNYTINTTKNLNVSISKKRKRRFLGFLLGVGSAIASGIAVSKVLHLEGEVNKIKNALQLTNKAVVSLSNGVSVLTSKVLDLKNYINNQLLPIVNQQSCRISNIETVIEFQQKNSRLLEITREFSVNAGVTTPLSTYMLTNSELLSLINDMPITNDQKKLMSSNVQIVRQQSYSIMSIIKEEVLAYVVQLPIYGVIDTPCWKLHTSPLCTTNIKEGSNICLTRTDRGWYCDNAGSVSFFPQADTCKVQSNRVFCDTMNSLTLPSEVSLCNTDIFNSKYDCKIMTSKTDISSSVITSLGAIVSCYGKTKCTASNKNRGIIKTFSNGCDYVSNKGVDTVSVGNTLYYVNKLEGKNLYVKGEPIINYYDPLVFPSDEFDASISQVNEKINQSLAFIRRSDELLHNVNTGKSTTNIMITAIIIVIIVVLVSLIAIGLLLYCKAKNTPVTLSKDQLSGINNIAFSK

SEQ ID NO: 8289 - protein, 574 aa, Artificial Sequence
  derived and/or modified protein sequence (wt) from HRSV__AVQ93599.1__F0
MELLIHRSSAIFLTLVINALYLTSSQNITEEFYQSTCSAVSRGYLSALRTGWYTSVITIELSNIKETKCNGTDTKVKLIKQELDKYKNAVTELQLLMQNTPAVNNRARREAPQYMNYTINTTKNLTVSISKKRKRRFLGFLLGVGSAIASGIAVSKVLHLEGEVNKIKNALQSTNKAVVSLSNGVSVLTSKVLDLKNYINSQLLPIVNKQSCRISNIETVIEFQQKNSRLLEITREFSVNAGVTTPLSTYMLTNSELLSLINDMPITNDQKKLMSSNVQIVRQQSYSIMSIIKEEVLAYVVQLPIYGVIDTPCWKLHTSPLCTTNIKEGSNICLTRTDRGWYCDNAGSVSFFPQADTCKVQSNRVFCDTMNSLTLPSEVSLCNTDIFNSKYDCKIMTSKTDISSSVITSLGAIVSCYGKTKCTASNKNRGIIKTFSNGCDYVSNKGVDTVSVGNTLYYVNKLEGKNLYVKGEPIINYYDPLVFPSDEFDASISQVNEKINQSLAFIRRSDELLHNVNTGKSTTNIMITAIIIVIIVVLLSLIAIGLLLYCKAKNTPVTLSKDQLSGINNIAFSK

SEQ ID NO: 8290 - protein, 574 aa, Artificial Sequence
  derived and/or modified protein sequence (wt) from HRSV__AVQ93571.1__F0
MELLIHRSSAIFLTLAINALYLTSSQNITEEFYQSTCSAVSRGYLSALRTGWYTSVITIELSNIKETKCNGTDTKVKLIKQELDKYKNAVTELQLLMQNTPAVNNRARREAPQYMNYTINTTKNLNVSISKKRKRRFLGFLLGVGSAIASGIAVSKVLHLEGEVNKIKNALQLTNKAVVSLSNGVSVLTSKVLDLKNYINNQLLPIVNQQSCRISNIETVIEFQQKNSRLLEITREFSVNAGVTTPLSTYMLTNSELLSLINDMPITNDQKKFMSSNVQIVRQQSYSIMSIIKEEVLAYVVQLPIYGVIDTPCWKLHTSPLCTTNIKEGSNICLTRTDRGWYCDNAGSVSFFPQADTCKVQSNRVFCDTMNSLTLPSEVSLCNTDIFNSKYDCKIMTSKTDISSSVITSLGAIVSCYGKTKCTASNKNRGIIKTFSNGCDYVSNKGVDTVSVGNTLYYVNKLEGKNFYVKGEPIINYYDPLVFPSDEFDASISQVNEKINQSLAFIRRSDELLHNVNTGKSTTNIMITAIIIVIIVVLLSLIAIGLLLYCKAKNTPVTLSKDQLSGINNIAFSK

SEQ ID NO: 8291 - protein, 574 aa, Artificial Sequence
  derived and/or modified protein sequence (wt) from HRSV__AVQ93568.1__F0
MELLIHRSSAIFLTLAINALYLTSSQNITEEFYQSTCSAVSRGYLSALRTGWYTSVITIELSNIKETKCNGTDTKVKLIKQELDKYKNAVTELQLLMQNTPAVNNRARREAPQYMNYTINTTKNLNVSISKKRKRRFLGFLLGVGSAIASGIAVSKVLHLEGEVNKIKNALQLTNKAVVSLSNGVSVLTSKVLDLKNYINNQLLPIVNQQSCRISNIETVIEFQQKNSRLLEITREFSVNAGVTTPLSTYMLTNSELLSLINDMPITNDQKKLMSSNVQIVRQQSYSIMSIIKEEVLAYVVQLPIYGVIDTPCWKLHTSPLCTTNIKEGSNICLTRTDRGWYCDNAGSVSFFPQADTCKVQSNRVFCDTMNSLTLPSEVSLCNTDIFNSKYDCKIMTSKTDISSSVITSLGAIVSCYGKTKCTASNKNRGIIKTFSNGCDYVSNKGVDTVSVGNTLYYVNKLEGKNLYVKGEPIINYYDPLVFPSDEFDASISQVNEKINQSLAFIRRSDELLHNVNTGKSTTNIMTTAIIIVIIVVLLSLIAIGLLLYCKAKNTPVTLSKDQLSGINNIAFSK

SEQ ID NO: 8292 - protein, 574 aa, Artificial Sequence
  derived and/or modified protein sequence (wt) from HRSV__AVQ93589.1__F0
MELLIHRSSAIFLTLAINALYLTSSQNITEEFYQSTCSAVSRGYLSALRTGWYTSVITIELSNIKETKCNGTDTKVKLIKQELDKYKNAVTELQLLMQNTPAVNNRARREAPQYMNYTINTTKNLNVSISKKRKRRFLGFLLGVGSAIASGIAVSKVLHLEGEVNKIKNALQLTNKAVVSLSNGVSVLTSKVLDLKNYINNQLLPIVNQQSCRISNIETVIEFQQKNSRLLEITREFSVNAGVTTPLSTYMLTNSELLSLINDMPITNDQKKLVSSNVQIVRQQSYSIMSIIKEEVLAYVVQLPIYGVIDTPCWKLHTSPLCTTNIKEGSNICLTRTDRGWYCDNAGSVSFFPQADTCKVQSNRVFCDTMNSLTLPSEVSLCNTDIFNSKYDCKIMTSKTDISSSVITSLGAIVSCYGKTKCTASNKNRGIIKTFSNGCDYVSNKGVDTVSVGNTLYYVNKLEGKNLYVKGEPIINYYDPLVFPSDEFDASISQVNEKINQSLAFIRRSDELLHNVNTGKSTTNIMITAIIIVIIVVLLSLIAIGLLLYCKAKNTPVTLSKDQLSGINNIAFSK

SEQ ID NO: 8293 - protein, 574 aa, Artificial Sequence
  derived and/or modified protein sequence (wt) from HRSV__AVQ93597.1__F0
MELLIHRSSAIFLTLAINALYLTSSQNITEEFYQSTCSAVSRGYLSALRTGWYTSVITIELSNIKETKCNGTDTKVKLIKQELDKYKNAVTELQLLMQNTPVVNNRARREAPQYMNYTINTTKNLNVSISKKRKRRFLGFLLGVGSAIASGIAVSKVLHLEGEVNKIKNALQLTNKAVVSLSNGVSVLTSKVLDLKNYINNQLLPIVNQQSCRISNIETVIEFQQKNSRLLEITREFSVNAGVTTPLSTYMLTNSELLSLINDMPITNDQKKLMSSNVQIVRQQSYSIMSIIKEEVLAYVVQLPIYGVIDTPCWKLHTSPLCTTNIKEGSNICLTRTDRGWYCDNAGSVSFFPQADTCKVQSNRVFCDTMNSLTLPSEVSLCNTDIFNSKYDCKIMTSKTDISSSVITSLGAIVSCYGKTKCTASNKNRGIIKTFSNGCDYVSNKGVDTVSVGNTLYYVNKLEGKNLYVKGEPIINYYDPLVFPSDEFDASISQVNEKINQSLAFIRRSDELLHNVNTGKSTTNIMITAIIIVIIVVLLSLIAIGLLLYCKAKNTPVTLSKDQLSGINNIAFSK

SEQ ID NO: 8294 - protein, 574 aa, Artificial Sequence
  derived and/or modified protein sequence (wt) from HRSV__AVQ93563.1__F0
MELLIHRSSAIFLTLAINALYLTSSQNITEEFYQSTCSAVSRGYLSALRTGWYTSVITIELSNIKETKCNGTDTKVKLIKQELDKYKNAVTELQLLMQNTPAVNNRARREAPQYMNYTINTTKNLNVSISKKRKRRFLGFLLGVGSAIASGIAVSKVLHLEGEVNKIKNALQLTNKAVVSLSNGVSVLTSKVLDLKNYINNQLLPIVNQQSCRISNIETVIEFQQKNSRLLEITREFSVNACVTTPLSTYMLTNSELLSLINDMPITNDQKKLMSSNVQIVRLQSYSIMSIIKEEVLAYVVQLPIYGVIDTPCWKLHTSPLCTTNIKEGSNICLTRTDRGWYCDNAGSVSFFPQADTCKVQSNRVFCDTMNSLTLPSEVSLCNTDIFNSKYDCKIMTSKTDISSSVITSLGAIVSCYGKTKCTASNKNRGIIKTFSNGCDYVSNKGVDTVSVGNTLYYVNKLEGKNLYVKGEPIINYYDPLVFPSDEFDASISQVNEKINQSLAFIRRSDELLHNVNTGKSTTNIMITAIIIVIIVVLLSLIAIGLLLYCKAKNTPVTLSKDQLSGINNIAFSK

SEQ ID NO: 8295 - protein, 574 aa, Artificial Sequence
  derived and/or modified protein sequence (wt) from HRSV__AVQ93594.1__F0
MELLIHRSSAIFLTLAINALYLTSSQNITEEFYQSTCSAVSRGYLSALRTGWYTSVITIELSNIKETKCNGTDTKVKLIKQELDKYKNAVTELQLLMQNTPAVNNRARREAPQYMNYTINTTKNLNVSISKKRKRRFLGFLLGVGSAIASGIAVSKVLHLEGEVNKIKNALQLTNKAVVSLSNGVSVLTSKVLDLKNYINNQLLPIVNQQSCRISNIETVIEFQQKNSRLLEITREFSVNAGVTTPLSTYMLTNSELLSLINDMPITNDQKKLMSSNVQIVRQQSYSIMSIIKEEVLAYVVQLPIYGVIDTPCWKLHTSPLCTTNIKEGSNICLTRTDRGWYCDNAGSVSFFPQADTCKVQSNRVFCDTMNSLTLPSEVSLCNTDIFNSKYDCKIMTSKTDISSSVITSLGAIVSCYGKTKCTASNKNRGIIKTFSNGCDYVSNKGVDTVSVGNTLYYVNKLEGKNLYVKGEPIINYYDPLVFPSDEFDASISQVNEKINQSLAFIRRSDELLHNVNTGKSTTNIMITAIIIVIIVVLLSLIAIGLLLYCKAKSTPVTLSKDQLSGINNIAFSK

SEQ ID NO: 8296 - protein, 574 aa, Artificial Sequence
  derived and/or modified protein sequence (wt) from HRSV__AVQ93601.1__F0
MELLIHRSSAIFLTLAINALYPTSSQNITEEFYQSTCSAVSRGYLSALRTGWYTSVITIELSNIKETNCNGTDTKVKLIKQELDKYKNAVTELQLLMQNTPAVNNRARREAPQYMNYTINTTKNLNVSISKKRKRRFLGFLLGVGSAIASGIAVSKVLHLEGEVNKIKNALQLTNKAVVSLSNGVSVLTSKVLDLKNYINNQLLPIVNQQSCRISNIETVIEFQQKNSRLLEITREFSVNAGVTTPLSTYMLTNSELLSLINDMPITNDQKKLMSSNVQIVRQQSYSIMSIIKEEVLAYVVQLPIYGVIDTPCWKLHTSPLCTTNIKEGSNICLTRTDRGWYCDNAGSVSFFPQADTCKVQSNRVFCDTMNSLTLPSEVSLCNTDIFNSKYDCKIMTSKTDISSSVITSLGAIVSCYGKTKCTASNKNRGIIKTFSNGCDYVSNKGVDTVSVGNTLYYVNKLEGKNLYVKGEPIINYYDPLVFPSDEFDASISQVNEKINQSLAFIRRSDELLHNVNTGKSTTNIMITAIIIVIIVVLLSLIAIGLLLYCKAKNTPVTLSKDQLSGINNIAFSK

SEQ ID NO: 8297 - protein, 574 aa, Artificial Sequence
  derived and/or modified protein sequence (wt) from HRSV__AVQ93562.1__F0
MELLIHRSSAIFLTFAINALYFTSSQNITEEFYQSTCSAVSRGYLSALRTGWYTSVITIELSNIKETKCNGTDTKVKLIKQELDKYKNAVTELQLLMQNTPAVNNRARREAPQYMDYTINTSKNLNVSISKKRKRRFLGFLLGVGSAIASGIAVSKVLHLEGEVNKIKNALQLTNKAVVSLSNGVSVLTSKVLDLKNYINNQLLPIVNQQSCRISNIETVIEFQQKNSRLLEITREFSVNAGVTTPLSTYMLTNSELLSLINDMPITNDQKKLMSSNVQIVRQQSYSIMSIIKEGVLAYVVQLPIYGVIDTPCWKLHTSPLCTTNIKEGSNICLTRTDRGWYCDNAGSVSFFPQADTCKVQSNRVFCDTMNSLTLPSEVSLCNTDIFNSKYDCKIMTSKTDISSSVITSLGAIVSCYGKTKCTASNKNRGIIKTFSNGCDYVSNKGVDTVSVGNTLYYVNKLEGKNLYVKGEPIINYYDPLVFPSDEFDASISQVNEKINQSLAFIRRSDELLHNVNTGKSTTNIMITAIIIVIIVVLLSLIAIGLMLYCKAKNTPVTLSKDQLSGINNIAFSK

SEQ ID NO: 8298 - protein, 574 aa, Artificial Sequence
  derived and/or modified protein sequence (wt) from HRSV__AVQ93561.1__F0
MELLIHRSSAIFLTLAINALYLTSSQNITEEFYQSTCSAVSRGYLSALRTGWYTSVITIELSNIKETKCNGTDTKVKLIKQELDKYKNAVTELQLLMQNTPAVNNRARREAPQYMNYTINTTKNLNVSISKKRKRRFLGFLLGVGSAIASGIAVSKVLHLEGEVNKIKNALQLTNKAVVSLSNGVSVLTSKVLDLKNYINNQLLPIVNQQSCRISNIETVIEFQQKNSRLLEITREFSVNAGVTTPLSTYMLTNSELLSLINDMPITNDQKKLMSSNVQIVRQQGYSIMSIIKEEVLAYVVQLPIYGVIDTPCWKLHTSPLCTTNIKEGSNICLTRTDRGWYCDNAGSVSFFPQADTCKVQSNRVFCDTMNSLTLPSEVSLCNTDIFNSKYDCKIMTSKTDISSSVITSLGAIVSCYGKTKCTASNKNRGIIKTFSNGCDYVSNKGVDTVSVGNTLYYVNKLEGKNLYVKGEPIINYYDPLVFPSDEFDASISQVNEKINQSLAFIRRSDELLHNVNTGKSTTNIMITAIIIVIIVVLLSLIAIGLLLYCKAKNTPVTLSKDQLSGINNIAFSK

SEQ ID NO: 8299 - protein, 574 aa, Artificial Sequence
  derived and/or modified protein sequence (wt) from HRSV__AVQ93607.1__F0
MELLIHRSSAIFLTLAINALYPTSSQNITEEFYQSTCSAVSRGYLSALRTGWYTSVITIELSNIKETKCNGTDTKVKLIKQELDKYKNAVTELQLLMQNTPAVNNRARREAPQYMNYTINTTKNLNVSISKKRKRRFLGFLLGVGSAIASGIAVSKVLHLEGEVNKIKNALQLTNKAVVSLSNGVSVLTSKVLDLKNYINNQLLPIVNQQSCRISNIETVIEFQQKNSRLLEITREFSVNAGVTTPLSTYMLTNSELLSLINDMPITNDQKKLMSSNVQIVRQQSYSIMSIIKEEVLAYVVQLPIYGVIDTPCWKLHTSPLCTTNIKEGSNICLTRTDRGWYCDNAGSVSFFPQADTCKVQSNRVFCDTMNSLTLPSEVSLCNTDIFNSKYDCKIMTSKTDISSSVITSLGAIVSCYGKTKCTASNKNRGIIKTFSNGCNYVSNKGVDTVSVGNTLYYVNKLEGKNLYVKGEPIINYYDPLVFPSDEFDASISQVNEKINQSLAFIRRSDELLHNVNTGKSTTNIMITAIIIVIIVVLLSLIAIGLLLYCKAKNTPVTLSKDQLSGINNIAFSK

SEQ ID NO: 8300 - protein, 574 aa, Artificial Sequence
  derived and/or modified protein sequence (wt) from HRSV__AVQ93588.1__F0
MELLIHRSSAIFLTLAINALYLTSSQNITEEFYQSTCSAVSRGYLSALRTGWYTSVITIELSNIKETKCNGTDTKVKLIKQELDKYKNAVTELQLLMQNTPAVNNRARREAPQYMNYTINTTKNLNVSISKKRKRRFLGFLLGVGSAIASGIAVSKVLHLEGEVNKIKNALQLTNKAVVSLSNGVSVLTSKVLDLKNYINNQLLPIVNQQSCRISNIETVIEFQQKNSRLLEITREFSVNAGVTTPLSTYMLTNSELLSLINDMPITNDQKKLMSSNVQIVRQQSYSIMSIIKEEVLAYVVQLPIYGVIDTPCWKLHTSPLCTTNIKEGSNICLTRTDRGWYCDNAGSVSFFPQADTCKVQSNRVFCDTMNSLTLPSEVSLCNTDIFNSKYDCKIMTSKTDISSSVITSLGAIVSCYGKTKCTASNKNRGIIKTFSNGCDYVSNKGVDTVSVGNTLYYVNKLEGKNLYVKGEPIINYYDPLVFPSDEFDASISQVNEKINQSLAFIRRSDELLHNVNTGKSTTNIMITAIIIVIIVVLLSLIAVGLLLYCKAKNTPVTLSKDQLSGINNIAFSK

SEQ ID NO: 8301 - protein, 574 aa, Artificial Sequence
  derived and/or modified protein sequence (wt) from HRSV__AVQ93575.1__F0
MELLIHRSSAIFLTLAINALYLTSSQNITEEFYQSTCSAVSRGYLSALRTGWYTSVITIELSNIKETKCNGTDTKVKLIKQELDKYKNAVTELQLLMQNTPAVNNRARREAPQYMNYTINTTKNLNVSISKKRKRRFLGFLLGVGSAIASGIAVSKVLHLEGEVNKIKNALQLTNKAVVSLSNGVSVLTSKVLDLKNYINNQLLPIVNQQSCRISNIETVIEFQQKNSRLLEITREFSVNAGVTTPLSTYMLTNSELLSLINDMPITNDQKKLMSSNVQIVRQQSYSIMSIIKEEVLAYVVQLPIYGVIDTPCWKLHTSPLCTTNIKEGSNICLTRTDRGWYCDNAGSVSFFPQADTCKVQSNRVFCDTMNSLTLPSEVSLCNTDIFNSKYDCKIMTSKTDISSSVITSLGAIVSCYGKTKCTASNKNRGIIKTFSNGCDYVSNKGVDTVSVGNTLYYVNKLEGKNLYVKGEPIINYYDPLVFPSDEFDASISQVNEKINQSLAFIRRSDELLHNVNTGKSTTNIMITAIIIVIIVVLLSLIAIGLLLYCKVKNTPVTLSKDQLSGINNIAFSK

SEQ ID NO: 8302 - protein, 574 aa, Artificial Sequence
  derived and/or modified protein sequence (wt) from HRSV__AVQ93468.1__F0
MELPILKTNAITPILAAVTLCFAFSQNITEEFIQSTCSAVSKGYLSALRTGWYTSVITIELSNIKENKCNGTDAKVKLIKQELDKYKNAVTELQLLMQSTPAANSRARRELPRFMNYTLNNTKNTNVTLSKKRKRRFLGFLLGVGSAIASGIAVSKVLHLEGEVNKIKSALLSTNKAVVSLSNGVSVLTSKVLDLKNYIDKQLLPIVNKQSCSISNIETVIEFQQKNNRLLEITREFSVNAGVTTPVSTYMLTNSELLSLINDMPITNDQKKLMSSNVQIVRQQSYSIMSIIKEEVLAYVVQLPLYGVIDTPCWKLHTSPLCTTNTKEGSNICLTRTDRGWYCDNAGSVSFFPQAETCKVQSNRVFCDTMNSLTLPSEVNLCNIDIFNPKYDCKIMTSKTDVSSSVITSLGAIVSCYGKTKCTASNKNRGIIKTFSNGCDYVSNKGVDTVSVGNTLYYVNKQEGKSLYVKGEPIINFYDPLVFPSDEFDASISQVNEKINQSLAFIRKSDELLHNVNAGKSTTNIMITTIIIVIIVILLALIAVGLLLYCKARSTPVTLSKDQLSGINNIAFSN

SEQ ID NO: 8303 - protein, 574 aa, Artificial Sequence
  derived and/or modified protein sequence (wt) from HRSV__AVQ93467.1__F0
MELPILKTNAITTILAAVTLCFASSQNITEEFYQSTCSAVSKGYLSALRTGWYTSVITIELSNIKENKCNGTDAKVKLIKQELDKYKNAVTELQLLMQSTPAANSRARRELPRFMNYTLNNTKNTNVTLSKKRKRRFLGFLLGVGSAIASGIAVSKVLHLEGEVNKIKSALLSTNKAVVSLSNGVSVLTSKVLDLKNYIDKQLLPIVNKQSCSISNIETVIEFQQKNNRLLEITREFSVNAGVTTPVSTYMLTNSELLSLINDMPITNDQKKLMSSNVQIVRQQSYSIMSIIKEEVLAYVVQLPLYGVIDTPCWKLHTSPLCTTNTKEGSNICLTRTDRGWYCENAGSVSFFPQAETCKVQSNRVFCDTMNSLTLPSEVNLCNIDIFNPKYDCKIMTSKTDVSSSVITSLGAIVSCYGKTKCTASNKNRGIIKTFSNGCDYVSNKGVDTVSVGNTLYYVNKQEGKSLYVKGEPIINFYDPLVFPSDEFDASISQVNEKINQSLAFIRKSDELLHNVNAGKSTTNIMITTIIIVIIVILLALIAVGLLLYCKARSTPVTLSKDQLSGINNIAFSN

SEQ ID NO: 8304 - protein, 574 aa, Artificial Sequence
  derived and/or modified protein sequence (wt) from HRSV__AVQ93590.1__F0
MELLIHRSSAIFLTFAINALYLTSSQNITEEFYQSTCSAVSRGYLSALRTGWYTSVITIELSNIKETKCNGTDTKVKLIKQELDKYKNAVTELQLLMQNTPAVNNRARREAPQYMDYTINTTKNLNVSISKKRKRRFLGFLLGVGSAIASGIAVSKVLHLEGEVNKIKNALQLTNKAVVSLSNGVSVLTSKVLDLKNYINNQLLPIVNQQSCRISNIETVIEFQQKNSRLLEITREFSVNAGVTTPLSTYMLTNSELLSLINDMPITNDQKKLMSSNVQIVRQQSYSIMSIIKEEVLAYVVQLPIYGVIDTPCWKLHTSPLCTTNIKEGSNICLTRTDRGWYCDNAGSVSFFPQADTCKVQSNRVFCDTMNSLTLPSEVSLCNTDIFNSKYDCKIMTSKTDISSSVITSLGAIVSCYGKTKCTASNKNRGIIKTFSNGCDYVSNKGVDTVSVGNTLYYVNKLEGKNLYVKGEPIINYYDPLVFPSDEFDASISQVNEKINQSLAFIRRSDELLHNVNTGKSTTNIMITAIIIVIIVVLLSLIAIGLLLYCKAKNTPVTLSKDQLSGINNIAFSK

SEQ ID NO: 8305 - protein, 574 aa, Artificial Sequence
  derived and/or modified protein sequence (wt) from HRSV__AVQ93552.1__F0
MELLIHRSSAIFLTLAINALYPTSSQNITEEFYQSTCSAVSRGYLSALRTGWYTSVITIELSNIKETKCNGTDTKVKLIKQELDKYKNAVTELQLLMQNTPAVNNRARREALQYMNYTINTTKNLNVSISKKRKRRFLGFLLGVGSAIASGIAVSKVLHLEGEVNKIKNALQLTNKAVVSLSNGVSVLTSKVLDLKNYINNQLLPIVNQQSCRISNIETVIEFQQKNSRLLEITREFSVNAGVTTPLSTYMLTNSELLSLINDMPITNDQKKLMSSNVQIVRQQSYSIMSIIKEEVLAYVVQLPIYGVIDTPCWKLHTSPLCTTNIKEGSNICLTRTDRGWYCDNAGSVSFFPQADTCKVQSNRVFCDTMNSLTLPSEVSLCNTDIFNSKYDCKIMTSKTDISSSVITSLGAIVSCYGKTKCTASNKNRGIIKTFSNGCDYVSNKGVDTVSVGNTLYYVNKLEGKNLYVKGEPIINYYDPLVFPSDEFDASISQVNEKINQSLAFIRRSDELLHNVNTGKSTTNIMITAIIIVIIVVLLSLIAIGLLLYCKAKNTPVTLSKDQLSGINNIAFSK

SEQ ID NO: 8306 - protein, 574 aa, Artificial Sequence
  derived and/or modified protein sequence (wt) from HRSV__AVQ93556.1__F0
MELLIHRSSAIFLTLAINALYLTSSQNITEEFYQSTCSAVSRGYLSALRTGWYTSVITIELSNIKETKCNGTDTKVKLIKQELDKYKNAVTELQLLMQNTPAVNNRARREAPQYMNYTINTTKNLNVSISKKRKRRFLGFLLGVGSAIASGIAVSKVLHLEGEVNKIKNALQLTNKAVVSLSNGVSVLTSKVLDLKNYINNQLLPIVNQQSCRISNIETVIEFQQKNSRLLEITREFSVNAGVTTPLSTYMLTNSELLSLINDMPITNDQKKLMSSNVQIVRQQSYSIMSIIKEEVLAYVVQLPIYGVIDTPCWKLHTSPLCTTNIKEGSNICLTRTDRGWYCDNAGSVSFFPQADTCKVQSNRVFCDTMNSLTLPSEVSLCNTDIFNSKYDCKIMTSKTDISSSVITSLGAIVSCYGKTKCTASNKNRGIIKTFSNGCDYVSNKGVNTVSVGNTLYYVNKLEGKNLYVKGEPIINYYDPLVFPSDEFDASISQVNEKINQSLAFIRRSDELLHNVNTGKSTTNIMITAIIIVIIVVLLSLIAIGLLLYCKAKNTPVTLSKDQLSGINNIAFSK

SEQ ID NO: 8307 - protein, 574 aa, Artificial Sequence
  derived and/or modified protein sequence (wt) from HRSV__AVQ93471.1__F0
MELPIFKTNAITTILAAVTLCFASSQNITEEFYQSTCSAVSKGYLSALRTGWYTSVITIELSNIKENKCNGTDAKVKLIKQELDKYKNAVTELQLLMQSTPAANSRARRELPRFMNYTLNNTRNTNVTLSKKRKRRFLGFLLGVGSAIASGIAVSKVLHLEGEVNKIKSALLSTNKAVVSLSNGVSVLTSKVLDLKNYIDKQLLPIVNKQSCSISNIETVIEFQQKNNRLLEITREFSVNAGVTTPVSTYMLTNSELLSLINDMPITNDQKKLMSSNVQIVRQQSYSIMSIIKEEVLAYVVQLPLYGVIDTPCWKLHTSPLCTTNTKEGSNICLTRTDRGWYCDNAGSVSFFPQAETCKVQSNRVFCDTMNSLTLPSEVNLCNIDIFNPKYDCKIMTSKTDVSSSVITSLGAIVSCYGKTKCTASNKNRGIIKTFSNGCDYVSNKGVDTVSVGNTLYYVNKQEGKSLYVKGEPIINFYDPLVFPSDEFDASISQVNEKINQSLAFIRKSDELLHNVNAGKSTTNIMITTIIIVIIVILLALIAVGLLLYCKARSTPVTLSKDQLSGINNIAFSN

SEQ ID NO: 8308 - protein, 574 aa, Artificial Sequence
  derived and/or modified protein sequence (wt) from HRSV__AVQ93458.1__F0
MELPIFKTNAITTILAAVTLCFASSQNITEEFYQSTCSAVSKGYLSALRTGWYTSVITIELSNIKENKCNGTDAKVKLIKQELDKYKNAVTELQLLMQSTPAANSRARRELPRFMNYTLNNAKNTNVTLSKKRKRRFLGFLLGVGSAIASGIAVSKVLHLEGEVNKIKSALLSTNKAVVSLSNGVSVLTSKVLDLKNYIDKQLLPIVNKQSCSISNIETVIEFQQKNNRLLEITREFSVNAGVTTPVSTYMLTNSELLSLINDMPITNDQKKLMSSNVQIVRQQSYSIMSIIKEEVLAYVVQLPLYGVIDTPCWKLHTSPLCTTNTKEGSNICLTRTDRGWYCDNAGSVSFFPQAETCKVQSNRVFCDTMNSLTLPSEVNLCNIDIFNPKYDCKIMTSKTDVSSSVITSLGAIVSCYGKTKCTASNKNRGIIKTFSNGCDYVSNKGVDTVSVGNTLYYVNKQEGKSLYVKGEPIINFYDPLVFPSDEFDASISQVNEKINQSLAFIRKSDELLHNVNAGKSTTNIMITTIIIVIIVILLALIAVGLLLYCKARSTPVTLSKDQLSGINNIAFSN

SEQ ID NO: 8309 - protein, 574 aa, Artificial Sequence
  derived and/or modified protein sequence (wt) from HRSV__AVQ93494.1__F0
MELPILKTNAITTILAAVTLCFASSQNITEEFYQSTCSAVSKGYLSALRTGWYTSVITIELSNIKENKCNGTDAKVKLIKQELDKYKNAVTELQLLMQSTPAANSRARRELPRFMNYTLNNTKNTNVTLSKIRKRRFLGFLLGVGSAIASGIAVSKVLHLEGEVNKIKSALLSTNKAVVSLSNGISVLTSKVLDLKNYIDKQLLPIVNKQSCSISNIETVIEFQQKNNRLLEITREFSVNAGVTTPVSTYMLTNSELLSLINDMPITNDQKKLMSSNVQIVRQQSYSIMSIIKEEVLAYVVQLPLYGVIDTPCWKLHTSPLCTTNTKEGSNICLTRTDRGWYCDNAGSVSFFPQAETCKVQSNRVFCDTMNSLTLPSEVNLCNIDIFNPKYDCKIMTSKTDVSSSVITSLGAIVSCYGKTKCTASNKNRGIIKTFSNGCDYVSNKGVDTVSVGNTLYYVNKQEGKSLYVKGEPIINFYDPLVFPSDEFDASISQVNEKINQSLAFIRKSDELLHNVNAGKSTTNIMITTIIIVIIVILLALIAVGLLLYCKARSTPVTLSKDQLSGINNIAFSN

SEQ ID NO: 8310 - protein, 574 aa, Artificial Sequence
  derived and/or modified protein sequence (wt) from HRSV__AVQ93470.1__F0
MELPILKTNAITTILAAVTLCFASSQNITEEFYQSTCSAVSKGYLSALRTGWYTSVITIELSNIKENKCNGTDAKVKLIKQELDKYKNAVTELQLLMQSTPAANSRARRELPRFMNYTLNNTKNTNVTLSKKRKRRFLGFLLGVGSAIASGIAVSKVLHLEGEVSKIKSALLSTNKAVVSLSNGVSVLTSKVLDLKNYIDKQLLPIVNKQSCSISNIETVIEFQQKNNRLLEITREFSVNAGVTTPVSTYMLTNSELLSLINDMPITNDQKKLMSSNVQIVRQQSYSIMSIIKEEVLAYVVQLPLYGVIDTPCWKLHTSPLCTTNTKEGSNICLTRTDRGWYCDNAGSVSFFPQAETCKVQSNRVFCDTMNSLTLPSEVNLCNIDIFNPKYDCKIMTSKTDVSSSVITSLGAIVSCYGKTKCTASNKNRGIIKTFSNGCDYVSNKGVDTVSVGNTLYYVNKQEGKSLYVKGEPIINFYDPLVFPSDEFDASISQVNEKINQSLAFIRKSDELLHNVNAGKSTANIMITTIIIVIIVILLALIAVGLLLYCKARSTPVTLSKDQLSGINNIAFSN

SEQ ID NO: 8311 - protein, 574 aa, Artificial Sequence
  derived and/or modified protein sequence (wt) from HRSV__AVQ93489.1__F0
MELPILKTNAITTILAAVTLCFASSQNITEEFYQSTCSAVSKGYLSALRTGWYTSVITIELSNIKENKCNGTDAKVKLIKQELDKYKNAVTELQLLMQSTPAANSRARRELPRFMNYTLNNTKNTNVTLSKKRKRRFLGFLLGVGSAIASGIAVSKVLHLEGEVNKIKSALLSTNKAVVSLSNGVSVLTSKVLDLKNYIDKQLLPVVNKQSCSISNIETVIEFQQKNNRLLEITREFSVNAGVTTPVSTYMLTNSELLSLINDMPITNDQKKLMSSNVQIVRQQSYSIMSIIKEEVLAYVVQLPLYGVIDTPCWKLHTSPLCTTNTKEGSNICLTRTDRGWYCDNAGSVSFFPQAETCKVQSNRVFCDTMNSLTLPSEVNLCNIDIFNPKYDCKIMTSKTDVSSSVITSLGAIVSCYGKTKCTASNKNRGIIKTFSNGCDYVSNKGVDTVSVGNTLYYVNKQEGKSLYVKGEPIINFYDPLVFPSDEFDASISQVNEKINQSLAFIRKSDELLHNVNAGKSTTNIMITTIIIVIIVILLALIAVGLLLYCKARSTPVTLSKDQLSGINNIAFSN

SEQ ID NO: 8312 - protein, 574 aa, Artificial Sequence
  derived and/or modified protein sequence (wt) from HRSV__AVQ93542.1__F0
MELLIHRSSAIFLTLAINALYLTSSQNITEEFYQSTCSAVSRGYLSALRTGWYTSVITIELSNIKETKCNGTDTKVKLIKQELDKYKNAVTELQLLMQNTPAVNSRARREAPQYMNYTINTTKNLNVSISKKRKRRFLGFLLGVGSAIASGIAVSKVLHLEGEVNKIKNALQLTNKAVVSLSNGVSVLTSKVLDLKNYINNQLLPIVNQQSCRISNIETVIEFQQKNSRLLEITREFSVNAGVTTPLSTYMLTNSELLSLINDMPITNDQKKLMSSNVQIVRQQSYSIMSIIKEEVLAYVVQLPIYGVIDTPCWKLHTSPLCTTNIKEGSNICLTRTDRGWYCDNAGSVSFFPQADTCKVQSNRVFCDTMNSLTLPSEVSLCNTDIFNSKYDCKIMTSKTDISSSVITSLGAIVSCYGKTKCTASNKNRGIIKTFSNGCDYVSNKGVDTVSVGNTLYYVNKLEGKNLYVKGEPIINYYDPLVFPSDEFDASISQVNEKINQSLAFIRRSDELLHNVNTGKSTTNIMITAIIIVIIVVLLSLIAIGLLLYCKAKNTPVTLSKDQLSGINNIAFSK

SEQ ID NO: 8313 - protein, 574 aa, Artificial Sequence
  derived and/or modified protein sequence (wt) from HRSV__AVQ93472.1__F0
MELPILKTNAITTIFAAVTLCFSSSQNITEKFYQSTCSAVSKGYLSALRTGWYTSVITIKLSNIKENKCNGTDAKVKLIKQELHKYKNAVTELQLLMQSTPPANNRARRELPRFMNYTLNNTKNNNVTLIKKRKRTFLGFLLGVGSAIASGIAVSKVLHLQGEVNKIKSALLSTNKAVVSLSNGVSVLTSKVLDLKNYIDKQLLPIVNKQSCSISNIETVIEFQQKNNRLLEITREFSVNAGVTTPVSTYMLTNSELLSLINDMPITNDQKKLMSNNVQIVRQQSYSIMSIIKEEVLAYVVQLPLYGVIDTPCWKLHTSPLCTTNTKEGSNICLTRTDRGWYCDNAGSVSFFPQAETCKVQSNRVFCDTMNSLTLPSEVNLCNIDIFNPKYDCKIMTSKTDVSSSVITSLGAIVSCYGKTKCTASNKNRGIIKTFSNGCDYVSNKGVDTVSVGNTLYYVNKQEGKSLYVKGEPIINFYDPLVFPSDEFDASISQVNEKINQSLAFIRKSDELLHNVNVGKSTTNIMITTIIIVIIVILLLLIAVGLFLYCKARSTPVTLSKDQLSGINNIAFSN

SEQ ID NO: 8314 - protein, 574 aa, Artificial Sequence
  derived and/or modified protein sequence (wt) from HRSV__AVQ93514.1__F0
MELPILKTNAITTILAAVTLCFASSQNITEEFYQSTCSAVSKGYLSALRTGWYTSVITIELSNIKENKCNGTDAKVKLIKQELDKYKNAVTELQLLMQSTPAANSRARRELPRFMNYTLNNTKNTNVTLSKKRKRRFLGFLLGVGSAIASGIAVSKVLHLEGEVNKIKSALLSTNKAVVSLSNGVSVLTSKVLDLKNYIDKQLLPIVNKQSCSISNIETVIEFQQKNSRLLEITREFSVNAGVTTPVSTYMLTNSELLSLINDMPITNDQKKLMSSNVQIVRQQSYSIMSIIKEEVLAYVVQLPLYGVIDTPCWKLHTSPLCTTNTKEGSNICLTRTDRGWYCDNAGSVSFFPQAETCKVQSNRVFCDTMNSLTLPSEVNLCNIDIFNPKYDCKIMTSKTDVSSSVITSLGAIVSCYGKTKCTASNKNRGIIKTFSNGCDYVSNKGVDTVSVGNTLYYVNKQEGKSLYVKGEPIINFYDPLVFPSDEFDASISQVNEKINQSLAFIRKSDELLHNVNAGKSTTNIMITTIIIVIIVILLALIAVGLLLYCKARSTPVTLSKDQLSGINNIAFSN

SEQ ID NO: 8315 - protein, 574 aa, Artificial Sequence
  derived and/or modified protein sequence (wt) from HRSV__AVQ93485.1__F0
MELPILKTNAITTILAAVTLCFASSQNITEEFYQSTCSAVSKGYLSALRTGWYTSVITIELSNIKENKCNGTDAKVKLIKQELDKYKNAVTKLQLLMQSTPAANSRARRELPRFMNYTLNNTKNTNVTLSKKRKRRFLGFLLGVGSAIASGIAVSKVLHLEGEVNKIKSALLSTNKAVVSLSNGVSVLTSKVLDLKNYIDKQLLPIVNKQSCSISNIETVIEFQQKNNRLLEITREFSVNAGVTTPVSTYMLTNSELLSLINDMPITNDQKKLMSSNVQIVRQQSYSIMSIIKEEVLAYVVQLPLYGVIDTPCWKLHTSPLCTTNTNEGSNICLTRTDRGWYCDNAGSVSFFPQAETCKVQSNRVFCDTMNSLTLPSEVNLCNIDIFNPKYDCKIMTSKTDVSSSVITSLGAIVSCYGKTKCTASNKNRGIIKTFSNGCDYVSNKGVDTVSVGNTLYYVNKQEGKSLYVKGEPIINFYDPLVFPSDEFDASISQVNEKINQSLAFIRKSDELLHNVNAGKSTTNIMITTIIIVIIVILLALIAVGLLLYCKARSTPVTLSKDQLSGINNIAFSN

SEQ ID NO: 8316 - protein, 574 aa, Artificial Sequence
  derived and/or modified protein sequence (wt) from HRSV__AVQ93533.1__F0
MELPILKTNAITTILAAVTLCFASSQNITEEFYQSTCSAVSKGYLSALRTGWYTSVITIELSNIKENKCNGTDAKVKLIKQELDKYKNAVTELQLLMQSTPAANSRARRELPRFMNYTLNNTKNTNVTLSKKRKRRFLGFLLGVGSAIASGIAVSKVLHLEGEVNKIKSALLSTNKAVVSLSNGVSVLTSKVLDLKNYIDKQLLPIVNKQSCSISNIETVIEFQQKNNRLLEITREFSVNAGVTTPVSTYMLTNSELLSLINDMPITNDQKKLMSSNVQIVRQQSYSIMSIIKEEVLAYVVQLPLYGVIDTPCWKIHTSPLCTTNTKEGSNICLTRTDRGWYCDNAGSVSFFPQAETCKVQSNRVFCDTMNSLTLPSEVNLCNIDIFNPKYDCKIMTSKTDVSSSVITSLGAIVSCYGKTKCTASNKNRGIIKTFSNGCDYVSNKGVDTVSVGNTLYYVNKQEGKSLYVKGEPIINFYDPLVFPSDEFDASISQVNEKINQSLAFIRKSDELLHNVNAGKSTTNIMITTIIIVIIVILLALIAVGLLLYCKARSTPVTLSKDQLSGINNIAFSN

SEQ ID NO: 8317 - protein, 574 aa, Artificial Sequence
  derived and/or modified protein sequence (wt) from HRSV__AVQ93481.1__F0
MELPILKTNAITTILAAVTLCFASSQNITEEFYQSTCSAVSKGYLSALRTGWYTSVITIELSNIKENKCNGTDAKVKLIKQELDKYKNAVTELQLLMQSTPAANSRARRELPRFMNYTLNNTKNTNVTLSKKRKRRFLGFLLGVGSAIASGIAVSKVLHLEGEVNKIKSALLSTNKAVVSLSNGVSVLTSKVLDLKNYIDKQLLPIVNKQSCSISNIETVIEFQQKNNRLLEITREFSVNAGVTTPVSTYMLTNSELLSLINDMPITNDQKKLMSSNVQIVRQQSYSIMSIIKEEVLAYVVQLPLYGVIDTPCWKLHTSPLCTTNTKEGSNICLTRTDRGWYCDNAGSVSFFPQAETCKVQSNRVFCDTMNSLTLPSEVNLCNIDIFNPKYDCTIMTSKTDVSSSVITSIGAIVSWYGKTKCTASNKNRGIIKTFCNGCDYVSNKGVDTVSVGNTLYYVNKQEGKSLYVKGEPIINFYDPLVFPSDEFDASISQVNEKINQSLAFIRKSDELLHNVNVGKSTTNIMITTIIIVIIVILLALIAVGLLISCKARSPPVTLSKDQLSGINNIAFSK

SEQ ID NO: 8318 - protein, 574 aa, Artificial Sequence
  derived and/or modified protein sequence (wt) from HRSV__AVQ93546.1__F0
MELLIHRSNAIFLTLAINALYLTSSQNITEEFYQSTCSAVSRGYLSALRTGWYTSVITIELSNIKETKCNGTDTKVKLIKQELDKYKNAVTELQLLMQNTPAVNNRARREAPQYMNYTINTTKNLNVSISKKRKRRFLGFLLGVGSAIASGIAVSKVLHLEGEVNKIKNALQLTNKAVVSLSNGVSVLTSKVLDLKNYINNQLLPIVNQQSCRISNIETVIEFQQKNSRLLEITREFSVNAGVTTPLSTYMLTNSELLSLINDMPITNDQKKLMSSNVQIVRQQSYSIMSIIKEEVLAYVVQLPIYGVIDTPCWKLHTSPLCTTNIKEGSNICLTRTDRGWYCDNAGSVSFFPQADTCKVQSNRVFCDTMNSLTLPSEVSLCNTDIFNSKYDCKIMTSKTDISSSVITSLGAIVSCYGKTKCTASNKNRGIIKTFSNGCDYVSNKGVDTVSVGNTLYYVNKLEGKNLYVKGEPIINYYDPLVFPSDEFDASISQVNEKINQSLAFIRRSDELLHNVNTGKSTTNIMITAIIIVIIVVLLSLIAIGLLLYCKAKNTPVTLSKDQLSGINNIAFSK

SEQ ID NO: 8319 - protein, 574 aa, Artificial Sequence
  derived and/or modified protein sequence (wt) from HRSV__AVQ93512.1__F0
MELPILKTNAITTILAAVTFCFASSQNITEEFYQSTCSAVSKGYLSALRTGWYTSVITIELSNIKENKCNGTDAKVKLIKQELDKYKNAVTELQLLMQSTPAANSRARRELPRFMNYTLNNTKNTNVTLSKKRKRRFLGFLLGVGSAIASGIAVSKVLHLEGEVNKIKSALLSTNKAVVSLSNGVSVLTSKVLDLKNYIDKQLLPIVNKQSCSISNIETVIEFQQKNNRLLEITREFSVNAGVTTPVSTYMLTNSELLSLINDMPITNDQKKLMSSNVQIVRQQSYSIMSIIKEEVLAYVVQLPLYGVIDTPCWKLHTSPLCTTNTKEGSNICLTRTDRGWYCDNAGSVSFFPQAETCKVQSNRVFCDTMNSLTLPSEVNLCNIDIFNPKYDCKIMTSKTDVSSSVITSLGAIVSCYGKTKCTASNKNRGIIKTFSNGCDYVSNKGVDTVSVGNTLYYVNKQEGKSLYVKGEPIINLYDPLVFPSDEFDASISQVNEKINQSLAFIRKSDELLHNVNAGKSTTNIMITTIIIVIIVILLALIAVGLLLYCKARSTPVTLSKDQLSGINNIAFSN

SEQ ID NO: 8320 - protein, 574 aa, Artificial Sequence
  derived and/or modified protein sequence (wt) from HRSV__AVQ93554.1__F0
MELLIHRSSAIFLTFAINALYLTSSQNITEEFYQSTCSAVSRGYLSALRTGWYTSVITIELSNIKETKCNGTDTKVKLIKQELDKYKNAVTELQLLMQNTPAVNNRARREAPQYMDYTINTTKNLNVSISKKRKRRFLGFLLGVGSAIASGIAVSKVLHLEGEVNKIKNALQLTNKAVVSLSNGVSVLTSKVLDLKNYINNQLLPIVNQQSCRISNIETVIEFQQKNSRLLEITREFSVNAGVTTPLSTYMLTNSELLSLINDMPITNDQKKLMSSNVQIVRQQSYSIMSIIKEEVLAYVVQLPIYGVIDTPCWKLHTSPLCTTNIKEGSNICLTRTDRGWYCDNAGSVSFFPQADTCKVQSNRVFCDTMNSLTLPSEVSLCNTDIFNSKYDCKIMTSKTDISSSVITSLGAIVSCYGKTKCTASNKNRGIIKTFSNGCDYVSNKGVDTVSVGNTLYYVNKLEGKNLYVKGEPIINYYDPLVFPSDEFDASISQVNEKINQSLAFIRRSDELLHNVNTGKSTTNIMITAIIIVIIVVLLSLIAIGLMLYCKAKNTPVTLSKDQLSGINNIAFSK

SEQ ID NO: 8321 - protein, 574 aa, Artificial Sequence
  derived and/or modified protein sequence (wt) from HRSV__AVQ93551.1__F0
MELLIHRSSAIFLTLAINALYPTSSQNITEEFYQSTCSAVSRGYLSALRTGWYTSVITIELSNIKETKCNGTDTKVKLIKQELDKYKNAVTELQLLMQNTPAVNNRARREAPQYMNYTINTTKNLNVSISKKRKRRFLGFLLGVGSAIASGIAVSKVLHLEGEVNKIKNALQLTNKAVVSLSNGVSVLTSKVLDLKNYINNQLLPIVNQQSCRISNIETVIEFQQKNSRLLEITREFSVNAGVTTPLSTYMLTNSELLSLINDMPITNDQKKLMSSNVQIVRQQSYSIMSIIKEEVLAYVVQLPIYGVIDTPCWKLHTSPLCTTNIKEGSNICLTRTDRGWYCDNAGSVSFFPQADTCKVQSNRVFCDTMNSLTLPSEVSLCNTDIFNSKYDCKIMTSKTDISSSVITSLGAIVSCYGKTKCTASNKNRGIIKTFSNGCDYVSNKGVDTVSVGNTLYYVNKLEGKNLYVKGEPIINYYDPLVFPSDEFDASISQVNEKINQSLAFIRRSDELLHNVNTGKSTTNIMITAIIIVIIVVLLSLIAIGLLLYCKAKNTPVTLSKDQLSGINNIAFSK

SEQ ID NO: 8322 - protein, 574 aa, Artificial Sequence
  derived and/or modified protein sequence (wt) from HRSV__AVQ93547.1__F0
MELLIHRSSAIFLTLAINALYLTSSQNITEEFYQSTCSAVSRGYLSALRTGWYTSVITIELSNIKETKCNGTDTKVKLIKQELDKYKNAVTELQLLMQNTPAINNRARREAPQYMNYTINTTKNLNVSISKKRKRRFLGFLLGVGSAIASGIAVSKVLHLEGEVNKIKNALQLTNKAVVSLSNGVSVLTSKVLDLKNYINNQLLPIVNQQSCRISNIETVIEFQQKNSRLLEITREFSVNAGVTTPLSTYMLTNSELLSLINDMPITNDQKKLMSSNVQIVRQQSYSIMSIIKEEVLAYVVQLPIYGVIDTPCWKLHTSPLCTTNIKEGSNICLTRTDRGWYCDNAGSVSFFPQADTCKVQSNRVFCDTMNSLTLPSEVSLCNTDIFNSKYDCKIMTSKTDISSSVITSLGAIVSCYGKTKCTASNKNRGIIKTFSNGCDYVSNKGVDTVSVGNTLYYVNKLEGKNLYVKGEPIINYYDPLVFPSDEFDASISQVNEKINQSLAFIRRSDELLHNVNTGKSTTNIMITAIIIVIIVVLLSLIAIGLLLYCKAKNTPVTLSKDQLSGINNIAFSK

SEQ ID NO: 8323 - protein, 574 aa, Artificial Sequence
  derived and/or modified protein sequence (wt) from HRSV__AVQ93558.1__F0
MELLIHRSSAIFLTLAINALYLTSSQNITEEFYQSTCSAVSRGYLSALRTGWYTSVITIELSNIKETKCNGTDTKVKLIKQELDKYKNAVTELQLLMQNTPAVNNRARREAPQYMNYTINTTKNLYVSISKKRKRRFLGFLLGVGSAIASGIAVSKVLHLEGEVNKIKNALQSTNKAVVSLSNGVSVLTSKVLDLKNYINSQLLPIVNKQSCRISNIETVIEFQQKNSRLLEITREFSVNAGVTTPLSTYMLTNSELLSLIIDMPITNDQKKLMSSNVQIVRQQSYSIMSIIKEEVLAYVVQLPIYGVIDTPCWKLHTSPLCTTNIKEGSNICLTRTDRGWYCDNAGSVSFFPQADTCKVQSNRVFCDTMNSLTLPSEVSLCNTDIFNSKYDCKIMTSKTDISSSVITSLGAIVSCYGKTKCTASNKNRGIIKTFSNGCDYVSNKGVDTVSVGNTLYYVNKLEGKNLYVKGEPIINYYDPLVFPSDEFDASISQVNEKINQSLAFIRRSDELLHNVNTGKSTTNIMITAIIIVIIVVLLSLIAIGLLLYCKAKNTPVTLSKDQLSGINNIAFSK

SEQ ID NO: 8324 - protein, 574 aa, Artificial Sequence
  derived and/or modified protein sequence (wt) from HRSV__AVQ93461.1__F0
MESPILKTNAITTILAAVTLCFASSQNITEEFYQSTCSAVSKGYLSALRTGWYTSVITIELSNIKENKCNGTDAKVKLIKQELDKYKNAVTELQLLMQSTPAANSRARRELPRFMNYTLNNAKNTNVTLSKKRKRRFLGFLLGVGSAIASGIAVSKVLHLEGEVNKIKSALLSTNKAVVSLSNGVSVLTSKVLDLKNYIDKQLLPIVNKQSCSISNIETVIEFQQKNNRLLEITREFSVNAGVTTPVSTYMLTNSELLSLINDMPITNDQKKLMSSNVQIVRQQSYSIMSIIKEEVLAYVVQLPLYGVIDTPCWKLHTSPLCTTNTKEGSNICLTRTDRGWYCDNAGSVSFFPQAETCKVQSNRVFCDTMNSLTLPSEVNLCNIDIFNPKYDCKIMTSKTDVSSSVITSLGAIVSCYGKTKCTASNKNRGIIKTFSNGCDYVSNKGVDTVSVGNTLYYVNKQEGKSLYVKGEPIINFYDPLVFPSDEFDASISQVNEKINQSLAFIRKSDELLHNVNAGKSTTNIMITTIIIVIIVILLALIAVGLLLYCKARSTPVTLSKDQLSGINNIAFSN

SEQ ID NO: 8325 - protein, 574 aa, Artificial Sequence
  derived and/or modified protein sequence (wt) from HRSV__AVQ93500.1__F0
MELPILKTNAITTILAAVTLCFASSQNITEEFYQSTCSAVSKGYLSALRTGWYTSVITIELSNIKENKCNGTDAKVKLIKQELDKYKNAVTELQLLMQSTPATNSRARRELPRFMNYTLNNTKNTNVTLSKKRKRRFLGFLLGVGSAIASGIAVSKVLHLEGEVNKIKSALLSTNKAVVSLSNGVSVLTSKVLDLKNYIDKQLLPIVNKQSCSISNIETVIEFQQKNNRLLEITREFSVNAGVTTPVSTYMLTNSELLSLINDMPITNDQKKLMSSNVQIVRQQSYSIMSIIKEEVLAYVVQLPLYGVIDTPCWKLHTSPLCTTNTKEGSNICLTRTDRGWYCDNAGSISFFPQAETCKVQSNRVFCDTMNSLTLPSEVNLCNIDIFNPKYDCKIMTSKTDVSSSVITSLGAIVSCYGKTKCTASNKNRGIIKTFSNGCDYVSNKGVDTVSVGNTLYYVNKQEGKSLYVKGEPIINFYDPLVFPSDEFDASISQVNEKINQSLAFIRKSDELLHNVNAGKSTTNIMITTIIIVIIVILLALIAVGLLLYCKARSTPVTLSKDQLSGINNIAFSN

SEQ ID NO: 8326 - protein, 574 aa, Artificial Sequence
  derived and/or modified protein sequence (wt) from HRSV__AVQ93426.1__F0
MELPILKTNAITTILAAVTLCFASSQNITEEFYQSTCSAVSKGYLSALRTGWYTSVITIELSNIKENKCNGTDAKVKLIKQELDKYKNAVTELQLLMQSTPAANSRARRELPRFMNYTLNNTKNTNVTLSKKRKRRFLGFLLGVGSAIASGIAVSKVLHLEGEVNKIKSALLSTNKAVVSLSNGVSVLTSKVLDLKNYIDKQLLPIVNKQSCSISNIETVIEFQQKNNRLLEITREFSVNAGVTTPVSTYMLTNSELLSLINDMPITNDQKKLMSSNVQIVRQQSYSIMSIIKEEVLAYVVQLPLYGVIDTPCWKLHTSPLCTTNTKEGSNICLTRTDRGWYCDNAGSVSFFPQAETCKVQSNRVFCDTMNSLTLPSEVNLCNIDIFNPKYDCKIMTSKTDVSSSVITSLGAIVSCYGKTKCTASNKNRGIIKTFSNGCDYVSNKGVDTVSVGNTLYYVNKQEGKSLYVKGEPIINFYDPLVFPSDEFDASISQVNEKINQSLAFIRKSDELLYNVNAGKSTTNIMITTIIIVIIVILLALIAVGLLLYCKARSTPVTLSKDQLSGINNIAFSN

SEQ ID NO: 8327 - protein, 574 aa, Artificial Sequence
  derived and/or modified protein sequence (wt) from HRSV__AVQ93398.1__F0
MELPILKINAITTILAAVTLCFASSQNITEEFYQSTCSAVSKGYLSALRTGWYTSVITIELSNIKENKCNGTDAKVKLIKQELDKYKNAVTELQLLMQSTPAANSRARRELPRFMNYTLNNTKNTNVTLSKKRKRRFLGFLLGVGSAIASGIAVSKVLHLEGEVNKIKSALLSTNKAVVSLSNGVSVLTSKVLDLKNYIDKQLLPIVNKQSCSISNIETVIEFQQKNNRLLEITREFSVNAGVTTPVSTYMLTNSELLSLINDMPITNDQKKLMSSNVQIVRQQSYSIMSIIKEEVLAYVVQLPLYGVIDTPCWKLHTSPLCTTNTKEGSNICLTRTDRGWYCDNAGSVSFFPQAETCKVQSNRVFCDTMNSLTLPSEVNLCNIDIFNPKYDCKIMTSKTDVSSSVITSLGAIVSCYGKTKCTASNKNRGIIKTFSNGCDYVSNKGVDTVSVGNTLYYVNKQEGKSLYVKGEPIINFYDPLVFPSDEFDASISQVNEKINQSLAFIRKSDELLHNVNAGKSTTNIMITTIIIVIIVILLALIAVGLLLYCKARSTPVTLSKDQLSGINNIAFSN

SEQ ID NO: 8328 - protein, 574 aa, Artificial Sequence
  derived and/or modified protein sequence (wt) from HRSV__AVQ93401.1__F0
MELPILKTNAITTILAAVTLYFASSQNITEEFYQSTCSAVSKGYLSALRTGWYTSVITIELSNIKENKCNGTDAKVKLIKQELDKYKNAVTELQLLMQSTPAANSRARRELPRFMNYTLNNTKNTNVTLSKKRKRRFLGFLLGVGSAIASGIAVSKVLHLEGEVNKIKSALLSTNKAVVSLSNGVSVLTSKVLDLKNYIDKQLLPIVNKQSCSISNIETVIEFQQKNNRLLEITREFSVNAGVTTPVSTYMLTNSELLSLINDMPITNDQKKLMSSNVQIVRQQSYSIMSIIKEEVLAYVVQLPLYGVIDTPCWKLHTSPLCTTNTKEGSNICLTRTDRGWYCDNAGSVSFFPQAETCKVQSNRVFCDTMNSLTLPSEVNLCNIDIFNPKYDCKIMTSKTDVSSSVITSLGAIVSCYGKTKCTASNKNRGIIKTFSNGCDYVSNKGVDTVSVGNTLYYVNKQEGKSLYVKGEPIINFYDPLVFPSDEFDASISQVNEKINQSLAFIRKSDELLHNVNAGKSTTNIMITTIIIVIIVILLALIAVGLLLYCKARSTPVTLSKDQLSGINNIAFSN

SEQ ID NO: 8329 - protein, 574 aa, Artificial Sequence
  derived and/or modified protein sequence (wt) from HRSV__AVQ93361.1__F0
MELPILKTNAITTILAAVTLCFASSQNITEEFYQSTCSAVSKGYLSALRTGWYTSVITIELSNIKENKCNGTDAKVKLIKQELDKYKNAVTELQLLMQSAPAANSRARRELPRFMNYTLNNTKNTNVTLSKKRKRRFLGFLLGVGSAIASGIAVSKVLHLEGEVNKIKSALLSTNKAVVSLSNGVSVLTSKVLDLKNYIDKQLLPIVNKQSCSISNIETVIEFQQKNNRLLEITREFSVNAGVTTPVSTYMLTNSELLSLINDMPITNDQKKLMSSNVQIVRQQSYSIMSIIKEEVLAYVVQLPLYGVIDTPCWKLHTSPLCTTNTKEGSNICLTRTDRGWYCDNAGSVSFFPQAETCKVQSNRVFCDTMNSLTLPSEVNLCNIDIFNPKYDCKIMTSKTDVSSSVITSLGAIVSCYGKTKCTASNKNRGIIKTFSNGCDYVSNKGVDTVSVGNTLYYVNKQEGKSLYVKGEPIINFYDPLVFPSDEFDASISQVNEKINQSLAFIRKSDELLHNVNAGKSTTNIMITTIIIVIIVILLALIAVGLLLYCKARSTPVTLSKDQLSGINNIAFSN

SEQ ID NO: 8330 - protein, 574 aa, Artificial Sequence
  derived and/or modified protein sequence (wt) from HRSV__AVQ93408.1__F0
MELPISKTNAITTILAAITLCFASSQNITEEFYQSTCSAVSKGYLSALRTGWYTSVITIELSNIKENKCNGTDAKVKLIKQELDKYKNAVTELQLLMQSTPAANSRARRELPRFMNYTLNNTKNTNVTLSKKRKRRFLGFLLGVGSAIASGIAVSKVLHLEGEVNKIKSALLSTNKAVVSLSNGVSVLTSKVLDLKNYIDKQLLPIVNKQSCSISNIETVIEFQQKNNRLLEITREFSVNAGVTTPVSTYMLTNSELLSLINDMPITNDQKKLMSSNVQIVRQQSYSIMSIIKEEVLAYVVQLPLYGVIDTPCWKLHTSPLCTTNTKEGSNICLTRTDRGWYCDNAGSVSFFPQAETCKVQSNRVFCDTMNSLTLPSEVNLCNIDIFNPKYDCKIMTSKTDVSSSVITSLGAIVSCYGKTKCTASNKNRGIIKTFSNGCDYVSNKGVDTVSVGNTLYYVNKQEGKSLYVKGEPIINFYNPLVFPSDEFDASISQVNEKINQSLAFIRKSDELLHNVNAGKSTTNIMITTIIIVIIVILLALIAVGLLLYCKARSTPVTLSKDQLSGINNIAFSN

SEQ ID NO: 8331 - protein, 574 aa, Artificial Sequence
  derived and/or modified protein sequence (wt) from HRSV__AVQ93443.1__F0
MELPILKTNAITTILAAVTLCFASSQNITEEFYQSTCSAVSKGYLSALRTGWYTSVITIELSNIKENKCNGTDAKVKLIKQELDKYKNAVTELQLLMQSTPAANSRARRELPRFMNYTLNNTKTTNVTLSKKRKRRFLGFLLGVGSAIASGIAVSKVLHLEGEVNKIKSALLSTNKAVVSLSNGVSVLTSKVLDLKNYIDKQLLPIVNKQSCSISNIETVIEFQQKNNRLLEITREFSVNAGVTTPVSTYMLTNSELLSLINDMPITNDQKKLMSSNVQIVRQQSYSIMSIIKEEVLAYVVQLPLYGVIDTPCWKLHTSPLCTTNTKEGSNICLTRTDRGWYCDNAGSVSFFPQAETCKVQSNRVFCDTMNSLTLPSEVNLCNIDIFNPKYDCKIMTSKTDVSSSVITSLGAIVSCYGKTKCTASNKNRGIIKTFSNGCDYVSNKGVDTVSVGNTLYYVNKQEGKSLYVKGEPIINFYDPLVFPSDEFDASISQVNEKINQSLAFIRKSDELLHNVNAGKSTTNIMITTIIIVIIVILLALIAVGLLLYCKARSTPVTLSKDQLSGINNIAFSN

SEQ ID NO: 8332 - protein, 574 aa, Artificial Sequence
  derived and/or modified protein sequence (wt) from HRSV__AVQ93429.1__F0
MELPILKTNAITTILAAVTLCFASSQNITEEFYQSTCSAVSKGYLSALRTGWYTSVITIELSNIKENKCNGTDAKVKLIKQELDKYKNAVTELQLLMQSTPAANSRARRELPRFMNYTLNNTKNTNVTLSKKRKRRFLGFLLGVGSAIASGIAVSKVLHLEGEVNKIKSALLSTNKAVVSLSNGVSVLTSKVLDLKNYIDKQLLPIVNKQSCSISNIETVIEFQQKNNRLLEITREFSVNAGVTTPVSTYMLTNSELLSLINDMPITNDQKKLMSSNVQIVRQQSYSIMSIIKEEVLAYVVQLPLYGVIDTPCWKLHTSPLCTTNTKEGSNICLTRTDRGWYCDNAGSVSFFPQAETCKVQSNRVFCDTMNSLTLPSEVNLCNIDIFNPKYDCKIMTSKTDVSSSVITSLGAIVSCYGKTKCTASNKNRGIIKTFSNGCDYVSNKGVDTVSVGNTLYYVNKQEGKNLYVKGEPIINFYDPLVFPSDEFDASISQVNEKINQSLAFIRKSDELLHNVNAGKSTTNIMITTIIIVIIVILLALIAVGLLLYCKARSTPVTLSKDQLSGINNIAFSN

SEQ ID NO: 8333 - protein, 574 aa, Artificial Sequence
  derived and/or modified protein sequence (wt) from HRSV__AVQ93359.1__F0
MELPILKTNAITTIFAAVTLCFASSQNITEEFYQSTCSAVSKGYLSALRTGWYTSVITIELSNIKENKCNGTDAKVKLIKQELDKYKNAVTELQLLMQSTPAANNRARRELPRFMNYTLNNTKNNNVTLSKKRKRRFLGFLLGVGSAIASGIAVSKVLHLEGEVNKIKSALLSTNKAVVSLSNGVSVLTSKVLDLKNYIDKQLLPIVNKQSCSISNIETVIEFQQKNNRLLEITREFSVNAGVTTPVSTYMLTNSELLSLINDMPITNDQKKLMSNNVQIVRQQSYSIMSIIKEEVLAYVVQLPLYGVIDTPCWKLHTSPLCTTNTKEGSNICLTRTDRGWYCDNAGSVSFFPQAETCKVQSNRVFCDTMNSLTLPSEVNLCNIDIFNPKYDCKIMTSKTDVSSSVITSLGAIVSCYGKTKCTASNKNRGIIKTFSNGCDYVSNKGVDTVSVGNTLYYVNKQEGKNLYVKGEPIINFYDPLVFPSDEFDASISQVNEKINQSLAFIRKSDELLHNVNVGKSTTNIMITTIIIVIIVILLLLIAVGLFLYCKARSTSVTLSKDQLSGINNIAFSN

SEQ ID NO: 8334 - protein, 574 aa, Artificial Sequence
  derived and/or modified protein sequence (wt) from HRSV__AVQ93365.1__F0
MELPILKTNAITTILAAVTLCFASSQNITEEFYQSTCSAVSKGYLSALRTGWYTSVITIELSNIKENKCNGTDAKVKLIKQELDKYKNAVTELQLLMQSTPAVNSRARRELPRFMNYTLNNTKNTNVTLSKKRKRRFLGFLLGVGSAIASGIAVSKVLHLEGEVNKIKSALLSTNKAVVSLSNGVSVLTSKVLDLKNYIDKQLLPIVNKQSCSISNIETVIEFQQKNNRLLEITREFSVNAGVTTPVSTYMLTNSELLSLINDMPITNDQKKLMSSNVQIVRQQSYSIMSIIKEEVLAYVVQLPLYGVIDTPCWKLHTSPLCTTNTKEGSNICLTRTDRGWYCDNAGSVSFFPQAETCKVQSNRVFCDTMNSLTLPSEVNLCNIDIFNPKYDCKIMTSKTDVSSSVITSLGAIVSCYGKTKCTASNKNRGIIKTFSNGCDYVSNKGVDTVSVGNTLYYVNKQEGKSLYVKGEPIINFYDPLVFPSDEFDASISQVNEKINQSLAFIRKSDELLHNVNAGKSTTNIMITTIIIVIIVILLALIAVGLLLYCKARSTPVTLSKDQLSGINNIAFSN

SEQ ID NO: 8335 - protein, 574 aa, Artificial Sequence
  derived and/or modified protein sequence (wt) from HRSV__AVQ93366.1__F0
MELPILKTNAITTILAAVTLCFASSQNITEEFYQSTCSAVSKGYLSALRTGWYTSVITIELSNIKENKCNGTDAKVKLIKQELDKYKNAVTELQLLMQSTPAANSRARRELPRFMNYTLNNTKNTNVTLSKKRKRRFLGFLLGVGSAIASGIAVSKVLHLEGEVNKIKSALLSTNKAVVSLSNGVSVLTSKVLDLKNYIDKQLLPIVNKQSCSISNIETVIEFQQKNNRLLEITREFSVNAGVTTPVSTYMLTNSELLSLINDMPITNDQKKLMSSNVQIIRQQSYSIMSIIKEEVLAYVVQLPLYGVIDTPCWKLHTSPLCTTNTKEGSNICLTRTDRGWYCDNAGSVSFFPQAETCKVQSNRVFCDTMNSLTLPSEVNLCNIDIFNPKYDCKIMTSKTDVSSSVITSLGAIVSCYGKTKCTASNKNRGIIKTFSNGCDYVSNKGVDTVSVGNTLYYVNKQEGKSLYVKGEPIINFYDPLVFPSDEFDASISQVNEKINQSLAFIRKSDELLHNVNAGKSTTNIMITTIIIVIIVILLALIAVGLLLYCKARSTPVTLSKDQLSGINNIAFSN

SEQ ID NO: 8336 - protein, 574 aa, Artificial Sequence
  derived and/or modified protein sequence (wt) from HRSV__AVQ93402.1__F0
MELPILKTNTITTILAAVTLCFASSQNITEEFYQSTCSAVSKGYLIALRTGWYTNVITIELSNIKENKCNGTDAKVKLIKQELDKYKNAVTELQLLMQSTPAANSRARRELPRFMNYTLNNTKNTNVTLSKKRKRRFLGFLLGVGSAIASGIAVSKVLHLEGEVNKIKSALLSTNKAVVSLSNGVSVLTSKVLDLKNYIDKQLLPIVNKQSCSISNIETVIEFQQKNNRLLEITREFSVNAGVTTPVSTYMLTNSELLSLINDMPITNDQKKLMSSNVQIVRQQSYSIMSIIKEEVLAYVVQLPLYGVIDTPCWKLHTSPLCTTNTKEGSNICLTRTDRGWYCDNAGSVSFFPQAETCKVQSNRVFCDTMNSLTLPSEVNLCNIDIFNPKYDCKIMTSKTDVSSSVITSLGAIVSCYGKTKCTASNKNRGIIKTFSNGCDYVSNKGVDTVSVGNTLYYVNKQEGKSLYVKGEPIINFYDPLVFPSDEFDASISQVNEKINQSLAFIRKSDELLHNVNAGKSTTNIMITTIIIVIIVILLALIAVGLLLYCKARSTPVTLSKDQLSGINNIAFSN

SEQ ID NO: 8337 - protein, 574 aa, Artificial Sequence
  derived and/or modified protein sequence (wt) from HRSV__AVQ93377.1__F0
MELPILKTNAITTILAAVTLCFASSQNITEEFYQSTCSAVSKGYLSALRTGWYTSVITIELSNIKENKCNGTDAKVKLIKQELDKYKNAVTELQLLMQSTPAANSRARRELPRFMNYTLNNTKNTNVTLSKKRKRRFLGFLLGVGSAIASGIAVSKVLHLEGEVNKIKSALLSTNKAVVSLSNGVSVLTSKVLDLKNYIDKQLLPIVNKQSCSISNIETVIEFQQKNNRLLEITREFSVNAGVTTPVSTYMLTNSELLSLINDMPITNDQKKLMSSNVQIVRQQSYSIMSIIKEEVLAYVVQLPLYGVIDTPCWKLHTSPLCTTNTKEGSNICLTRTDRGWYCDNAGSVSFFPQAETCKVQSNRVFCDTMNSLTLPSEVNLCNIDIFNPKYDCKIMTSKTDVSSSVITSLGAIVSCYGKTKCTASNKNRGIIKTFSNGCDYVSNKGVDTVSVGNTLYYVNKQEGKSLYVKGEPIINFYDPLVFPSDEFDASISQVNEKINQSLAFIRKSDELLHNVNAGKSTTNIMITTIIIVIIVILLALIAVGLFLYCKARSTPVTLSKDQLSGINNIAFSN

SEQ ID NO: 8338 - protein, 574 aa, Artificial Sequence
  derived and/or modified protein sequence (wt) from HRSV__AVQ93412.1__F0
MELPILKTNAITIILAAVTLCFASSQNITEEFYQSTCSAVSKGYLSALRTGWYTSVITIELSNIKENKCNGTDAKVKLIKQELDKYKNAVTELQLLMQSTPAANSRARRELPRFMNYTLNNTKNTSVTLSKKRKRRFLGFLLGVGSAIASGIAVSKVLHLEGEVNKIKSALLSTNKAVVSLSNGVSVLTSKVLDLKNYIDKQLLPIVNKQSCSISNIETVIEFQQKNNRLLEITREFSVNAGVTTPVSTYMLTNSELLSLINDMPITNDQKKLMSSNVQIVRQQSYSIMSIIKEEVLAYVVQLPLYGVIDTPCWKLHTSPLCTTNTKEGSNICLTRTDRGWYCDNAGSVSFFPQAETCKVQSNRVFCDTMNSLTLPSEVNLCNINIFNPKYDCKIMTSKTDVSSSVITSLGAIVSCYGKTKCTASNKNRGIIKTFSNGCDYVSNKGVDTVSVGNTLYYVNKQEGKSLYVKGEPIINFYDPLVFPSDEFDASISQVNEKINQSLAFIRKSDELLHNVNAGKSTTNIMITTIIIVIIVILLALIAVGLLLYCKARSTPVTLSKDQLSGINNIAFSN

SEQ ID NO: 8339 - protein, 574 aa, Artificial Sequence
  derived and/or modified protein sequence (wt) from HRSV__AVQ93391.1__F0
MELPILKTNAITTILAAVTLCFASSQNITEEFYQSTCSAVSKGYLSALRTGWYTSVITIELSNIKENKCNGTDAKVKLIKQELDKYKNAVTELQLLMQSTPAANSRARRELPRFMNYTLNNAKNTNVTLSKKRKRRFLGFLLGVGSAIASGIAVSKVLHLEGEVNKIKSALLSTNKAVVSLSNGVSVLTSKVLDLKNYIDKQLLPIVNKQSCSISNIETVIEFQQKNNRLLEITREFSVNAGVTTPVSTYMLTNSELLSLINDMPITNDQKKLMSSNVQIVRQQSYSIMSIIKEEVLAYVVQLPLYGVIDTPCWKLHTSPLCTTNTKEGSNICLTRTDRGWYCDNAGSVSFFPQAETCKVQSNRVFCDTMNSLTLPSEVNLCNIDIFNPKYDCKIMTSKTDVSSSVITSLGAIVSCYGKTKCTASNKNRGIIKTFSNGCDYVSNKGVDTVSVGNTLYYVNKQEGKSLYVKGEPIINFYDPLVFPSDEFDASISQVNEKINQSLAFIRKSDELLHNVNAGKSTTNIMITTIIIVIIVILLALIAVGLLLYCKARSTPVSLSKDQLSGINNIAFSN

SEQ ID NO: 8340 - protein, 574 aa, Artificial Sequence
  derived and/or modified protein sequence (wt) from HRSV__AVQ93457.1__F0
MELPILKTNAITTILAAVTLCIASSQNITEEFYQSTCSAVSKGYLSALRTGWYTSVITIELSNIKENKCNGTDAKVKLIKQELDKYKNAVTELQLLMQSTPAANNRARRELPRFMNYTLNNTKNTNVTLSKKRKRRFLGFLLGVGSAIASGIAVSKVLHLEGEVNKIKSALLSTNKAVVSLSNGVSVLTSKVLDLKNYIDKQLLPIVNKQSCSISNIETVIEFQQKNNRLLEITREFSVNAGVTTPVSTYMLTNSELLSLINDMPITNDQKKLMSSNVQIVRQQSYSIMSIIKEEVLAYVVQLPLYGVIDTPCWKLHTSPLCTTNTKEGSNICLTRTDRGWYCDNAGSVSFFPQAETCKVQSNRVFCDTMNSLTLPSEVNLCNIDIFNPKYDCKIMTSKTDVSSSVITSLGAIVSCYGKTKCTASNKNRGIIKTFSNGCDYVSNKGVDTVSVGNTLYYVNKQEGKSLYVKGEPIINFYDPLVFPSDEFDASISQVNEKINQSLAFIRKSDELLHNVNAGKSTTNIMITTIIIVIIVILLALIAVGLLLYCKARSTPVTLSKDQLSGINNIAFSN

SEQ ID NO: 8341 - protein, 574 aa, Artificial Sequence
  derived and/or modified protein sequence (wt) from HRSV__AVQ93372.1__F0
MELPILKTNAITTILAAVTLCFASSQNITEEFYQSTCSAVSKGYLSALRTGWYTSVITIELSNIKENKCNGTDAKVKLIKQELDKYKNAVTELQLLMQSTPAANSRARRELPRFMNYTLNNTKNTNVTLSKKRKRRFLGFLLGVGSAIASGIAVSKVLHLEGEVNKIKSALLSTNKAVVSLSNGVSVLTSKVLDLKNYIDKQLLPIVNKQSCSISNIETVIEFQQKNNRLLEITREFSVNAGVTTPVSTYMLTNSELLSLINDMPITNDQKKLMSSNVQIVRQQSYSIMSIIKEEVLAYVVQLPLYGVIDTPCWKLHTSPLCTTNTKEGSNICLTRTDRGWYCDNAGSVSFFPQAETCKVQSNRVFCDTMNSLTLPSEVNLCNIDIFNPKYDCKIMTSKTDVSSSVITSLGAIVSCYGKTKCTASNKNRGIIKTFSNGCDYVSNKGVDTVSVGNTLYYVNKQEGKSLYVKGEPIINFYNPLVFPSDEFDASISQVNEKINQSLAFIRKSDELLHNVNAGKSTTNIMITTIIIVIIVILLALIAVGLLLYCKARSTPVTLSKDQLSGINNIAFSN

SEQ ID NO: 8342 - protein, 574 aa, Artificial Sequence
  derived and/or modified protein sequence (wt) from HRSV__AVQ93455.1__F0
MELPIFKTNAITTILAAVTLCFASSQNITEEFYQSTCSAVSKGYLSALRTGWYTSVITIELSNIKENKCNGTDTKVKLIKQELDKYKNAVTELQLLMQSTPAANSRARRELPRFMNYTLNNAKNTNVTLSKKRKRRFLGFLLGVGSAIASGIAVSKVLHLEGEVNKIKSALLSTNKAVVSLSNGVSVLTSKVLDLKNYIDKQLLPIVNKQSCSISNIETVIEFQQKNNRLLEITREFSVNAGVTTPVSTYMLTNSELLSLINDMPITNDQKKLMSSNVQIVRQQSYSIMSIIKEEVLAYVVQLPLYGVIDTPCWKLHTSPLCTTNTKEGSNICLTRTDRGWYCDNAGSVSFFPQAETCKVQSNRVFCDTMNSLTLPSEVNLCNIDIFNPKYDCKIMTSKTDVSSSVITSLGAIVSCYGKTKCTASNKNRGIIKTFSNGCDYVSNKGVDTVSVGNTLYYVNKQEGKSLYVKGEPIINFYDPLVFPSDEFDASISQVNEKINQSLAFIRKSDELLHNVNAGKSTTNIMITTIIIVIIVILLALIAVGLLLYCKARSTPVTLSKDQLSGINNIAFSN

SEQ ID NO: 8343 - protein, 574 aa, Artificial Sequence
  derived and/or modified protein sequence (wt) from HRSV__AVQ93364.1__F0
MELPILKTNAITTILAVVTLCFASSQNITEEFYQSTCSAVSKGYLSALRTGWYTSVITIELSNIKENKCNGTDAKVKLIKQELDKYKNAVTELQLLMQSTPAANSRARRELPRFMNYTLNNTKNTNVTLSKKRKRRFLGFLLGVGSAIASGIAVSKVLHLEGEVNKIKSALLSTNKAVVSLSNGVSVLTSKVLDLKNYIDKQLLPIVNKQSCSISNIETVIEFQQKNNRLLEITREFSVNAGVTTPVSTYMLTNSELLSLINDMPITNDQKKLMSSNVQIIRQQSYSIMSIIKEEVLAYVVQLPLYGVIDTPCWKLHTSPLCTTNTKEGSNICLTRTDRGWYCDNAGSVSFFPQAETCKVQSNRVFCDTMNSLTLPSEVNLCNIDIFNPKYDCKIMTSKTDVSSSVITSLGAIVSCYGKTKCTASNKNRGIIKTFSNGCDYVSNKGVDTVSVGNTLYYVNKQEGKSLYVKGEPIINFYDPLVFPSDEFDASISQVNEKINQSLAFIRKSDELLHNVNAGKSTTNIMITTIIIVIIVILLALIAVGLLLYCKARSTPVTLSKDQLSGINNIAFSN

SEQ ID NO: 8344 - protein, 574 aa, Artificial Sequence
  derived and/or modified protein sequence (wt) from HRSV__AVQ93378.1__F0
MQLPILKIYAITSILAAVTLYFASSQNITEEFYQSTCSAVSKGYLSALRTGWYTSVITIELSNIKENKCNGTDAKVKLIKQELDKYKNAVTELQLLMQSTPAANSRARRELPRFMNYTLNNTKNTNVTLSKKRKRRFLGFLLGVGSAIASGIAVSKVLHLEGEVNKIKSALLSTNKAVVSLSNGVSVLTSKVLDLKNYIDKQLLPIVNKQSCSISNIETVIEFQQKNNRLLEITREFSVNAGVTTPVSTYMLTNSELLSLINDMPITNDQKKLMSSNVQIVRQQSYSIMSIIKEEVLAYVVQLPLYGVIDTPCWKLHTSPLCTTNTKEGSNICLTRTDRGWYCDNAGSVSFFPQAETCKVQSNRVFCDTMNSLTLPSEVNLCNIDIFNPKYDCKIMTSKTDVSSSVITSLGAIVSCYGKTKCTASNKNRGIIKTFSNGCDYVSNKGVDTVSVGNTLYYVNKQEGKSLYVKGEPIINFYDPLVFPSDEFDASISQVNEKINQSLAFIRKSDELLHNVNAGKSTTNIMITTIIIVIIVILLALIAVGLLLYCKARSTPVTLSKDQLSGINNIAFSN

SEQ ID NO: 8345 - protein, 574 aa, Artificial Sequence
  derived and/or modified protein sequence (wt) from HRSV__AVQ93393.1__F0
MELPILKTNAITTILAAVTLCFASSQNITEEFYQSTCSAVSKGYLSALRTGWYTSVITIELSNIKENKCNGTDAKVKLIKQELDKYKNAVTELQLLMQSTPAANSRARRELPRFMNYTLNNAKNTNVTLSKKRKRRFLGFLLGVGSAIASGIAVSKVLHLEGEVNKIKSALLSTNKAVVSLSNGVSVLTSKVLDLKNYIDKQLLPIVNKQSCSISNIETVIEFQQKNNRLLEITREFSVNAGVTTPVSTYMLTNSELLSLINDMPITNDQKKLMSSNVQIVRQQSYSIMSIIKEEVLAYVVQLPLYGVIDTPCWKLHTSPLCTTNTKEGSNICLTRTDRGWYCDNAGSVSFFPQAETCKVQSNRVFCDTMNSLTLPSEVNLCNIDIFNPKYDCKIMTSKTDVSSSVITSLGAIVSCYGKTKCTASNKNRGIIKTFSNGCDYVSNKGVDTVSVGNTLYYVNKQEGKSLYVKGKPIINFYDPLVFPSDEFDASISQVNEKINQSLAFIRKSDELLHNVNAGKSTTNIMITTIIIVIIVILLALIAVGLLLYCKARSTPVTLSKDQLSGINNIAFSN

SEQ ID NO: 8346 - protein, 574 aa, Artificial Sequence
  derived and/or modified protein sequence (wt) from HRSV__AVQ93362.1__F0
MELPILKTNAITTILAAVTLCFASSQNITEEFYQSTCSAVSKGYLSALRTGWYTSVITIELSNIKENKCNGTDAKVKLIKQELDKYKNAVTELQLLMQSTPAANSRARRELPRFMNYTLNNTKNTNVTLSKKRKRRFLGFLLGVGSAIASGIAVSKVLHLEGEVNKIKSALLSTNKAVVSLSNGVSVLTSKVLDLKNYIDKQLLPIVNKQSCSISNIETVIEFQQKNNRLLEITREFSVNAGVTTPVSTYMLTNSELLSLINDMPITNDQKKLMSSNVQIVRQQSYSIMSIIKEEVLAYVVQLPLYGVIDTPCWKLHTSPLCTTNTKEGSNICLTRTDRGWYCDNAGSVSFFPQAETCKVQLNRVFCDTMNSLTLPSEVNLCNIDIFNPKYDCKIMTSKTDVSSSVITSLGAIVSCYGKTKCTASNKNRGIIKTFSNGCDYVSNKGVDTVSVGNTLYYVNKQEGKSLYVKGEPIINFYDPLVFPSDEFDASISQVNEKINQSLAFIRKSDELLHNVNAGKSTTNIMITTIIIVIIVILLALIAVGLLLYCKARSTPVTLSKDQLSGINNIAFSN

SEQ ID NO: 8347 - protein, 574 aa, Artificial Sequence
  derived and/or modified protein sequence (wt) from HRSV__AVQ93585.1__F0
MELLIHRSSAIFLTLVINALYLTSSQNITEEFYQSTCSAVSRGYLSALRTGWYTSVITIELSNIKETKCNGTDTKVKLIKQELDKYKNAVTELQLLMQNTPAVNNRARREAPQYMNYTINTTKNLNVSISKKRKRRFLGFLLGVGSAIASGIAVSKVLHLEGEVNKIKNALQLTNKAVVSLSNGVSVLTSKVLDLKNYINNQLLPIVNQQSCRISNIETVIEFQQKNSRLLEITREFSVNAGVTTPLSTYMLTNSELLSLINDMPITNDQKKLMSSNVQIVRQQSYSIMSIIKEEVLAYVVQLPIYGVIDTPCWKLHTSPLCTTNIKEGSNICLTRTDRGWYCDNAGSVSFFPQADTCKVQSNRVFCDTMNSLTLPSEVSLCNTDIFNSKYDCKIMTSKTDISSSVITSLGAIVSCYGKTKCTASNKNRGIIKTFSNGCDYVSNKGVDTVSVGNTLYYVNKLEGKNLYVKGEPIINYYDPLVFPSDEFDASISQVNEKINQSLAFIRRSDELLHNVNTGKSTTNIMITAIIIVIIVVLLSLIAIGLLLYCKAKNTPVTLSKDQLSGINNIAFSK

SEQ ID NO: 8348 - protein, 574 aa, Artificial Sequence
  derived and/or modified protein sequence (wt) from HRSV__ART28504.1__F0
MELPILKTNAITTILAAVTLCFASSQNITEEFYQSTCSAVSKGYLSALRTGWYTSVITIELSNIKENKCNGTDAKVKLIKQELDKYKNAVTELQLLMQSTPATNSRARRELPRFMNYTLNNTKNTNVTLSKKRKRRFLGFLLGVGSAIASGIAVSKVLHLEGEVNKIKSALLSTNKAVVSLSNGVSVLTSKVLDLKNYIDKQLLPIVNKQSCSISNIETVIEFQQKNNRLLEITREFSVNAGVTTPVSTYMLTNSELLSLINDMPITNDQKKLMSSNVQIVRQQSYSIMSIIKEEVLAYVVQLPLYGVIDTPCWKLHTSPLCTTNTKEGSNICLTRTDRGWYCDNAGSVSFFPQAETCKVQSNRVFCDTMNSLTLPSEVNLCNIDIFNPKYDCKIMTSKTDVSSSVITSLGAIVSCYGKTKCTASNKNRGIIKTFSNGCDYVSNKGVDTVSVGNTLYYVNKQEGKSLYVKGEPIINFYDPLVFPSDEFDASISQVNEKINQSLAFIRKSDELLHNVNAGKSTTNIMITTIIIVIIVILLALIAVGLLLYCKARSTPVTLSKDQLSGINNIAFSN

SEQ ID NO: 8349 - protein, 574 aa, Artificial Sequence
  derived and/or modified protein sequence (wt) from HRSV__AVQ93404.1__F0
MELPISKTNAITTILAAITLCFASSQNITEEFYQSTCSAVSKGYLSALRTGWYTSVITIELSNIKENKCNGTDAKVKLIKQELDKYKNAVTELQLLMQSTPAANSRARRELPRFMNYTLNNTKNTNVTLSKKRKRRFLGFLLGVGSAIASGIAVSKVLHLEGEVNKIKSALLSTNKAVVSLSNGVSVLTSKVLDLKNYIDKQLLPIVNKQSCSISNIETVIEFQQKNNRLLEITREFSVNAGVTTPVSTYMLTNSELLSLINDMPITNDQKKLMSSNVQIVRQQSYSIMSIIKEEVLAYVVQLPLYGVIDTPCWKLHTSPLCTTNTKEGSNICLTRTDRGWYCDNAGSVSFFPQAETCKVQSNRVFCDTMNSLTLPSEVNLCNIDIFNPKYDCKIMTSKTDVSSSVITSLGAIVSCYGKTKCTASNKNRGIIKTFSNGCDYVSNKGVDTVSVGNTLYYVNKQEGKSLYVKGEPIINFYDPLVFPSDEFDASISQVNEKINQSLAFIRKSDELLHNVNAGKSTTNIMITTIIIVIIVILLALIAVGLLLYCKARSTPVTLSKDQLSGINNIAFSN

SEQ ID NO: 8350 - protein, 574 aa, Artificial Sequence
  derived and/or modified protein sequence (wt) from HRSV__AOS49123.1__F0
MELPILKTNTITTILAAVTLCFASSQNITEEFYQSTCSAVSKGYLSALRTGWYTSVITIELSNIKENKCNGTDAKVKLIKQELDKYKNAVTELQLLMQSTPAANSRARRELPRFMNYTLNNTKNTNVTLSKKRKRRFLGFLLGVGSAIASGIAVSKVLHLEGEVNKIKSALLSTNKAVVSLSNGVSVLTSKVLDLKNYIDKQLLPIVNKQSCSISNIETVIEFQQKNNRLLEITREFSVNAGVTTPVSTYMLTNSELLSLINDMPITNDQKKLMSSNVQIVRQQSYSIMSIIKEEVLAYVVQLPLYGVIDTPCWKLHTSPLCTTNTKEGSNICLTRTDRGWYCDNAGSVSFFPQAETCKVQSNRVFCDTMNSLTLPSEVNLCNIDIFNPKYDCKIMTSKTDVSSSVITSLGAIVSCYGKTKCTASNKNRGIIKTFSNGCDYVSNKGVDTVSVGNTLYYVNKQEGKSLYVKGEPIINFYDPLVFPSDEFDASISQVNEKINQSLAFIRKSDELLHNVNAGKSTTNIMITTIIIVIIVILLALIAVGLLLYCKARSTPVTLSKDQLSGINNIAFSN

SEQ ID NO: 8351 - protein, 574 aa, Artificial Sequence
  derived and/or modified protein sequence (wt) from HRSV__AGN92837.1__F0
MELPILKTNAITTILAAVTLCFASSQNITEEFYQSTCSAVSKGYLSALRTGWYTSVITIELSNIKENKCNGTDAKVKLIKQELDKYKNAVTELQLLMQSTPAANSRARRELPRFMNYTLNNAKNTNVTLSKKRKRRFLGFLLGVGSAIASGIAVSKVLHLEGEVNKIKSALLSTNKAVVSLSNGVSVLTSKVLDLKNYIDKQLLPIVNKQSCSISNIETVIEFQQKNNRLLEITREFSVNAGVTTPVSTYMLTNSELLSLINDMPITNDQKKLMSSNVQIVRQQSYSIMSIIKEEVLAYVVQLPLYGVIDTPCWKLHTSPLCTTNTKEGSNICLTRTDRGWYCDNAGSVSFFPQAETCKVQSNRVFCDTMNSLTLPSEVNLCNIDIFNPKYDCKIMTSKTDVSSSVITSLGAIVSCYGKTKCTASNKNRGIIKTFSNGCDYVSNKGVDTVSVGNTLYYVNKQEGKSLYVKGEPIINFYDPLVFPSDEFDASISQVNEKINQSLAFIRKSDELLHNVNAGKSTTNIMITTIIIVIIVILLALIAVGLLLYCKARSTPVTLSKDQLSGINNIAFSN

SEQ ID NO: 8352 - protein, 574 aa, Artificial Sequence
  derived and/or modified protein sequence (wt) from HRSV__AOS48496.1__F0
MELPILKTNAITTILAAVTLCFASSQNITEEFYQSTCSAVSKGYLSALRTGWYTSVITIELSNIKENKCNGTDAKVKLIKQELDKYKNAVTELQLLMQSTPAANSRARRELPRFMNYTLNNTKNTNVTLSKKRKRRFLGFLLGVGSAIASGIAVSKVLHLEGEVNKIKSALLSTNKAVVSLSNGVSVLTSKVLDLKNYIDKQLLPIVNKQSCSISNIETVIEFQQKNNRLLEITREFSVNAGVTTPVSTYMLTNSELLSLINDMPITNDQKKLMSSNVQIVRQQSYSIMSIIKEEVLAYVVQLPLYGVIDTPCWKLHTSPLCTTNTKEGSNICLTRTDRGWYCDNAGSVSFFPQAETCKVQSNRVFCDTMNSLTLPNEVNLCNIDIFNPKYDCKIMTSKTDVSSSVITSLGAIVSCYGKTKCTASNKNRGIIKTFSNGCDYVSNKGVDTVSVGNTLYYVNKQEGKSLYVKGEPIINFYDPLVFPSDEFDASISQVNEKINQSLAFIRKSDELLHNVNAGKSTTNIMITTIIIVIIVILLALIAVGLLLYCKARSTPVTLSKDQLSGINNIAFSN

SEQ ID NO: 8353 - protein, 574 aa, Artificial Sequence
  derived and/or modified protein sequence (wt) from HRSV__AMT78271.1__F0
MELPILKTNAITTILAAVTFCFASSQNITEEFYQSTCSAVSKGYLSALRTGWYTSVITIELSNIKENKCNGTDAKVKLIKQELDKYKNAVTELQLLMQSTPAANSRARRELPRFMNYTLNNTKNTNVTLSKKRKRRFLGFLLGVGSAIASGIAVSKVLHLEGEVNKIKSALLSTNKAVVSLSNGVSVLTSKVLDLKNYIDKQLLPIVNKQSCSISNIETVIEFQQKNNRLLEITREFSVNAGVTTPVSTYMLTNSELLSLINDMPITNDQKKLMSSNVQIVRQQSYSIMSIIKEEVLAYVVQLPLYGVIDTPCWKLHTSPLCTTNTKEGSNICLTRTDRGWYCDNAGSVSFFPQAETCKVQSNRVFCDTMNSLTLPSEVNLCNIDIFNPKYDCKIMTSKTDVSSSVITSLGAIVSCYGKTKCTASNKNRGIIKTFSNGCDYVSNKGVDTVSVGNTLYYVNKQEGKSLYVKGEPIINFYDPLVFPSDEFDASISQVNEKINQSLAFIRKSDELLHNVNAGKSTTNIMITTIIIVIIVILLALIAVGLLLYCKARSTPVTLSKDQLSGINNIAFSN

SEQ ID NO: 8354 - protein, 574 aa, Artificial Sequence
  derived and/or modified protein sequence (wt) from HRSV__AIY62428.1__F0
MELLIHRSSAIFLTLAINALYLTSSQNITEEFYQSTCSAVSRGYLSALRTGWYTSVITIELSNIKETKCNGTDTKVKLIKQELDKYKNAVTELQLLMQNTPAVNNRARREAPQYMNYTINTTKNLNVSISKKRKRRFLGFLLGVGSAIASGIAVSKVLHLEGEVNKIKNALQLTNKAVVSLSNGVSVLTSKVLDLKNYINNQLLPIVNQQSCRISNIETVIEFQQKNSRLLEITREFSVNAGVTTPLSTYMLTNSELLSLINDMPITNDQKKLMSSNVQIVRQQSYSIMSIIKEEVLAYVVQLPIYGVIDTPCWKLHTSPLCTTNIKEGSNICLTRTDRGWYCDNAGSVSFFPQADTCKVQSNRVFCDTMNSLTLPSEVSLCNTDIFNSKYDCKIMTSKTDISSSVITSLGAIVSCYGKTKCTASNKNRGIIKTFSNGCDYVSNKGVDTVSVGNTLYYVNKLEGKNLYVKGEPIINYYDPLVFPSDEFDASISQVNEKINQSLAFIRRSDELLHNVNTGKSTTNIMITAIIIVIIVVLLSLIAIGLLLYCKAKNTPVTLSKDQLSGINNIAFSK

SEQ ID NO: 8355 - protein, 574 aa, Artificial Sequence
  derived and/or modified protein sequence (wt) from HRSV__AHX57174.1__F0
MELPILKTNAITTILAAVTLCFASSQNITEEFYQSTCSAVSKGYLSALRTGWYTSVITIELSNIKENKCNGTDAKVKLIKQELDKYKNAVTELQLLMQSTPAANSRARRELPRFMNYTLNNTKNTNVTLSKKRKRRFLGFLLGVGSAIASGIAVSKVLHLEGEVNKIKSALLSTNKAVVSLSNGVSVLTSKVLDLKNYIDKQLLPIVNKQSCSISNIETVIEFQQKNNRLLEITREFSVNAGVTTPVSTYMLTNSELLSLINDMPITNDQKKLMSSNVQIVRQQSYSIMSIIKEEVLAYVVQLPLYGVIDTPCWKLHTSPLCTTNTKEGSNICLTRTDRGWYCDNAGSVSFFPQAETCKVQSNRVFCDTMNSLTLPSEVNLCNIDIFNPKYDCKIMTSKTDVSSSVITSLGAIVSCYGKTKCTASNKNRGIIKTFSNGCDYVSNKGVDTVSVGNTLYYVNKQEGKSLYVKGKPIINFYDPLVFPSDEFDASISQVNEKINQSLAFIRKSDELLHNVNAGKSTTNIMITTIIIVIIVILLALIAVGLLLYCKARSTPVTLSKDQLSGINNIAFSN

SEQ ID NO: 8356 - protein, 574 aa, Artificial Sequence
  derived and/or modified protein sequence (wt) from HRSV__AHW81390.1__F0
MELPIFKTNAITTILAAVTLCFASSQNITEEFYQSTCSAVSKGYLSALRTGWYTSVITIELSNIKENKCNGTDAKVKLIKQELDKYKNAVTELQLLMQSTPAANSRARRELPRFMNYTLNNTKNTNVTLSKKRKRRFLGFLLGVGSAIASGIAVSKVLHLEGEVNKIKSALLSTNKAVVSLSNGVSVLTSKVLDLKNYIDKQLLPIVNKQSCSISNIETVIEFQQKNNRLLEITREFSVNAGVTTPVSTYMLTNSELLSLINDMPITNDQKKLMSSNVQIVRQQSYSIMSIIKEEVLAYVVQLPLYGVIDTPCWKLHTSPLCTTNTKEGSNICLTRTDRGWYCDNAGSVSFFPQAETCKVQSNRVFCDTMNSLTLPSEVNLCNIDIFNPKYDCKIMTSKTDVSSSVITSLGAIVSCYGKTKCTASNKNRGIIKTFSNGCDYVSNKGVDTVSVGNTLYYVNKQEGKSLYVKGEPIINFYDPLVFPSDEFDASISQVNEKINQSLAFIRKSDELLHNVNAGKSTTNIMITTIIIVIIVILLALIAVGLLLYCKARSTPVTLSKDQLSGINNIAFSN

SEQ ID NO: 8357 - protein, 574 aa, Artificial Sequence
  derived and/or modified protein sequence (wt) from HRSV__AHV81506.1__F0
MELPILKTNAIITILAAVTLCFASSQNITEEFYQSTCSAVSKGYLSALRTGWYTSVITIELSNIKENKCNGTDAKVKLIKQELDKYKNAVTELQLLMQSTPAANSRARRELPRFMNYTLNNTKNTNVTLSKKRKRRFLGFLLGVGSAIASGIAVSKVLHLEGEVNKIKSALLSTNKAVVSLSNGVSVLTSKVLDLKNYIDKQLLPIVNKQSCSISNIETVIEFQQKNNRLLEITREFSVNAGVTTPVSTYMLTNSELLSLINDMPITNDQKKLMSSNVQIVRQQSYSIMSIIKEEVLAYVVQLPLYGVIDTPCWKLHTSPLCTTNTKEGSNICLTRTDRGWYCDNAGSVSFFPQAETCKVQSNRVFCDTMNSLTLPSEVNLCNIDIFNPKYDCKIMTSKTDVSSSVITSLGAIVSCYGKTKCTASNKNRGIIKTFSNGCDYVSNKGVDTVSVGNTLYYVNKQEGKSLYVKGEPIINFYDPLVFPSDEFDASISQVNEKINQSLAFIRKSDELLHNVNAGKSTTNIMITTIIIVIIVILLALIAVGLLLYCKARSTPVTLSKDQLSGINNIAFSN

SEQ ID NO: 8358 - protein, 574 aa, Artificial Sequence
  derived and/or modified protein sequence (wt) from HRSV__AFX60128.1__F0
MELPILKTNAITTILAAVTLCFTSSQNITEEFYQSTCSAVSKGYLSALRTGWYTSVITIELSNIKENKCNGTDAKVKLIKQELDKYKNAVTELQLLMQSTPAANSRARRELPRFMNYTLNNTKNTNVTLSKKRKRRFLGFLLGVGSAIASGIAVSKVLHLEGEVNKIKSALLSTNKAVVSLSNGVSVLTSKVLDLKNYIDKQLLPIVNKQSCSISNIETVIEFQQKNNRLLEITREFSVNAGVTTPVSTYMLTNSELLSLINDMPITNDQKKLMSSNVQIVRQQSYSIMSIIKEEVLAYVVQLPLYGVIDTPCWKLHTSPLCTTNTKEGSNICLTRTDRGWYCDNAGSVSFFPQAETCKVQSNRVFCDTMNSLTLPSEVNLCNIDIFNPKYDCKIMTSKTDVSSSVITSLGAIVSCYGKTKCTASNKNRGIIKTFSNGCDYVSNKGVDTVSVGNTLYYVNKQEGKSLYVKGEPIINFYDPLVFPSDEFDASISQVNEKINQSLAFIRKSDELLHNVNAGKSTTNIMITTIIIVIIVILLALIAVGLLLYCKARSTPVTLSKDQLSGINNIAFSN

SEQ ID NO: 8359 - protein, 574 aa, Artificial Sequence
  derived and/or modified protein sequence (wt) from HRSV__AFX60129.1__F0
MELPILKTNAITTILAAVTLCFASSQNITEEFYQSTCSAVSKGYLSALRTGWYTSVITIELSNIKENKCNGTDAKVKLIKQELDKYKNAVTELQLLMQSTPAANSRARRELPRFMNYTLNNTKNTNITLSKKRKRRFLGFLLGVGSAIASGIAVSKVLHLEGEVNKIKSALLSTNKAVVSLSNGVSVLTSKVLDLKNYIDKQLLPIVNKQSCSISNIETVIEFQQKNNRLLEITREFSVNAGVTTPVSTYMLTNSELLSLINDMPITNDQKKLMSSNVQIVRQQSYSIMSIIKEEVLAYVVQLPLYGVIDTPCWKLHTSPLCTTNTKEGSNICLTRTDRGWYCDNAGSVSFFPQAETCKVQSNRVFCDTMNSLTLPSEVNLCNIDIFNPKYDCKIMTSKTDVSSSVITSLGAIVSCYGKTKCTASNKNRGIIKTFSNGCDYVSNKGVDTVSVGNTLYYVNKQEGKSLYVKGEPIINFYDPLVFPSDEFDASISQVNEKINQSLAFIRKSDELLHNVNAGKSTTNIMITTIIIVIIVILLALIAVGLLLYCKARSTPVTLSKDQLSGINNIAFSN

SEQ ID NO: 8360 - protein, 574 aa, Artificial Sequence
  derived and/or modified protein sequence (wt) from HRSV__AEQ63389.1__F0
MELPILKTNAITTILAAVTLCFASSQNITEEFYQSTCSAVSKGYLSALRTGWYTSVITIELSNIKENKCNGTDAKVKLIKQELDKYKNAVTELQLLMQSTPAANSRARRELPRFMNYTLNNTKNTNVTLSKKRKRRFLGFLLGVGSAIASGIAVSKVLHLEGEVNKIKSALLSTNKAVVSLSNGVSVLTSKVLDLKNYIDKQLLPIVNKQSCSISNIETVIEFQQKNNRLLEITREFSVNAGVTTPVSTYMLTNSELLSLINDMPITNDQKKLMSSNVQIVRQQSYSIMSIIKEEVLAYVVQLPLYGVIDTPCWKLHTSPLCTTNTKEGSNICLTRTDRGWYCDNAGSVSFFPQAETCKVQSNRVFCDTMNSLTLPSEVNLCNIDIFNPKYDCKIMTSKTDVSSSVITSLGAIVSCYGKTKCTASNKNRGIIKTFSNGCDYVSNKGVDTVSVGNTLYYVNKQEGKSLYVKGEPIINFYDPLVFPSDEFDASISQVNEKINQSLAFIRKSDELLHNVNAGKSTTNIMITTIIIVIIVILLALIAVGLLLYCKARSTPVTLSKDQLSGINNIAFSN

SEQ ID NO: 8361 - protein, 574 aa, Artificial Sequence
  derived and/or modified protein sequence (wt) from HRSV__ARB66328.1__F0
MELPILKTNAITTILAAVTLCFASSQNITEEFYQSTCSAVSKGYLSALRTGWYTSVITIELSNIRENKCNGTDAKVKLIKQELDKYKNAVTELQLLMQSTPAASSRARRELPRFMNYTLNNTKNTNVTLSKKRKRRFLGFLLGVGSAIASGIAVSKVLHLEGEVNKIKSALLSTNKAVVSLSNGVSVLTSKVLDLKNYIDKQLLPIVNKQSCSISNIETVIEFQQKNNRLLEITREFSVNAGVTTPVSTYMLTNSELLSLINDMPITNDQKKLMSSNVQIVRQQSYSIMSIIKEEVLAYVVQLPLYGVIDTPCWKLHTSPLCTTNTKEGSNICLTRTDRGWYCDNAGSVSFFPQAETCKVQSNRVFCDTMNSLTLPSEVNLCNIDIFNPKYDCKIMTSKTDVSSSVITSLGAIVSCYGKTKCTASNKNRGIIKTFSNGCDYVSNKGVDTVSVGNTLYYVNKQEGKSLYVKGEPIINFYDPLVFPSDEFDTSISQVNEKINQSLAFIRKSDELLHNVNAGKSTTNIMITTIIIVIIVILLALIAVGLLLYCKAKSTPVTLSKDQLSGINNIAFSN

SEQ ID NO: 8362 - protein, 574 aa, Artificial Sequence
  derived and/or modified protein sequence (wt) from HRSV__ANZ80034.1__F0
MELPILKTNAITTILAAVTLCFASSQNITEEFYQSTCSAVSKGYLSALRTGWYTSVITIELSNIKENKCNGTDAKVKLIKQELDKYKNAVTELQLLMQSTPAASSRARRELPRFMNYTLNNTKNTNVTLSKKRKRRFLGFLLGVGSAIASGIAVSKVLHLEGEVNKIKSALLSTNKAVVSLSNGVSVLTSKVLDLKNYIDKQLLPIVNKQSCSISNIETVIEFQQKNNRLLEITREFSVNAGVTTPVSTYMLTNSELLSLINDMPITNDQKKLMSSNVQIVRQQSYSIMSIIKEEVLAYVVQLPLYGVIDTPCWKLHTSPLCTTNTKEGSNICLTRTDRGWYCDNAGSVSFFPQAETCKVQSNRVFCDTMNSLTLPSEVNLCNIDIFNPKYDCKIMTSKTDVSSSVITSLGAIVSCYGKTKCTASNKNRGIIKTFSNGCDYVSNKGVDTVSVGNTLYYVNKQEGKSLYVKGEPIINFYDPLVFPSDEFDASISQVNEKINQSLAFIRKSDELLHNVNAGKSTTNIMITTIIIVIIVILLALIAVGLLLYCKARSTPVTLSKDQLSGINNIAFSN

SEQ ID NO: 8363 - protein, 574 aa, Artificial Sequence
  derived and/or modified protein sequence (wt) from HRSV__AMN91253.1__F0
MELPILKTNAITTILAAVTLCFASSQNITEEFYQSTCSAVSKGYLSALRTGWYTSVITIELSNIKENKCNGTDAKVKLIKQELDKYKNAVTELQLLMQSTPAANNRARRELPRFMNYTLNNTKNTNVTLSKKRKRRFLGFLLGVGSAIASGIAVSKVLHLEGEVNKIKSALLSTNKAVVSLSNGVSVLTSKVLDLKNYIDKQLLPIVNKQSCSISNIETVIEFQQKNNRLLEITREFSVNAGVTTPVSTYMLTNSELLSLINDMPITNDQKKLMSSNVQIVRQQSYSIMSIIKEEVLAYVVQLPLYGVIDTPCWKLHTSPLCTTNTKEGSNICLTRTDRGWYCDNAGSVSFFPQAETCKVQSNRVFCDTMNSLTLPSEVNLCNIDIFNPKYDCKIMTSKTDVSSSVITSLGAIVSCYGKTKCTASNKNRGIIKTFSNGCDYVSNKGVDTVSVGNTLYYVNKQEGKSLYVKGEPIINFYDPLVFPSDEFDASISQVNEKINQSLAFIRKSDELLHNVNAGKSTTNIMITTIIIVIIVILLALIAVGLLLYCKARSTPVTLSKDQLSGINNIAFSN

SEQ ID NO: 8364 - protein, 574 aa, Artificial Sequence
  derived and/or modified protein sequence (wt) from HRSV__P03420.1__F0
MELLILKANAITTILTAVTFCFASGQNITEEFYQSTCSAVSKGYLSALRTGWYTSVITIELSNIKENKCNGTDAKVKLIKQELDKYKNAVTELQLLMQSTPPTNNRARRELPRFMNYTLNNAKKTNVTLSKKRKRRFLGFLLGVGSAIASGVAVSKVLHLEGEVNKIKSALLSTNKAVVSLSNGVSVLTSKVLDLKNYIDKQLLPIVNKQSCSISNIETVIEFQQKNNRLLEITREFSVNAGVTTPVSTYMLTNSELLSLINDMPITNDQKKLMSNNVQIVRQQSYSIMSIIKEEVLAYVVQLPLYGVIDTPCWKLHTSPLCTTNTKEGSNICLTRTDRGWYCDNAGSVSFFPQAETCKVQSNRVFCDTMNSLTLPSEINLCNVDIFNPKYDCKIMTSKTDVSSSVITSLGAIVSCYGKTKCTASNKNRGIIKTFSNGCDYVSNKGMDTVSVGNTLYYVNKQEGKSLYVKGEPIINFYDPLVFPSDEFDASISQVNEKINQSLAFIRKSDELLHNVNAGKSTTNIMITTIIIVIIVILLSLIAVGLLLYCKARSTPVTLSKDQLSGINNIAFSN

SEQ ID NO: 8365 - protein, 574 aa, Artificial Sequence
  derived and/or modified protein sequence (wt) from HRSV__AIO08046.1__F0
MELLILKANAITTILTAVTFCFASGQNITEEFYQSTCSAVSKGYLSALRTGWYTSVITIELSNIKKNKCNGTDAKVKLIKQELDKYKNAVTELQLLMQSTQATNNRARRELPRFMNYTLNNAKKTNVTLSKKRKRRFLGFLLGVGSAIASGVAVSKVLHLEGEVNKIKSALLSTNKAVVSLSNGVSVLTSKVLDLKNYIDKQLLPIVNKQSCSISNIETVIEFQQKNNRLLEITREFSVNAGVTTPVSTYMLTNSELLSLINDMPITNDQKKLMSNNVQIVRQQSYSIMSIIKEEVLAYVVQLPLYGVIDTPCWKLHTSPLCTTNTKEGSNICLTRTDRGWYCDNAGSVSFFPQAETCKVQSNRVFCDTMNSLTLPSEVNLCNVDIFNPKYDCKIMTSKTDVSSSVITSLGAIVSCYGKTKCTASNKNRGIIKTFSNGCDYVSNKGVDTVSVGNTLYYVNKQEGKSLYVKGEPIINFYDPLVFPSDEFDASISQVNEKINQSLAFIRKSDELLHNVNAGKSTTNIMITTIIIVIIVILLSLIAVGLLLYCKARSTPVTLSKDQLSGINNIAFSN

SEQ ID NO: 8366 - protein, 574 aa, Artificial Sequence
  derived and/or modified protein sequence (wt) from HRSV__AFX95851.1__F0
MELPILKTNAITTILAAVTLCFASSQNITEEFYQSTCSAVSKGYLSALRTGWYTSVITIELSNIKENKCNGTDAKVKLIKQELDKYKNAVTELQLLMQSTPAANSRARRELPRFMNYTLNNTKNTNVTLSKKRKRRFLGFLLGVGSAIASGIAVSKVLHLEGEVNKIKSALLSTNKAVVSLSNGVSVLTSKVLDLKNYIDKQLLPIVNKQSCSISNIETVIEFQQKNNRLLEITREFSVNAGVTTPVSTYMLTNSELLSLINDMPITNDQKKLMSSNVQIVRQQSYSIMSIIKEEVLAYVVQLPLYGVIDTPCWKLHTSPLCTTNTKEGSNICLTRTDRGWYCDNAGSVSFFPQAETCKVQSNRVFCDTMNSLTLPSEVNLCNIDIFNPKYDCKIMTSKTDVSSSVITSLGAIVSCYGKTKCTASNKNRGIIKTFSNGCDYVSNKGVDTVSVGNTLYYVNKQEGKSLYVKGEPIINFYDPLVFPSDEFDASISQVNEKINQSLAFIRKSDELLHNVNAGKSTTNIMITTIIIVIIVILLALIAVGLLLYCKARSTPVTLGKDQLSGINNIAFNN

SEQ ID NO: 8367 - protein, 574 aa, Artificial Sequence
  derived and/or modified protein sequence (wt) from HRSV__NP_056863.1__F0
MELLIHRLSAIFLTLAINALYLTSSQNITEEFYQSTCSAVSRGYFSALRTGWYTSVITIELSNIKETKCNGTDTKVKLIKQELDKYKNAVTELQLLMQNTPAANNRARREAPQYMNYTINTTKNLNVSISKKRKRRFLGFLLGVGSAIASGIAVSKVLHLEGEVNKIKNALLSTNKAVVSLSNGVSVLTSKVLDLKNYINNQLLPIVNQQSCRISNIETVIEFQQKNSRLLEINREFSVNAGVTTPLSTYMLTNSELLSLINDMPITNDQKKLMSSNVQIVRQQSYSIMSIIKEEVLAYVVQLPIYGVIDTPCWKLHTSPLCTTNIKEGSNICLTRTDRGWYCDNAGSVSFFPQADTCKVQSNRVFCDTMNSLTLPSEVSLCNTDIFNSKYDCKIMTSKTDISSSVITSLGAIVSCYGKTKCTASNKNRGIIKTFSNGCDYVSNKGVDTVSVGNTLYYVNKLEGKNLYVKGEPIINYYDPLVFPSDEFDASISQVNEKINQSLAFIRRSDELLHNVNTGKSTTNIMITTIIIVIIVVLLSLIAIGLLLYCKAKNTPVTLSKDQLSGINNIAFSK

SEQ ID NO: 8368 - protein, 574 aa, Artificial Sequence
  derived and/or modified protein sequence (wt) from HRSV__AFX60234.1__F0
MELLIHRSSAIFLTLAINALYLTSSQNITEEFYQSTCSAVSRGYLSALRTGWYTSVITIELSNIKETKCNGTDTKVKLIKQELDKYKNAVTELQLLMQNTPAVNNRARREAPQYMNYTINTTKNLNVSISKKRKRRFLGFLLGVGSAIASGIAVSKVLHLEGEVNKIKNALQSTNKAVVSLSNGVSVLTSKVLDLKNYINNQLLPIVNKQSCRISNIETVIEFQQKNSRLLEITREFSVNAGVTTPLSTYMLTNSELLSLINDMPITNDQKKLMSSNVQIVRQQSYSIMSIIKEEVLAYVVQLPIYGVIDTPCWKLHTSPLCTTNIKEGSNICLTRTDRGWYCDNAGSVSFFPQADTCKVQSNRVFCDTMNSLTLPSEVSLCNTDIFNSKYDCKIMTSKTDISSSVITSLGAIVSCYGKTKCTASNKNRGIIKTFSNGCDYVSNKGVDTVSVGNTLYYVNKLEGKNLYVKGEPIINYYDPLVFPSDEFDASISQVNEKINQSLAFIRRSDELLHNVNTGKSTTNIMITAIIIVIIVVLLSLIAIGLLLYCKAKNTPVTLSKDQLSGINNIAFSK

SEQ ID NO: 8369 - protein, 574 aa, Artificial Sequence
  derived and/or modified protein sequence (wt) from HRSV__AFX60231.1__F0
MELLIHRSSAIFLTLAINALYLTSSQNITEEFYQSTCSAVSRGYLSALRTGWYTSVITIELSNIKETKCNGTDTKVKLIKQELDKYKNAVTELQLLMQNTPAVNNRARREAPQYMNYTINTTRNLNVSISKKRKRRFLGFLLGVGSAIASGIAVSKVLHLEGEVNKIKNALQSTNKAVVSLSNGVSVLTSKVLDLKNYINNQLLPIVNQQSCRISNIETVIEFQQKNSRLLEITREFSVNAGVTTPLSTYMLTNSELLSLINDMPITNDQKKLMSSNVQIVRQQSYSIMSIIKEEVLAYVVQLPIYGVIDTPCWKLHTSPLCTTNIKEGSNICLTRTDRGWYCDNAGSVSFFPQADTCKVQSNRVFCDTMNSLTLPSEVSLCNTDIFNSKYDCKIMTSKTDISSSVITSLGAIVSCYGKTKCTASNKNRGIIKTFSNGCDYVSNKGVDTVSVGNTLYYVNKLEGKNLYVKGEPIINYYDPLVFPSDEFDASISQVNEKINQSLAFIRRSDELLHNVNTGKSTTNIMITAIIIVIIVVLLSLIAIGLLLYCKAKNTPVTLSKDQLSGINNIAFSK

SEQ ID NO: 8370 - protein, 574 aa, Artificial Sequence
  derived and/or modified protein sequence (wt) from HRSV__AFX60232.1__F0
MELLIYRSSAIFLTLAINALYLTSSQNITEEFYQSTCSAVSRGYLSALRTGWYTSVITIELSNIKETKCNGTDTKVKLIKQELDKYKNAVTELQLLMQNTPAVNNRARREAPQYMNYTINTTKNLNVSISKKRKRRFLGFLLGVGSAIASGIAVSKVLHLEGEVNKIKNALQSTNKAVVSLSNGVSVLTSKVLDLKNYINNQLLPIVNQQSCRISNIETVIEFQQKNSRLLEITREFSVNAGVTTPLSTYMLTNSELLSLINDMPITNDQKKLMSSNVQIVRQQSYSIMSIIKEEVLAYVVQLPIYGVIDTPCWKLHTSPLCTTNIKEGSNICLTRTDRGWYCDNAGSVSFFPQADTCKVQSNRVFCDTMNSLTLPSEVSLCNTDIFNSKYDCKIMTSKTDISSSVITSLGAIVSCYGKTKCTASNKNRGIIKTFSNGCDYVSNKGVDTVSVGNTLYYVNKLEGKNLYVKGEPIINYYDPLVFPSDEFDASISQVNEKINQSLAFIRRSDELLHNVNTGKSTTNIMITAIIIVIIVVLLSLIAIGLLLYCKAKNTPVTLSKDQLSGINNIAFSK

SEQ ID NO: 8371 - protein, 574 aa, Artificial Sequence
  derived and/or modified protein sequence (wt) from HRSV__AFX60222.1__F0
MELLIHRSSAIFLTLAINALYITSSQNITEEFYQSTCSAVSRGYLSALRTGWYTSVITIELSNIKETKCNGTDTKVKLIKQELDKYKNAVTELQLLMQNTPAVNNRARREAPQYMNYTINTTKNLNVSISKKRKRRFLGFLLGVGSAIASGIAVSKVLHLEGEVNKIKNALQSTNKAVVSLSNGVSVLTSKVLDLKNYINNQLLPIVNQQICRISNIETVIEFQQKNSRLLEITREFSVNAGVTTPLSTYMLTNSELLSLINDMPITNDQKKLMSSNVQIVRQQSYSIMSIIKEEVLAYVVQLPIYGVIDTPCWKLHTSPLCTTNIKEGSNICLTRTDRGWYCDNAGSVSFFPQADTCKVQSNRVFCDTMNSLTLPSEVSLCNTDIFNSKYDCKIMTSKTDISSSVITSLGAIVSCYGKTKCTASNKNRGIIKTFSNGCDYVSNKGVDTVSVGNTLYYVNKLEGKNLYVKGEPIINYYDPLVFPSDEFDASISQVNEKINQSLAFIRRSDELLHNVNTGKSTTNIMITAIIIVIIVVLLSLIAIGLLLYCKAKNTPVTLSKDQLSGINNIAFSK

SEQ ID NO: 8372 - protein, 574 aa, Artificial Sequence
  derived and/or modified protein sequence (wt) from HRSV__AFX60219.1__F0
MELLIHRSSAIFLTLAINALYLTSSQNITEEFYQSTCSAVSRGYLSALRTGWYTSVITIELSNIKETKCNGTDTKVKLIKQELDKYKNAVTELQLLMQNTPAANNRARREAPQYMNYTINTTKNPNVSISKKRKRRFLGFLLGVGSAIASGIAVSKVLHLEGEVNKIKNALLSTNKAVVSLSNGVSVLTSKVLDLKNYINNQLLPIVNQQSCRISNIETVIEFQQKNSRLLEITREFSVNAGVTTPLSTYMLTNSELLSLINDMPITNDQKKLMSSNVQIVRQQSYSIMSIIKEEVLAYVVQLPIYGVIDTPCWKLHTSPLCTTNIKEGSNICLTRTDRGWYCDNAGSVSFFPQADTCKVQSNRVFCDTMNSLTLPSEVSLCNTDIFNSKYDCKIMTSKTDISSSVITSLGAIVSCYGKTKCTASNKNRGIIKTFSNGCDYVSNKGVDTVSVGNTLYYVNKLEGKNLYVKGEPIINYYDPLVFPSDEFDASISQVNEKINQSLAFIRRSDELLHNVNTGKSTTNIIITAIIIVIIVVLLSLIAIGLLLYCKAKNTPVTLSKDQLSGINNIAFSK

SEQ ID NO: 8373 - protein, 574 aa, Artificial Sequence
  derived and/or modified protein sequence (wt) from HRSV__AFX60215.1__F0
MELLIHRSSAIFLTLAINALYLTSSQNITEEFYQSTCSAVSRGYFSALRTGWYTSVITIELSNIKETKCNGTDTKVKLIKQELDKYKNAVTELQLLMQNTPAANNRARREAPQYMNYTINTTKNLNVSISKKRKRRFLGFLLGVGSAIASGIAVSKVLHLEGEVNKIKNALLSTNKAVVSLSNGVSVLTSKVLDLKNYINNQLLPIVNKQSCRISNIETVIEFQQKNSRLLEITREFSVNAGVTTPLSTYMLTNSELLSLINDMPITNDQKKLMSSNAQIVRQQSYSIMSIIKEEVLAYVVQLPIYGVIDTPCWKLHTSPLCTTNIKEGSNICLTRTDRGWYCDNAGSVSFFPQADTCKVQSNRVFCDTMNSLTLPSEVSLCNTDIFNSKYDCKIMTSKTDISSSVITSLGAIVSCYGKTKCTASNKNRGIIKTFSNGCDYVSNKGVDTVSVGNTLYYVNKLEGKNLYVKGEPIINYYDPLVFPSDEFDASISQVNEKINQSLAFIRRSDELLHNVNTGKSTTNIMITAIIIVIIVVLLSLIAIGLLLYCKAKNTPVTLSKDQLSGINNIAFSK

SEQ ID NO: 8374 - protein, 574 aa, Artificial Sequence
  derived and/or modified protein sequence (wt) from HRSV__AFX60214.1__F0
MELLIHRSSAIFLTLAINALYLTSSQNITEEFYQSTCSAVSRGYLSALRTGWYTSVITIELSNIKEIKCNGTDTKVKLIKQELDKYKNAVTELQLLMQNTPAANNRARREAPQYMNYTINTTKNPNVSISKKRKRRFLGFLLGVGSAIASGIAVSKVLHLEGEVNKIKNALLSTNKAVVSLSNGVSVLTSKVLDLKNYINNQLLPIVNQQSCRISNIETVIEFQQKNSRLLEITREFSVNAGVTTPLSTYMLTNSELLSLINDMPITNDQKKLMSSNVQIVRQQSYSIMSIIKEEVLAYVVQLPIYGVIDTPCWKLHTSPLCTTNIKEGSNICLTRTDRGWYCDNAGSVSFFPQADTCKVQSNRVFCDTMNSLTLPSEVSLCNTDIFNSKYDCKIMTSKTDISSSVITSLGAIVSCYGKTKCTASNKNRGIIKTFSNGCDYVSNKGVDTVSVGNTLYYVNKLEGKNLYVKGEPIINYYDPLVFPSDEFDASISQVNEKINQSLAFIRRSDELLHNVNTGKSTTNIMITAIIIVIIVVLLSLIAIGLLLYCKAKNTPVTLSKDQLSGINNIAFSK

SEQ ID NO: 8375 - protein, 574 aa, Artificial Sequence
  derived and/or modified protein sequence (wt) from HRSV__AFX60212.1__F0
MELLIHRSSAIFLTLAINALYLTSSQNITEEFYQSTCSAVSRGYLSALRTGWYTSVITIELSNIKETKCNGTDTKVKLIKQELDKYKNAVTELQLLMQNTPAANNRARREAPQYMNYTINTTKNPNVSISKKRKRRFLGFLLGVGSAIASGIAVSKVLHLEGEVNKIKNALLSTNKAVVSLSNGVSVLTSKVLDLKNYINNQLLPIVNQQSCRISNIETVIEFQQKNSRLLEITREFSVNAGVTTPLSTYMLTNSELLSLINDMPITNDQKKLMSSNVQIVRQQSYSIMSIIKEEVLAYVVQLPIYGVIDTPCWKLHTSPLCTTNIKEGSNICLTRTDRGWYCDNAGSVSFFPQADTCKVQSNRVFCDTMNSLTLPSEVSLCNTDIFNSKYDCKIMTSKTDISSSVITSLGAIVSCYGKTKCTASNKNRGIIKTFSNGCDYVSNKGVDTVSVGNTLYYVNKLEGKNLYVKGEPIINYYDPLVFPSDEFDASISQVNEKINQSLAFIRRSDELLHNVNTGKSTTNIMITAIIIVIIVVLLSLIAIGLLLYCKAKNTPVTLSKDQLSGINNIAFSK

SEQ ID NO: 8376 - protein, 574 aa, Artificial Sequence
  derived and/or modified protein sequence (wt) from HRSV__AFX60208.1__F0
MELPILKTNAITTILAAVTLCFASSQNITEEFYQSTCSAVSKGYLSALRTGWYTSVITIELSNIKENKCNGTDAKVKLIKQELDKYKNAVIELQLLMQSTPAANSRARRELPRFMNYTLNNTKNTNVTLSKKRKRRFLGFLLGVGSAIASGIAVSKVLHLEGEVNKIKSALLSTNKAVVSLSNGVSVLTSKVLDLKNYIDKQLLPIVNKQSCSISNIETVIEFQQKNNRLLEITREFSVNAGVTTPVSTYMLTNSELLSLINDMPITNDQKKLMSSNVQIVRQQSYSIMSIIKEEVLAYVVQLPLYGVIDTPCWKLHTSPLCTTNTKEGSNICLTRTDRGWYCDNAGSVSFFPQAETCKVQSNRVFCDTMNSLTLPSEVNLCNIDIFNPKYDCKIMTSKTDVSSSVITSLGAIVSCYGKTKCTASNKNRGIIKTFSNGCDYVSNKGVDTVSVGNTLYYVNKQEGKSLYVKGEPIINFYDPLVFPSDEFDASISQVNEKINQSLAFIRKSDELLHNVNAGKSTTNIMITTIIIVIIVILLALIAVGLLLYCKARSTPVTLSKDQLSGINNIAFSN

SEQ ID NO: 8377 - protein, 574 aa, Artificial Sequence
  derived and/or modified protein sequence (wt) from HRSV__AFX60202.1__F0
MELPILKTNAITTILAAVTLCFASSQNITEEFYQSTCSAVSKGYLSALRTGWYTSVITIELSNIKENKCNGTDAKVKLIKQELDKYKNAVTELQLLMQSTSAANSRARRELPRFMNYTLNNTKNTNVTLSKKRKRRFLGFLLGVGSAIASGIAVSKVLHLEGEVNKIKSALLSTNKAVVSLSNGVSVLTSKVLDLKNYIDKQLLPIVNKQSCSISNIETVIEFQQKNNRLLEITREFSVNAGVTTPVSTYMLTNSELLSLINDMPITNDQKKLMSSNVQIVRQQSYSIMSIIKEEVLAYVVQLPLYGVIDTPCWKLHTSPLCTTNTKEGSNICLTRTDRGWYCDNAGSVSFFPQAETCKVQSNRVFCDTMNSLTLPSEVNLCNIDIFNPKYDCKIMTSKTDVSSSVITSLGAIVSCYGKTKCTASNKNRGIIKTFSNGCDYVSNKGVDTVSVGNTLYYVNKQEGKSLYVKGEPIINFYDPLVFPSDEFDASISQVNEKINQSLAFIRKSDELLHNVNAGKSTTNIMITTIIIVIIVILLALIAVGLLLYCKARSTPVTLSKDQLSGINNIAFSN

SEQ ID NO: 8378 - protein, 574 aa, Artificial Sequence
  derived and/or modified protein sequence (wt) from HRSV__AFX60220.1__F0
MELLIHRSSAIFLTLAINALYITSSQNITEEFYQSTCSAVSRGYLSALRTGWYTSVITIELSNIKETKCNGTDTKVKLIKQELDKYKNAVTELQLLMQNTPAVNNRARREAPQYMNYTINTTKNLNVSISKKRKRRFLGFLLGVGSAIASGIAVSKVLHLEGEVNKIKNALQSTNKAVVSLSNGVSVLTSKVLDLKNYINNQLLPIVNQQSCRISNIETVIEFQQKNSRLLEITREFSVNAGVTTPLSTYMLTNSELLSLINDMPITNDQKKLMSSNVQIVRQQSYSIMSIIKEEVLAYVVQLPIYGVIDTPCWKLHTSPLCTTNIKEGSNICLTRTDRGWYCDNAGSVSFFPQADTCKVQSNRVFCDTMNSLTLPSEVSLCNTDIFNSKYDCKIMTSKTDISSSVITSLGAIVSCYGKTKCTASNKNRGIIKTFSNGCDYVSNKGVDTVSVGNTLYYVNKLEGKNLYVKGEPIINYYDPLVFPSDEFDASISQVNEKINQSLAFIRRSDELLHNVNTGKSTTNIMITAIIIVIIVVLLSLIAIGLLLYCKAKNTPVTLSKDQLSGINNIAFSK

SEQ ID NO: 8379 - protein, 574 aa, Artificial Sequence
  derived and/or modified protein sequence (wt) from HRSV__AFX60213.1__F0
MELLIHRSSAIFLTLAINALYLTSSQNITEEFYQSTCSAVSRGYLSALRTGWYTSVITIELSNIKETKCNGTDTKVKLIKQELDKYKNAVTELQLLMQNTPAVNNRARREAPQYMNYTINTTKNLNVSISKKRKRRFLGFLLGVGSAIASGIAVSKVLHLEGEVNKIKNALQSTNKAVVSLSNGVSVLTSKVLDLKNYINNQLLPIVNQQSCRISNIETVIEFQQKNSRLLEITREFSVNAGVTTPLSTYMLTNSELLSLINDMPITNDQKKLMSSNVQIVRQQSYSIMSIIKEEVLAYVVQLPIYGVIDTPCWKLHTSPLCTTNIKEGSNICLTRTDRGWYCDNAGSVSFFPQADTCKVQSNRVFCDTMNSLTLPSEVSLCNTDIFNSKYDCKIMTSKTDISSSVITSLGAIVSCYGKTKCTASNKNRGIIKTFSNGCDYVSNKGVDTVSVGNTLYYVNKLEGKNLYVKGEPIINYYDPLVFPSDEFDASISQVNEKINQSLAFIRRSDELLHNVNTGKSTTNIMITAIIIVIIVVLLSLIAIGLLLYCKAKNTPVTLSKDQLSGINNIAFSK

SEQ ID NO: 8380 - protein, 574 aa, Artificial Sequence
  derived and/or modified protein sequence (wt) from HRSV__AFX60190.1__F0
MELPILKTNAITTILAAVTLCFASSQNITEEFYQSTCSAVSKGYLSALRTGWYTSVITIELSNIKENKCNGTDAKVKLIKQELDKYKNAVTELQLFMQSTPAANSRARRELPRFMNYTLNNTKNTNVTLSKKRKRRFLGFLLGVGSAIASGIAVSKVLHLEGEVNKIKSALLSTNKAVVSLSNGVSVLTSKVLDLKNYIDKQLLPIVNKQSCSISNIETVIEFQQKNNRLLEITREFSVNAGVTTPVSTYMLTNSELLSLINDMPITNDQKKLMSSNVQIVRQQSYSIMSIIKEEVLAYVVQLPLYGVIDTPCWKLHTSPLCTTNTKEGSNICLTRTDRGWYCDNAGSVSFFPQAETCKVQSNRVFCDTMNSLTLPSEVNLCNIDIFNPKYDCKIMTSKTDVSSSVITSLGAIVSCYGKTKCTASNKNRGIIKTFSNGCDYVSNKGVDTVSVGNTLYYVNKQEGKSLYVKGEPIINFYDPLVFPSDEFDASISQVNEKINQSLAFIRKSDELLHNVNAGKSTTNIMITTIIIVIIVILLALIAVGLLLYCKARSTPVTLSKDQLSGINNIAFSN

SEQ ID NO: 8381 - protein, 574 aa, Artificial Sequence
  derived and/or modified protein sequence (wt) from HRSV__AFX60187.1__F0
MELPILKTNAITTILAAVTLCFSSSQNITEEFYQSTCSAVSKGYLSALRTGWYTSVITIELSNIKENKCNGTDAKVKLIKQELDKYKNAVTELQLLMQSTPAANSRARRELPRFMNYTLNNTKNTNVTLSKKRKRRFLGFLLGVGSAIASGIAVSKVLHLEGEVNKIKSALLSTNKAVVSLSNGVSVLTSKVLDLKNYIDKQLLPIVNKQSCSISNIETVIEFQQKNNRLLEITREFSVNAGVTTPVSTYMLTNSELLSLINDMPITNDQKKLMSSNVQIVRQQSYSIMSIIKEEVLAYVVQLPLYGVIDTPCWKLHTSPLCTTNTKEGSNICLTRTDRGWYCDNAGSVSFFPQAETCKVQSNRVFCDTMNSLTLPSEVNLCNIDIFNPKYDCKIMTSKTDVSSSVITSLGAIVSCYGKTKCTASNKNRGIIKTFSNGCDYVSNKGVDTVSVGNTLYYVNKQEGKSLYVKGEPIINFYDPLVFPSDEFDASISQVNEKINQSLAFIRKSDELLHNVNAGKSTTNIMITTIIIVIIVILLALIAVGLLLYCKARSTPVTLSKDQLSGINNIAFSN

SEQ ID NO: 8382 - protein, 574 aa, Artificial Sequence
  derived and/or modified protein sequence (wt) from HRSV__AFX60201.1__F0
MELPILKTNAITTILAAVTLCFASSQNITEEFYQSTCSAVSKGYLSALRTGWYTSVITIELSNIKENKCNGTDAKVKLIKQELDKYKNAVTELQLLMQSTPAANSRARRELPRFMNYTLNNTKNTNVTLSKKRKRRFLGFLLGVGSAIASGIAVSKVLHLEGEVNKIKSALLSTNKAVVSLSNGVSVLTSKVLDLKNYIDKQLLPIVNKQSCSISNIETVIEFQQKNNRLLEITREFSVNAGVTTPVSTYMLTNSELLSLINDMPITNDQKKLMSSNVQIVRQQSYSIMSIIKEEVLAYVVQLPLYGVIDTPCWKLHTSPLCTTNTKEGSNICLTRTDRGWYCDNAGSVSFFPQAETCKVQSNRVFCDTMNSLTLPSEVNLCNIDIFNPKYDCKIMTSKTDVSSSVITSLGAIVSCYGKTKCTASNKNRGIIKTFSNGCDYVSNKGVDTVSVGNTLYYVNKQEGKSLYVKGEPIINFYDPLVFPSDEFDASISQVNEKINQSLAFIRKSDELLHNVNVGKSTTNIMITTIIIVIIVILLALIAVGLLLYCKARSTPVTLSKDQLSGINNIAFSN

SEQ ID NO: 8383 - protein, 574 aa, Artificial Sequence
  derived and/or modified protein sequence (wt) from HRSV__AFX60173.1__F0
MELPILNTNAITTILAAVTLCFASSQNITEEFYQSTCSAVSKGYLSALRTGWYTSVITIELSNIKENKCNGTDAKVKLIKQELDKYKNAVTELQLLMQSTPAANSRARRELPRFMNYTLNNTKNTNVTLSKKRKRRFLGFLLGVGSAIASGIAVSKVLHLEGEVNKIKSALLSTNKAVVSLSNGVSVLTSKVLDLKNYIDKQLLPIVNKQSCSISNIETVIEFQQKNNRLLEITREFSVNAGVTTPVSTYMLTNSELLSLINDMPITNDQKKLMSNNVQIVRQQSYSIMSIIKEEVLAYVVQLPLYGVIDTPCWKLHTSPLCTTNTKEGSNICLTRTDRGWYCDNAGSVSFFPQAETCKVQSNRVFCDTMNSLTLPSEVNLCNIDIFNPKYDCKIMTSKTDVSSSVITSLGAIVSCYGKTKCTASNKNRGIIKTFSNGCDYVSNKGVDTVSVGNTLYYVNKQEGKSLYVKGEPIINFYDPLVFPSDEFDASISQVNEKINQSLAFIRKSDELLHNVNAGKSTTSIMITTIIIVIIVILLSLIAVGLLLYCKARSTPVTLSKDQLSGINNIAFSN

SEQ ID NO: 8384 - protein, 574 aa, Artificial Sequence
  derived and/or modified protein sequence (wt) from HRSV__AFX60169.1__F0
MELPILKTNAITTILAAVTLCFASSQNITEEFYQSTCSAVSKGYLSALRTGWYTSVITIELSNIKENKCNGTDAKVKLIKQELDKYKNAVTELQLLMQSTPSANSRARRELPRFMNYTLNNTKNTNVTLSKKRKRRFLGFLLGVGSAIASGIAVSKVLHLEGEVNKIKSALLSTNKAVVSLSNGVSVLTSKVLDLKNYIDKQLLPIVNKQSCSISNIETVIEFQQKNNRLLEITREFSVNAGVTTPVSTYMLTNSELLSLINDMPITNDQKKLMSSNVQIVRQQSYSIMSIIKEEVLAYVVQLPLYGVIDTPCWKLHTSPLCTTNTKEGSNICLTRTDRGWYCDNAGSVSFFPQAETCKVQSNRVFCDTMNSLTLPSEVNLCNIDIFNPKYDCKIMTSKTDVSSSVITSLGAIVSCYGKTKCTASNKNRGIIKTFSNGCDYVSNKGVDTVSVGNTLYYVNKQEGKSLYVKGEPIINFYDPLVFPSDEFDASISQVNEKINQSLAFIRKSDELLHNVNAGKSTTNIMITTIIIVIIVILLALIAVGLLLYCKARSTPVTLSKDQLSGINNIAFSN

SEQ ID NO: 8385 - protein, 574 aa, Artificial Sequence
  derived and/or modified protein sequence (wt) from HRSV__AFX60162.1__F0
MELPILKTNAITTILAAVTLCFASSQNITEEFYQSTCSAVSKGYLSALRTGWYTSVITIELSNIKENKCNGTDAKVKLIKQELDKYKNAVTELQLFMQSTPAANSRARRELPRFMNYTLNNTKNTNVTLSKKRKRRFLGFLLGVGSAIASGIAVSKVLHLEGEVNKIKSALLSTNKAVVSLSNGVSVLTSKVLDLKNYIDKQLLPIVNKQSCSISNIETVIEFQQKNNRLLEITREFSVNAGVTTPVSTYMLTNSELLSLINDMPITNDQKKLMSSNVQIVRQQSYSIMSIIKEEVLAYVVQLPLYGVIDTPCWKLHTSPLCTINTKEGSNICLTRTDRGWYCDNAGSVSFFPQAETCKVQSNRVFCDTMNSLTLPSEVNLCNIDIFNPKYDCKIMTSKTDVSSSVITSLGAIVSCYGKTKCTASNKNRGIIKTFSNGCDYVSNKGVDTVSVGNTLYYVNKQEGKSLYVKGEPIINFYDPLVFPSDEFDASISQVNEKINQSLAFIRKSDELLHNVNAGKSTTNIMITTIIIVIIVILLALIAVGLLLYCKARSTPVTLSKDQLSGINNIAFSN

SEQ ID NO: 8386 - protein, 574 aa, Artificial Sequence
  derived and/or modified protein sequence (wt) from HRSV__AFX60156.1__F0
MELPILKANAITTILAAVILCFASSQNITEEFYQSTCSAVSKGYLSALRTGWYTSVITIELSNIKENKCNGTDAKVKLIKQELDKYKNAVTELQLLMQSTPAANNRARRELPRFMNYTLNNTKNTNVTLSKKRKRRFLGFLLGVGSAIASGIAVSKVLHLEGEVNKIKNALLSTNKAVVSLSNGVSVLTSKVLDLKNYIDKQLLPIVNKQSCSISNIETVIEFQQKNNRLLEITREFSVNAGVTTPVSTYMLTNSELLSLINDMPITNDQKKLMSNNVQIVRQQSYSIMSIIKEEVLAYVVQLPLYGVIDTPCWKLHTSPLCTTNTKEGSNICLTRTDRGWYCDNAGSVSFFPQAETCKVQSNRVFCDTMNSLTLPSEVNLCNVDIFNPKYDCKIMTSKTDVSSSVITSLGAIVSCYGKTKCTASNKNRGIIKTFSNGCDYVSNKGVDTVSVGNTLYYVNKQEGKNLYVKGEPIINFYDPLVFPSDEFDASISQVNEKINQSLAFIRKSDELLHNVNAGKSTTNIMITTIIIVIVVILLSLIVVGLLLYCKARSTPVTLSKDQLSGINNIAFSS

SEQ ID NO: 8387 - protein, 574 aa, Artificial Sequence
  derived and/or modified protein sequence (wt) from HRSV__AFX60151.1__F0
MELPILKTNAITTILAAVTLCFASSQNITEEFYQSTCSAVSKGYLSALRTGWYTSVITIELSNIKENKCNGTDAKVKLIKQELDKYKNAVTELQLLMQSTPAANSRARRELPRFMNYTLNNTKNTNVTLSKKRKRRFLGFLLGVGSAIASGIAVSKVLHLEGEVNKIKSALLSTNKAVVSLSNGVSVLTSKVLDLKNYIDKQLLPIVNKQSCSILNIETVIEFQQKNNRLLEITREFSVNAGVTTPVSTYMLTNSELLSLINDMPITNDQKKLMSSNVQIVRQQSYSIMSIIKEEVLAYVVQLPLYGVIDTPCWKLHTSPLCTTNTKEGSNICLTRTDRGWYCDNAGSVSFFPQAETCKVQSNRVFCDTMNSLTLPSEVNLCNIDIFNPKYDCKIMTSKTDVSSSVITSLGAIVSCYGKTKCTASNKNRGIIKTFSNGCDYVSNKGVDTVSVGNTLYYVNKQEGKSLYVKGEPIINFYDPLVFPSDEFDASISQVNEKINQSLAFIRKSDELLHNVNAGKSTTNIMITTIIIVIIVILLALIAVGLLLYCKARSTPVTLSKDQLSGINNIAFSN

SEQ ID NO: 8388 - protein, 574 aa, Artificial Sequence
  derived and/or modified protein sequence (wt) from HRSV__AFX60150.1__F0
MELPILKTNAITTILAAVTLCFASSQNITEEFYQSTCSAVSKGYLSALRTGWYTSVITIELSNIKENKCNGTDTKVKLIKQELDKYKNAVTELQLLMQSTPAANSRARRELPRFMNYTLNNTKNTNVTLSKKRKRRFLGFLLGVGSAIASGIAVSKVLHLEGEVNKIKSALLSTNKAVVSLSNGVSVLTSKVLDLKNYIDKQLLPIVNKQSCSISNIETVIEFQQKNNRLLEITREFSVNAGVTTPVSTYMLTNSELLSLINDMPITNDQKKLMSSNVQIVRQQSYSIMSIIKEEVLAYVVQLPLYGVIDTPCWKLHTSPLCTTNTKEGSNICLTRTDRGWYCDNAGSVSFFPQAETCKVQSNRVFCDTMNSLTLPSEVNLCNIDIFNPKYDCKIMTSKTDVSSSVITSLGAIVSCYGKTKCTASNKNRGIIKTFSNGCDYVSNKGVDTVSVGNTLYYVNKQEGKSLYVKGEPIINFYDPLVFPSDEFDASISQVNEKINQSLAFIRKSDELLHNVNAGKSTTNIMITTIIIVIIVILLALIAVGLLLYCKARSTPVTLSKDQLSGINNIAFSN

SEQ ID NO: 8389 - protein, 574 aa, Artificial Sequence
  derived and/or modified protein sequence (wt) from HRSV__AFX60148.1__F0
MELPILKTNAITTILAAVTLCFASSQNITEEFYQSTCSAVSKGYLSALRTGWYTSVITIELSNIKENKCNGTDAKVKLIKQELDKYKNAVTELQLLMQSTPAANSRARRELPRFMNYTLNNTKNTNVTLSKKRKRRFLGFLLGVGSAIASGIAVSKVLHLEGEVNKIKSALLSTNKAVVSLSNGVSVLTSKVLDLKNYIDKQLLPIVNKQSCSISNIETVIEFQQKNNRLLEITREFSVNAGVTTPVSTYMLTNSELLSLINDMPITNDQKKLMSSNVQIVRQQSYSIMSIIKEEVLAYVVQLPLYGVIDTPCWKLHTSPLCTTNTKEGSNICLTRTDRGWYCDNAGSVSFFPQAETCKVQSNRVFCDTMNSLTLPSEVNLCNIDIFNPKYDCKIMTSKTDVSSSVITSLGAIVSCYGKTKCTASNKNRGIIKTFSNGCDYVSNKGVDTVSVGNTLYYVNKQEGKSLYVKGEPIINFYDPLVFPSDEFDASISLVNEKINQSLAFIRKSDELLHNVNAGKSTTNIMITTIIIVIIVILLALIAVGLLLYCKARSTPVTLSKDQLSGINNIAFSN

SEQ ID NO: 8390 - protein, 574 aa, Artificial Sequence
  derived and/or modified protein sequence (wt) from HRSV__AFX60127.1__F0
MELPILKANAITTILTAVTLCFASSQNITEEFYQSTCSAVSKGYLSALRTGWYTSVITIELSNIKENKCNGTDAKVKLIKQELDKYKNAVTELQLLMQSTPAANNRARRELPRFMNYTLNNTKNTNVTLSKKRKRRFLGFLLGVGSAIASGIAVSKVLHLEGEVNKIKNALLSTNKAVVSLSNGVSVLTSKVLDLKNYIDKQLLPIVNKQSCSISNIETVIEFQQKNNRLLEITREFSVNAGVTTPVSTYMLTNSELLSLINDMPITNDQKKLMSNNVQIVRQQSYSIMSIIKEEVLAYVVQLPLYGVIDTPCWKLHTSPLCTTNTKEGSNICLTRTDRGWYCDNAGSVSFFPQAETCKVQSNRVFCDTMNSLTLPSEVNLCNVDIFNPKYDCKIMTSKTDVSSSVITSLGAIVSCYGKTKCTASNKNRGIIKTFSNGCDYVSNKGVDTVSVGNTLYYVNKQEGKNLYVKGEPIINFYDPLVFPSDEFDASISQVNEKINQSLAFIRKSDELLHNVNAGKSTTNIMITTIIIVIVVILLSLIVVGLLLYCKARSTPVTLSKDQLSGINNIAFSS

SEQ ID NO: 8391 - protein, 574 aa, Artificial Sequence
  derived and/or modified protein sequence (wt) from HRSV__AFX60137.1__F0
MELPILNTNAITTILAAVTLCFASSQNITEEFYQSTCSAVSKGYLSALRTGWYTSVITIELSNIKENKCNGTDAKVKLIKQELDKYKNAVTELQLLMQSTPAANSRARRELPRFMNYTLNNTKNTNVTLSKKRKRRFLGFLLGVGSAIASGIAVSKVLHLEGEVNKIKSALLSTNKAVVSLSNGVSVLTSKVLDLKNYIDKQLLPIVNKQSCSISNIETVIEFQQKNNRLLEITREFSVNAGVTTPVSTYMLTNSELLSLINDMPITNDQKKLMSNNVQIVRQQSYSIMSIIKEEVLAYVVQLPLYGVIDTPCWKLHTSPLCTTNKKEGSNICLTRTDRGWYCDNAGSVSFFPQAETCKVQSNRVFCDTMNSLTLPSEVNLCNIDIFNPKYDCKIMTSKTDVSSSVITSLGAIVSCYGKTKCTASNKNRGIIKTFSNGCDYVSNKGVDTVSVGNTLYYVNKQEGKSLYVKGEPIINFYDPLVFPSDEFDASISQVNEKINQSLAFIRKSDELLHNVNAGKSTTNIMITTIIIVIIVILLSLIAVGLLLYCKARSTPVTLSKDQLSGINNIAFSN

SEQ ID NO: 8392 - protein, 574 aa, Artificial Sequence
  derived and/or modified protein sequence (wt) from HRSV__AFX60135.1__F0
MELPILKTNAITTILAAVTLCFASSQNITEEFYQSTCSAVSKGYLSALRTGWYTSVITIELSNIKENKCNGTDAKVKLIKQELDKYKNAVTELQLLMQSTPAANSRARRELPRFMNYTLNNTKNTNVTLSKKRKRRFLGFLLGVGSAIASGTAVSKVLHLEGEVNKIKSALLSTNKAVVSLSNGVSVLTSKVLDLKNYIDKQLLPIVNKQSCSISNIETVIEFQQKNNRLLEITREFSVNAGVTTPVSTYMLTNSELLSLINDMPITNDQKKLMSSNVQIVRQQSYSIMSIIKEEVLAYVVQLPLYGVIDTPCWKLHTSPLCTTNTKEGSNICLTRTDRGWYCDNAGSVSFFPQAETCKVQSNRVFCDTMNSLTLPSEVNLCNIDIFNPKYDCKIMTSKTDVSSSVITSLGAIVSCYGKTKCTASNKNRGIIKTFSNGCDYVSNKGVDTVSVGNTLYYVNKQEGKSLYVKGEPIINFYDPLVFPSDEFDASISQVNEKINQSLAFIRKSDELLHNVNAGKSTTNIMITTIIIVIIVILLALIAVGLLLYCKARSTPVTLSKDQLSGINNIAFSN

SEQ ID NO: 8393 - protein, 574 aa, Artificial Sequence
  derived and/or modified protein sequence (wt) from HRSV__AFV46420.1__F0
MELPILKTNAITTILAAVTLCFASSQNITEEFYQSTCSAVSKGYLSALRTGWYTSVITIELSNIKENKCNGTDAKVKLIKQELDKYKNAVTELQLLMQSTPAANSRARRELPRFMNYTLNNTKNTNVTLSKKRKRRFLGFLLGVGSAIASGIAVSKVLHLEGEVNKIKSALLSTNKAVVSLSNGVSVLTSKVLDLKNYIDKQLLPIVNKQSCSISNIETVIEFQQKNNRLLEITREFSVNAGVTTPVSTYMLTNSELLSLINDMPITNDQKKLMSSNVQIVRQQSYSIMSIIKEEVLAYVVQLPLYGVIDTPCWKLHTSPLCTTNTKEGSNICITRTDRGWYCDNAGSVSFFPQAETCKVQSNRVFCDTMNSLTLPSEVNFCNIDIFNPKYDCKIMTSKTDVSSSVITSLGAIVSCYGKTKCTASNKNRGIIKTFSNGCDYVSNKGVDTVSVGNTLYYVNKQEGKSLYVKGEPIINFYDPLVFPSDEFDASISQVNEKINQSLAFIRKSDELLHNVNAGKSTTNIMITTIIIVIIVILLALIAVGLLLYCKARSTPVTLSKDQLSGINNIAFSN

SEQ ID NO: 8394 - protein, 574 aa, Artificial Sequence
  derived and/or modified protein sequence (wt) from HRSV__AFX60200.1__F0
MELPILKTNAITTILAAVTLCFASSQNITEEFYQSTCSAVSKGYLSALRTGWYTSVITIELSNIKENKCNGTDAKVKLIKQELDKYKNAVTELQLLMQSTPAANSRARRELPRFMNYTLNNTKNTNVTLSKKRKRRFLGFLLGVGSAIASGIAVSKVLHLEGEVNKIKSALLSTNKAVVSLSNGVSVLTSKVLDLKNYIDKQLLPIVNKQSCSISNIETVIEFQQKNNRLLEITREFSVNAGVTTPVSTYMLTNSELLSLINDMPITNDQKKLMSSNVQIVRQQSYSIMSIIKEEVLAYVVQLPLYGVIDTPCWKLHTSPLCTTNTKVGSNICLTRTDRGWYCDNAGSVSFFPQAETCKVQSNRVFCDTMNSLTLPSEVNLCNIDIFNPKYDCKIMTSKTDVSSSVITSLGAIVSCYGKTKCTASNKNRGIIKTFSNGCDYVSNKGVDTVSVGNTLYYVNKQEGKSLYVKGEPIINFYDPLVFPSDEFDASISQVNEKINQSLAFIRKSDELLHNVNAGKSTTNIMITTIIIVIIVILLALIAVGLLLYCKARSTPVTLSKDQLSGINNIAFSN

SEQ ID NO: 8395 - protein, 574 aa, Artificial Sequence
  derived and/or modified protein sequence (wt) from HRSV__AFV46419.1__F0
MELPILKTNAITTILAAVTLCFASSQNITEEFYQSTCSAVSKGYLSALRTGWYTSVITIELSNIKENKCNGTDAKVKLIKQELDKYKNAVTELQLLMQSTPAANSRARRELPRFMNYTLNNTKNTNVTLSKKRKRRFLGFLLGVGSAIASGIAVSKVLHLEGEVNKIKSALLSTNKAVVSLSNGVSVLTSKVLDLKNYIDKQLLPIVNKQSCSISNIETVIEFQQKNNRLLEITREFSVNAGVTTPVSTYMLTNSELLSLINDMPITNDQKKLMSSNVQIVRQQSYSIMSIIKEEVLAYVVQLPLYGVIDTPCWKLHTSPLCTTNTKEGSNICITRTDRGWYCDNAGSVSFFPQAETCKVQSNRVFCDTMNSLTLPSEVNLCNIDIFNPKYDCKIMTSKTDVSSSVITSLGAIVSCYGKTKCTASNKNRGIIKTFSNGCDYVSNKGVDTVSVGNTLYYVNKQEGKSLYVKGEPIINFYDPLVFPSDEFDASISQVNEKINQSLAFIRKSDELLHNVNAGKSTTNIMITTIIIVIIVILLALIAVGLLLYCKARSTPVTLSKDQLSGINNIAFSN

SEQ ID NO: 8396 - protein, 574 aa, Artificial Sequence
  derived and/or modified protein sequence (wt) from HRSV__AFV46417.1__F0
MELPILKTNAITTILAAVTLCFASSQNITEEFYQSTCSAVSKGYLSALRTGWYTSVITIELSNIKENKCNGTDAKVKLIKQELDKYKNAVTELQLLMQSTPAANSRTRRELPRFMNYTLNNTKNTNVTLSKKRKRRFLGFLLGVGSAIASGIAVSKVLHLEGEVNKIKSALLSTNKAVVSLSNGVSVLTSKVLDLKNYIDKQLLPIVNKQSCSISNIETVIEFQQKNNRLLEITREFSVNAGVTTPVSTYMLTNSELLSLINDMPITNDQKKLMSSNVQIVRQQSYSIMSIIKEEVLAYVVQLPLYGVIDTPCWKLHTSPLCTTNTKEGSNICLTRTDRGWYCDNAGSVSFFPQAETCKVQSNRVFCDTMNSLTLPSEVNLCNIDIFNPKYDCKIMTSKTDVSSSVITSLGAIVSCYGKTKCTASNKNRGIIKTFSNGCDYVSNKGVDTVSVGNTLYYVNKQEGKSLYVKGEPIINFYDPLVFPSDEFDASISQVNEKINQSLAFIRKSDELLHNVNAGKSTTNIMITTIIIVIIVILLALIAVGLLLYCKARSTPVTLSKDQLSGINNIAFSN

SEQ ID NO: 8397 - protein, 574 aa, Artificial Sequence
  derived and/or modified protein sequence (wt) from HRSV__AFV46413.1__F0
MELPILKTNAITTILAAITLCFASSQNITEEFYQSTCSAVSKGYLSALRTGWYTSVITIELSNIKENKCNGTDAKVKLIKQELDKYKNAVTELQLLMQSTPAANSRARRELPRFMNYTLNNTKNTNVTLSKKRKRRFLGFLLGVGSAIASGIAVSKVLHLEGEVNKIKSALLSTNKAVVSLSNGVSVLTSKVLDLKNYIDKQLLPIVNKQSCSISNIETVIEFQQKNNRLLEITREFSVNAGVTTPVSTYMLTNSELLSLINDMPITNDQKKLMSSNVQIVRQQSYSIMSIIKEEVLAYVVQLPLYGVIDTPCWKLHTSPLCTTNTKEGSNICLTRTDRGWYCDNAGSVSFFPQAETCKVQSNRVFCDTMNSLTLPSEVNLCNIDIFNPKYDCKIMTSKTDVSSSVITSLGAIVSCYGKTKCTASNKNRGIIKTFSNGCDYVSNKGVDTVSVGNTLYYVNKQEGKSLYVKGEPIINFYDPLVFPSDEFDASISQVNEKINQSLAFIRKSDELLHNVNAGKSTTNIMITTIIIVIIVILLALIAVGLLLYCKARSTPVTLSKDQLSGINNIAFSN

SEQ ID NO: 8398 - protein, 574 aa, Artificial Sequence
  derived and/or modified protein sequence (wt) from HRSV__AFV46414.1__F0
MELPILKTNAITTILAAITLCFASSQNITEEFYQSTCSAVSKGYLSALRTGWYTSVITIELSNIKENKCNGTDAKVKLIKQELDKYKNAVIELQLLMQSTPAANSRARRELPRFMNYTLNNTKNTNVTLSKKRKRRFLGFLLGVGSAIASGIAVSKVLHLEGEVNKIKSALLSTNKAVVSLSNGVSVLTSKVLDLKNYIDKQLLPIVNKQSCSISNIETVIEFQQKNNRLLEITREFSVNAGVTTPVSTYMLTNSELLSLINDMPITNDQKKLMSSNVQIVRQQSYSIMSIIKEEVLAYVVQLPLYGVIDTPCWKLHTSPLCTTNTKEGSNICLTRTDRGWYCDNAGSVSFFPQAETCKVQSNRVFCDTMNSLTLPSEVNLCNIDIFNPKYDCKIMTSKTDVSSSVITSLGAIVSCYGKTKCTASNKNRGIIKTFSNGCDYVSNKGVDTVSVGNTLYYVNKQEGKSLYVKGEPIINFYDPLVFPSDEFDASISQVNEKINQSLAFIRKSDELLHNVNAGKSTTNIMITTIIIVIIVILLALIAVGLLLYCKARSTPVTLSKDQLSGINNIAFSN

SEQ ID NO: 8399 - protein, 574 aa, Artificial Sequence
  derived and/or modified protein sequence (wt) from HRSV__AFV46410.1__F0
MELPILKTNAITTILAAVTLCFASSQNITEEFYQSTCSAVSKGYLSALRTGWYTSVITIELSNIKENKCNGTDAKVKLIKQELDKYKNAVTELQLLMQSTPTANSRARRELPRFMNYTLNNTKNINVTLSKKRKRRFLGFLLGVGSAIASGIAVSKVLHLEGEVNKIKSALLSTNKAVVSLSNGVSVLTSKVLDLKNYIDKQLLPIVNKQSCSISNIETVIEFQQKNNRLLEITREFSVNAGVTTPVSTYMLTNSELLSLINDMPITNDQKKLMSSNVQIVRQQSYSIMSIIKEEVLAYVVQLPLYGVIDTPCWKLHTSPLCTTNTKEGSNICLTRTDRGWYCDNAGSVSFFPQAETCKVQSNRVFCDTMNSLTLPSEVNLCNIDIFNPKYDCKIMTSKTDVSSSVITSLGAIVSCYGKTKCTASNKNRGIIKTFSNGCDYVSNKGVDTVSVGNTLYYVNKQEGKSLYVKGEPIINFYDPLVFPSDEFDASISQVNEKINQSLAFIRKSDELLHNVNAGKSTTNIMITTIIIVIIVILLALIAVGLLLYCKARSTPVTLSKDQLSGINNIAFSN

SEQ ID NO: 8400 - protein, 574 aa, Artificial Sequence
  derived and/or modified protein sequence (wt) from HRSV__AFV46403.1__F0
MELPILKTNAITTILAAVTLCFASSQNITEEFYQSTCSAVSKGYLSALRTGWYTSVITIELSNIKENKCNGTDAKVKLIKQELDKYKNAVTELQLLMQSTSAANSRARRELPRFMNYTLNNTKNTNVTLSKKRKRRFLGFLLGVGSAIASGIAVSKVLHLEGEVNKIKSALLSTNKAVVSLSNGVSVLTSKVLDLKNYIDKQLLPIVNKQSCSISNIETVIEFQQKNNRLLEITREFSVNAGVTTPVSTYMLTNSELLSLINDMPITNDQKKLMSSNVQIVRQQSYSIMSIIKEEVLAYVVQLPLYGVIDTPCWKLHTSPLCTTNIKEGSNICLTRTDRGWYCDNAGSVSFFPQAETCKVQSNRVFCDTMNSLTLPSEVNLCNIDIFNPKYDCKIMTSKTDVSSSVITSLGAIVSCYGKTKCTASNKNRGIIKTFSNGCDYVSNKGVDTVSVGNTLYYVNKQEGKSLYVKGEPIINFYDPLVFPSDEFDASISQVNEKINQSLAFIRKSDELLHNVNAGKSTTNIMITTIIIVIIVILLALIAVGLLLYCKARSTPVTLSKDQLSGINNIAFSN

SEQ ID NO: 8401 - protein, 574 aa, Artificial Sequence
  derived and/or modified protein sequence (wt) from HRSV__AFV46409.1__F0
MELPILKTNAITTILAAVTLCFASSQNITEEFYQSTCSAVSKGYLSALRTGWYTSVITIELSNIKENKCNGTDAKVKLIKQELDKYKNAVTELQLLMQSTPAANSRARRELPRFMNYTLNNTKNTNVTLSKKRKRRFLGFLLGVGSAIASGIAVSKVLHLEGEVNKIKSALLSTNKAVVSLSNGVSVLTSKVLDLKNYIDKQLLPIVNKQSCSISNIETVIEFQQKNNRLLEITREFSVNAGVTTPVSTYMLTNSELLSLINDMPITNDQKKLMSSNVQIVRQQSYSIMSIIKEEVLAYVVQLPLYGVIDTPCWKLHTSPLCTTNTKEGSNICLTRTDRGWYCDNAGSVSFFPQAETCKVQSNRVFCDTMNSLTLPSEVNLCNIDIFNPKYDCKIMTSKTDVSSSVITSLGAIVSCYGKTKCTASNKNRGIIKTFSNGCDYVSNKGVDTVSVGNTLYYVNKQEGKSLYVKGEPIINFYDPLVFPSDEFDTSISQVNEKINQSLAFIRKSDELLHNVNAGKSTTNIMITTIIIVIIVILLALIAVGLLLYCKARSTPVTLSKDQLSGINNIAFSN

SEQ ID NO: 8402 - protein, 574 aa, Artificial Sequence
  derived and/or modified protein sequence (wt) from HRSV__AFP99061.1__F0
MELLIHRSSAIFLTLAINALYLTSSQNITEEFYQSTCSAVSRGYLSALRTGWYTSVITIELSNIKEIKCNGTDTKVKLIKQELDKYKNAVTELQLLMQNTPAVNNRARREAPQYMNYTINTTKNLNVSISKKRKRRFLGFLLGVGSAIASGIAVSKVLHLEGEVNKIKNALLSTNKAVVSLSNGVSVLTSKVLDLKNYINNQLLPIVNQQSCRISNIETVIEFQQKNSRLLEITREFSVNAGVTTPLSTYMLTNSELLSLINDMPITNDQKKLMSSNVQIVRQQSYSIMSIIKEEVLAYVVQLPIYGVIDTPCWKLHTSPLCTTNIKEGSNICLTRTDRGWYCDNAGSVSFFPQADTCKVQSNRVFCDTMNSLTLPSEVSLCNTDIFNSKYDCKIMTSKTDISSSVITSLGAIVSCYGKTKCTASNKNRGIIKTFSNGCDYVSNKGVDTVSVGNTLYYVNKLEGKNLYVKGEPIINYYDPLVFPSDEFDASISQVNEKINQSLAFIRRSDELLHNVNTGKSTTNIMITAIIIVIIVVLLSLIAIGLLLYCKAKNTPVTLSKDQLSGINNIAFSK

SEQ ID NO: 8403 - protein, 574 aa, Artificial Sequence
  derived and/or modified protein sequence (wt) from HRSV__AFM95400.1__F0
MELPILKTNAITTILAAVTLCFASSQNITEEFYQSTCSAVSKGYLSALRTGWYTSVITIELSNIKENKCNGTDAKVKLIKQELDKYKNAVTELQLLMQSTSAANNRARRELPRFMNYTLNNTKNNNVTLSNKRKRRFLGFLLGVGSAIASGIAVSKVLHLEGEVNKIKSALLSTNKAVVSLSNGVSVLTSKVLDLKNYIDKQLLPIVNKQSCSISNIETVIEFQQKNNRLLEITREFSVNAGVTTPVSTYMLTNSELLSLINDMPITNDQKKLMSNNVQIVRQQSYSIMSIIKEEVLAYVVQLPLYGVIDTPCWKLHTSPLCTTNTKEGSNICLTRTDRGWYCDNAGSVSFFPQAETCKVQSNRVFCDTMNSLTLPSEVNLCNIDIFNPKYDCKIMTSKTDVSSSVITSLGAIVSCYGKTKCTASNKNRGIIKTFSNGCDYVSNKGVDTVSVGNTLYYVNKQEGKSLYVKGEPIINFYDPLVFPSDEFDASISQVNEKINQSLAFIRKSDELLHNVNVGKSTTNIMITTIIIVIIVILLLLIAVGLFLYCKARSTPVTLSKDQLSGINNIAFSN

SEQ ID NO: 8404 - protein, 574 aa, Artificial Sequence
  derived and/or modified protein sequence (wt) from HRSV__AFV46401.1__F0
MELPILKTNAITTILAAVTLCFASSQNITEEFYQSTCSAVSKGYLSALRTGWYTSVITIELSNIKENKCNGTDAKVKLIKQELDKYKNAVTELQLLMQSTPAANSRARRELPRFMNYTLNNTKNINVTLSKKRKRRFLGFLLGVGSAIASGIAVSKVLHLEGEVNKIKSALLSTNKAVVSLSNGVSVLTSKVLDLKNYIDKQLLPIVNKQSCSISNIETVIEFQQKNNRLLEITREFSVNAGVTTPVSTYMLTNSELLSLINDMPITNDQKKLMSSNVQIVRQQSYSIMSIIKEEVLAYVVQLPLYGVIDTPCWKLHTSPLCTTNTKEGSNICLTRTDRGWYCDNAGSVSFFPQAETCKVQSNRVFCDTMNSLTLPSEVNLCNIDIFNPKYDCKIMTSKTDVSSSVITSLGAIVSCYGKTKCTASNKNRGIIKTFSNGCDYVSNKGVDTVSVGNTLYYVNKQEGKSLYVKGEPIINFYDPLVFPSDEFDASISQVNEKINQSLAFIRKSDELLHNVNAGKSTTNIMITTIIIVIIVILLALIAVGLLLYCKARSTPVTLSKDQLSGINNIAFSN

SEQ ID NO: 8405 - protein, 574 aa, Artificial Sequence
  derived and/or modified protein sequence (wt) from HRSV__AFP99064.1__F0
MELLIHRSSAIFLTLAINALYLTSSQNITEEFYQSTCSAVSRGYLSALRTGWYTSVITIELSNIKETKCNGTDTKVKLIKQELDKYKNAVTELQLLMQNTPAANNRARREAPQYMNYTINTTKNLNVSISKKRKRRFLGFLLGVGSAIASGVAVSKVLHLEGEVNKIKNALLSTNKAVVSLSNGVSVLTSKVLDLKNYINNQLLPIVNQQSCRISNIETVIEFQQKNSRLLEITREFSVNAGVTTPLSTYMLTNSELLSLINDMPITNDQKKLMSSNVQIVRQQSYSIMSIIKEEVLAYVVQLPIYGVIDTPCWKLHTSPLCTTNIKEGSNICLTRTDRGWYCDNAGSVSFFPQADTCKVQSNRVFCDTMNSLTLPSEVSLCNTDIFNSKYDCKIMTSKTDISSSVITSLGAIVSCYGKTKCTASNKNRGIIKTFSNGCDYVSNKGVDTVSVGNTLYYVNKLEGKNLYVKGEPIINYYDPLVFPSDEFDASISQVNEKINQSLAFIRRSDELLHNVNTGKSTTNIMITVIIIVIIVVLLSLIAIGLLLYCKAKNTPVTLSKDQLSGINNIAFSK

SEQ ID NO: 8406 - protein, 574 aa, Artificial Sequence
  derived and/or modified protein sequence (wt) from HRSV__AFM95376.1__F0
MELPILKTNAITTILAAVTLCFASSQNITEEFYQSTCSAVSKGYLSALRTGWYTSVITIELSNIKENKCNGTDAKVKLIKQELDKYKNAVTELQLLMQSTPAANNRARRELPRFMNYTLNNTKNTNVTVSKKRKRRFLGFLLGVGSAIASGIAVSKVLHLEGEVNKIKSALLSTNKAVVSLSNGVSVLTSKVLDLKNYIDKQLLPIVNKQSCSISNIETVIEFQQKNNRLLEITREFSVNAGVTTPVSTYMLTNSELLSLINDMPITNDQKKLMSNNVQIVRQQSYSIMSIIKEEVLAYVVQLPLYGVIDTPCWKLHTSPLCTTNTKEGSNICLTRTDRGWYCDNAGSVSFFPQAETCKVQSNRVFCDTMNSLTLPSEVNLCNIDIFNPKYDCKIMTSKTDVSSSVITSLGAIVSCYGKTKCTASNKNRGIIKTFSNGCDYVSNKGVDTVSVGNTLYYVNKQEGKSLYVKGEPIINFYDPLVFPSNEFDASISQVNEKINQSLAFIRKSDELLHNVNAGKSTTNIMITTIIIVIIVILLSLIAVGLLLYCKARSTPVTLSKDQLSGINNIAFSN

SEQ ID NO: 8407 - protein, 574 aa, Artificial Sequence
  derived and/or modified protein sequence (wt) from HRSV__AFX60138.1__F0
MELPILKTNSITTILAAVTLCFASSQNITEEFYQSTCSAVSKGYLSALRTGWYTSVITIELSNIKENKCNGTDTKVKLIKQELDKYKNAVTELQLLMQSTPAANSRARRELPRFMNYTLNNTKNTNVTLSKKRKRRFLGFLLGVGSAIASGIAVSKVLHLEGEVNKIKSALLSTNKAVVSLSNGVSVLTSKVLDLKNYIDKQLLPIVNKQSCSISNIETVIEFQQKNNRLLEITREFSVNAGVTTPVSTYMLTNSELLSLINDMPITNDQKKLMSSNVQIVRQQSYSIMSIIKEEVLAYVVQLPLYGVIDTPCWKLHTSPLCTTNTKEGSNICLTRTDRGWYCDNAGSVSFFPQAETCKVQSNRVFCDTMNSLTLPSEVNLCNIDIFNPKYDCKIMTSKTDVSSSVITSLGAIVSCYGKTKCTASNKNRGIIKTFSNGCDYVSNKGVDTVSVGNTLYYVNKQEGKSLYVKGEPIINFYDPLVFPSDEFDASISQVNEKINQSLAFIRKSDELLHNVNAGKSTTNIMITTIIIVIIVILLALIAVGLLLYCKARSTPVTLSKDQLSGINNIAFSN

SEQ ID NO: 8408 - protein, 574 aa, Artificial Sequence
  derived and/or modified protein sequence (wt) from HRSV__AFP99060.1__F0
MELLIHRSSAIFLTLAINALYLTSSQNITEEFYQSTCSAVSRGYLSALRTGWYTSVITIELSNIKETKCNGTDTKVKLIKQELDKYKNAVTELQLLMQNTPAVNNRARREAPQYMNYTINTTKNLNVSISKKRKRRFLGFLLGVGSAIASGIAVSKVLHLEGEVNKIKNALLSTNKAVVSLSNGVSVLTSKVLDLKNYINNQLLPIVNQQSCRISNIETVIEFQQKNSRLLEITREFSVNAGVTTPLSTYMLTNSELLSLINDMPITNDQKKLMSSNVQIVRQQSYSIMSIIKEEVLAYVVQLPIYGVIDTPCWKLHTSPLCTTNIKEGSNICLTRTDRGWYCDNAGSVSFFPQADTCKVQSNRVFCDTMNSLTLPSEVSLCNTDIFNSKYDCKIMTSKTDISSSVITSLGAIVSCYGKTKCTASNKNRGIIKTFSNGCDYVSNKGVDTVSVGNTLYYVNKLEGKNLYVKGEPIINYYDPLVFPSDEFDASISQVNEKINQSLAFIRRSDELLHNVNTGKSTTNIMITAIIIVIIVVLLSLIAIGLLLYCKAKNTPVTLSKDQLSGINNIAFSK

SEQ ID NO: 8409 - protein, 574 aa, Artificial Sequence
  derived and/or modified protein sequence (wt) from HRSV__AFM95365.1__F0
MELPILKTNAITTILAAVTLCFASSQNITEEFYQSTCSAVSKGYLSALRTGWYTSVITIELSNIKENKCNGTDAKVKLIKQELDKYKNAVTELQLLMQSTPAANNRARRELPRFMNYTLNNTKNTNVTVSKKRKRRFLGFLLGVGSAIASGIAVSKVLHLEGEVNKIKSALLSTNKAVVSLSNGVSVLTSKVLDLKNYIDKQLLPIVNKQSCSISNIETVIEFQQKNNRLLEITREFSVNAGVTTPVSTYMLTNSELLSLINDMPITNDQKKLMSNNVQIVRQQSYSIMSIIKEEVLAYVVQLPLYGVIDTPCWKLHTSPLCTTNTKEGSNICLTRTDRGWYCDNAGSVSFFPQAETCKVQSNRVFCDTMNSLTLPSEVNLCNIDIFNPKYDCKIMTSKTDVSSSVITSLGAIVSCYGKTKCTASNKNRGIIKTFSNGCDYVSNKGVDTVSVGNTLYYVNKQEGKSLYVKGEPIINFYDPLVFPSDEFDASISQVNEKINQSLAFIRKYDELLHNVNAGKSTTNIMITTIIIVIIVILLSLIAVGLLLYCKARSTPVTLSKDQLSGINNIAFSN

SEQ ID NO: 8410 - protein, 574 aa, Artificial Sequence
  derived and/or modified protein sequence (wt) from HRSV__AFM55563.1__F0
MELPILKTNAITTILAAVTLCFASSQNITEEFYQSTCSAVSKGYLSALRTGWYTSVITIELSNIKENKCNGTDAKVKLIKQELDKYKNAVTELQLLMQSTQAANSRARRELPRFMNYTLNNTKNTNVTLSKKRKRRFLGFLLGVGSAIASGIAVSKVLHLEGEVNKIKSALLSTNKAVVSLSNGVSVLTSKVLDLKNYIDKQLLPIVNKQSCSISNIETVIEFQQKNNRLLEITREFSVNAGVTTPVSTYMLTNSELLSLINDMPITNDQKKLMSNNVQIVRQQSYSIMSIIKEEVLAYVVQLPLYGVIDTPCWKLHTSPLCTTNTKEGSNICLTRTDRGWYCDNAGSVSFFPQAETCKVQSNRVFCDTMNSLTLPSEVNLCNIDIFNPKYDCKIMTSKTDVSSSVITSLGAIVSCYGKTKCTASNKNRGIIKTFSNGCDYVSNKGVDTVSVGNTLYYVNKQEGKSLYVKGEPIINFYDPLVFPSDEFDASISQVNEKINQSLAFIRKSDELLHNVNAGKSTTNIMITTIIIVIIVILLSLIAVGLLLYCKARSTPVTLSKDQLSGINNIAFSN

SEQ ID NO: 8411 - protein, 574 aa, Artificial Sequence
  derived and/or modified protein sequence (wt) from HRSV__AFM55530.1__F0
MELPILKTNAITTILAAVTLCFASSQNITEEFYQSTCSAVSKGYLSALRTGWYTSVITIELSNIKENKCNGTDAKVKLIKQELDKYKNAVTELQLLMQSTPAANSRARRELPRFMNYTLNSTKNTNVTLSKKRKRRFLGFLLGVGSAIASGIAVSKVLHLEGEVNKIKSALLSTNKAVVSLSNGVSVLTSKVLDLKNYIDKQLLPIVNKQSCSISNIETVIEFQQKNNRLLEITREFSVNAGVTTPVSTYMLTNSELLSLINDMPITNDQKKLMSSNVQIVRQQSYSIMSIIKEEVLAYVVQLPLYGVIDTPCWKLHTSPLCTTNTKEGSNICLTRTDRGWYCDNAGSVSFFPQAETCKVQSNRVFCDTMNSLTLPSEVNLCNIDIFNPKYDCKIMTSKTDVSSSVITSLGAIVSCYGKTKCTASNKNRGIIKTFSNGCDYVSNKGVDTVSVGNTLYYVNKQEGKSLYVKGEPIINFYDPLVFPSDEFDASISQINEKINQSLAFIRKSDELLHNVNAGKSTTNIMITTIIIVIIVILLALIAVGLLLYCKARSTPVTLSKDQLSGINNIAFSN

SEQ ID NO: 8412 - protein, 574 aa, Artificial Sequence
  derived and/or modified protein sequence (wt) from HRSV__AFM55442.1__F0
MELPILKTNAITTIFAAVTLCFASSQNITEEFYQSTCSAVSKGYLSALRTGWYTSVITIELSNIKENKCNGTDAKVKLIKQELDKYKNAVTELQLLMQSTPAANNRARRELPRFMNYTLNNTKNNNVTLSKKRKRRFLGFLLGVGSAIASGIAVSKVLHLEGEVNKIKSALLSTNKAVVSLSNGVSVLTSKVLDLKNYIDKQLLPIVNKQSCSISNIETVIEFQQKNNRLLEITREFSVNAGVTTPVSTYMLTNSELLSLINDMPITNDQKKLMSNNVQIVRQQSYSIMSIIKEEVLAYVVQLPLYGVIDTPCWKLHTSPLCTTNTKEGSNICLTRTDRGWYCDNAGSVSFFPQAETCKVQSNRVFCDTMNSLTLPSEVNLCNIDIFNPKYDCKIMTSKTDVSSSVITSLGAIVSCYGKTKCTASNKNRGIIKTFSNGCDYVSNKGVDTVSVGNTLYYVNKQEGKSLYVKGEPIINFYDPLVFPSDEFDASISQVNEKINQSLAFIRKSDELLHNVNVGKSTTNIMITTIIIVIIVILLLLIAVGLFLYCKARSTPVTLSKEQLSGINNIAFSN

SEQ ID NO: 8413 - protein, 574 aa, Artificial Sequence
  derived and/or modified protein sequence (wt) from HRSV__AFM55420.1__F0
MELPILKTNAITTILAAVTLCFASSQNITEEFYQSTCSAVSKGYLSALRTGWYTSVITIELSNIKENKCNGTDAKVKLIKQELDKYKNAVTELQLLMQSTPAANNRARRELPRFMNYTLNNTKTTNVTLSRKRKRRFLGFLLGVGSAIASGIAVSKVLHLEGEVNKIKSALLSTNKAVVSLSNGVSVLTSKVLDLKNYIDKQLLPVVNKQSCRISNIETVIEFQQKNNRLLEITREFSVNAGVTTPVSTYMLTNSELLSLINDMPITNDQKKLMSNNVQIVRQQSYSIMSIIKEEVLAYVVQLPLYGVIDTPCWKLHTSPLCTTNTKEGSNICLTRTDRGWYCDNAGSVSFFPQAETCKVQSNRVFCDTMNSLTLPSEVNLCNIDIFNPKYDCKIMTSKTDVSSSVITSLGAIVSCYGKTKCTASNKNRGIIKTFSNGCDYVSNKGVDTVSVGNTLYYVNKQEGKSLYVKGEPIINFYDPLVFPSDEFDASISQVNEKINQSLAFIRKSDELLHNVNAGKSTTNIMITTIIIVIIVILLSLIAVGLLLYCKARSTPVTLSKDQLSGINNIAFSS

SEQ ID NO: 8414 - protein, 574 aa, Artificial Sequence
  derived and/or modified protein sequence (wt) from HRSV__AFM55552.1__F0
MELPILNTNAITTILAAVTLCFASSQNITEEFYQSTCSAVSKGYLSALRTGWYTSVITIELSNIKENKCNGTDAKVKLIKQELDKYKNAVTELQLLMQSTPAANSRARRELPRFMNYTLNNTKNTNVTLSKKRKRRFLGFLLGVGSAIASGIAVSKVLHLEGEVNKIKSALLSTNKAVVSLSNGVSVLTSKVLDLKNYIDKQLLPIVNKQSCSISNIETVIEFQQKNNRLLEITREFSVNAGVTTPVSTYMLTNSELLSLINDMPITNDQKKLMSNNVQIVRQQSYSIMSIIKEEVLAYVVQLPLYGVIDTPCWKLHTSPLCTTNTKEGSNICLTRTDRGWYCDNAGSVSFFPQAETCKVQSNRVFCDTMNSLTLPSEVNLCNIDIFNPKYDCKIMTSKTDVSSSVITSLGAIVSCYGKTKCTASNKNRGIIKTFSNGCDYVSNKGVDTVSVGNTLYYVNKQEGKSLYVKGEPIINFYDPLVFPSDEFDASISQVNEKINQSLAFIRKSDELLHNVNAGKSTTNIMITTIIIVIIVILLSLIAVGLLLYCKARSTPVTLSKDQLSGINNIAFSN

SEQ ID NO: 8415 - protein, 574 aa, Artificial Sequence
  derived and/or modified protein sequence (wt) from HRSV__AFM55365.1__F0
MELPILKTNAITTILAAVTLCFTSSQNITEEFYQSTCSAVSKGYLSALRTGWYTSVITIELSNIKENKCNGTDAKVKLIKQELDKYKNAVTELQLLMQSTPAANSRARRELPRFMNYTLNNTKNTNVTLSKKRKRRFLGFLLGVGSAIASGIAVSKVLHLEGEVNKIKSALLSTNKAVVSLSNGVSVLTSKVLDLKNYIDKQLLPIVNKQSCSISNIETVIEFQQKNNRLLEITREFSVNAGVTTPVSTYMLTNSELLSLINDMPITNDQKKLMSNNVQIVRQQSYSIMSIIKEEVLAYVVQLPLYGVIDTPCWKIHTSPLCTTNTKEGSNICLTRTDRGWYCDNAGSVSFFPQAETCKVQSNRVFCDTMNSLTLPSEVNLCNIDIFNPKYDCKIMTSKTDVSSSVITSLGAIVSCYGKTKCTASNKNRGIIKTFSNGCDYVSNKGVDTVSVGNTLYYVNKQEGKSLYVKGEPIINFYDPLVFPSDEFDASISQVNEKINQSLAFIRKSDELLHNVNAGKSTTNIMITTIIIVIIVILLSLIAVGLLLYCKARSTPVTLSKDQLSGINNIAFSN

SEQ ID NO: 8416 - protein, 574 aa, Artificial Sequence
  derived and/or modified protein sequence (wt) from HRSV__AFP99059.1__F0
MELLIHRSSAIFLTLAINALYLTSSQNITEEFYQSTCSAVSRGYLSALRTGWYTSVITIELSNIKETKCNGTDTKVKLIKQELDKYKNAVTELQLLMQNTPAANNRARREAPQYMNYTINTTKNLNVSISKKRKRRFLGFLLGVGSAIASGIAVSKVLHLEGEVNKIKNALLSTNKAVVSLSNGVSVLTSKVLDLKNYINNQLLPIVNQQSCRISNIETVIEFQQKNSRLLEITREFSVNAGVTTPLSTYMLTNSELLSLINDMPITNDQKKLMSSNVQIVRQQSYSIMSIIKEEVLAYVVQLPIYGVIDTPCWKLHTSPLCTTNIKEGSNICLTRTDRGWYCDNAGSVSFFPQADTCKVQSNRVFCDTMNSLTLPSEVSLCNTDIFNSKYDCKIMTSKTDISSSVITSLGAIVSCYGKTKCTASNKNRGIIKTFSNGCDYVSNKGVDTVSVGNTLYYVNKLEGKNLYVKGEPIINYYDPLVFPSDEFDASISQVNEKINQSLAFIRRSDELLHNVNTGKSTTNIMITVIIIVIIVVLLSLIAIGLLLYCKAKNTPVTLSKDQLSGINNIAFSK

SEQ ID NO: 8417 - protein, 574 aa, Artificial Sequence
  derived and/or modified protein sequence (wt) from HRSV__AFM55354.1__F0
MELPILKTNAITTILAAVTLCFVSSQNITEEFYQSTCSAVSKGYLSALRTGWYTSVITIELSNIKENKCNGTDAKVKLIKQELDKYKNAVTELQLLMQSTPASNNRARRELPRFMNYTLNNTKNTNVTLSKKRKRRFLGFLLGVGSAIASGIAVSKVLHLEGEVNKIKSALLSTNKAVVSLSNGVSVLTSKVLDLKNYIDKQLLPIVNKQSCSISNIETVIEFQQKNNRLLEITREFSVNAGVTTPVSTYMLTNSELLSLINDMPITNDQKKLMSNNVQIVRQQSYSIMSIIKEEVLAYVVQLPLYGVIDTPCWKLHTSPLCTTNTKEGSNICLTRTDRGWYCDNAGSVSFFPQAETCKVQSNRVFCDTMNSLTLPSEVNLCNIDIFNPKYDCKIMTSKTDVSSSVITSLGAIVSCYGKTKCTASNKNRGIIKTFSNGCDYVSNKGVDTVSVGNTLYYVNKQEGKSLYVKGEPIINFYDPLVFPSDEFDASISQVNEKINQSLAFIRKSDELLHNVNAGKSTTNIMITTIIIVIVVILLSLIAVGLLLYCKARSTPVTLSKDQLSGINNIAFSS

SEQ ID NO: 8418 - protein, 574 aa, Artificial Sequence
  derived and/or modified protein sequence (wt) from HRSV__AFM55343.1__F0
MELPILKTNAITTILAAVTLCFASSQNITEEFYQSTCSAVSKGYLSALRTGWYTSVITIELSNIKENKCNGTDAKVKLIKQELDKYKNAVTELQLLMQSTPAANSRARRELPRFMNYTLNNTKNANVTLSKKRKRRFLGFLLGVGSAIASGIAVSKVLHLEGEVNKIKSALLSTNKAVVSLSNGVSVLTSKVLDLKNYIDKQLLPIVNKQSCSISNIETVIEFQQKNNRLLEITREFSVNAGVTTPVSTYMLTNSELLSLINDMPITNDQKKLMSSNVQIVRQQSYSIMSIIKEEVLAYVVQLPLYGVIDTPCWKLHTSPLCTTNTKEGSNICLTRTDRGWYCDNAGSVSFFPQAETCKVQSNRVFCDTMNSLTLPSEVNLCNIDIFNPKYDCKIMTSKTDVSSSVITSLGAIVSCYGKTKCTASNKNRGIIKTFSNGCDYVSNKGVDTVSVGNTLYYVNKQEGKSLYVKGEPIINFYDPLVFPSDEFDASISQVNEKINQSLAFIRKSDELLHNVNAGKSTTNIMITTIIIVIIVILLALIAVGLLLYCKARSTPVTLSKDQLSGINNIAFSN

SEQ ID NO: 8419 - protein, 574 aa, Artificial Sequence
  derived and/or modified protein sequence (wt) from HRSV__AFM55387.1__F0
MELPILKTNAITIILAAVTLCFASSQNITEEFYQSTCSAVSKGYLSALRTGWYTSVITIELSNIKENKCNGTDAKVKLIKQELDKYKNAVTELQLLMQSTPAANSRARRELPRFMNYTLNNTKNTNVTLSKKRKRRFLGFLLGVGSAIASGIAVSKVLHLEGEVNKIKSALLSTNKAVVSLSNGVSVLTSKVLDLKNYIDKQLLPIVNKQSCSISNIETVIEFQQKNNRLLEITREFSVNAGVTTPVSTYMLTNSELLSLINDMPITNDQKKLMSSNVQIVRQQSYSIMSIIKEEVLAYVVQLPLYGVIDTPCWKLHTSPLCTTNTKEGSNICLTRTDRGWYCDNAGSVSFFPQAETCKVQSNRVFCDTMNSLTLPSEVNLCNIDIFNPKYDCKIMTSKTDVSSSVITSLGAIVSCYGKTKCTASNKNRGIIKTFSNGCDYVSNKGVDTVSVGNTLYYVNKQEGKSLYVKGEPIINFYDPLVFPSDEFDASISQVNEKINQSLAFIRKSDELLHNVNAGKSTTNIMITTIIIVIIVILLALIAVGLLLYCKARSAPVTLSKDQLSGINNIAFSN

SEQ ID NO: 8420 - protein, 574 aa, Artificial Sequence
  derived and/or modified protein sequence (wt) from HRSV__AFM55299.1__F0
MDLPILKTKAITTILAAVSLCFASSQNITEEFYQSTCSAVSKGYLSALRTGWYTSVITIELSNIKENKCNGTDAKVKLIKQELDKYKNAVTELQLLMQSTPAANNRARRELPRFMNYTLNNNKNNNVTLSKKRKRRFLGFLLGVGSAIASGIAVSKVLHLEGEVNKIKSALLSTNKAVVSLSNGVSVLTSKVLDLKNYIDKQLLPIVNKQSCSISNIETVIEFQQKNNRLLEITREFSVNAGVTTPVSTYMLTNSELLSLINDMPITNDQKKLMSNNVQIVRQQSYSIMSIIKEEVLAYVVQLPLYGVIDTPCWKLHTSPLCTTNTKEGSNICLTRTDRGWYCDNAGSVSFFPQAETCKVQSNRVFCDTMNSLTLPSEVNLCNIDIFNPKYDCKIMTSKTDVSSSVITSLGAIVSCYGKTKCTASNKNRGIIKTFSNGCDYVSNKGVDTVSVGNTLYYVNKQEGKSLYVKGEPIINFYDPLVFPSDEFDASISQVNEKINQSLAFIRKSDELLHNVNVGKSTTNIMITTIIIVIIVILLLLIAVGLFLYCKARSTPVTLSKDQLSGINNIAFSN

SEQ ID NO: 8421 - protein, 574 aa, Artificial Sequence
  derived and/or modified protein sequence (wt) from HRSV__AFM55288.1__F0
MDLPILKTNAITTIFAAVTLCFASSQNITEEFYQSTCSAVSKGYLSALRTGWYTSVITIELSNIKENKCNGTDAKVKLIKQELDKYKNAVTELQLLMQSTPAANNRARRELPRFMNYTLNNTKNNNVTLSKKRKRRFLGFLLGVGSAIASGIAVSKVLHLEGEVNKIKSALLSTNKAVVSLSNGVSVLTSKVLDLKNYIDKQLLPIVNKQSCSISNIETVIEFQQKNNRLLEITREFSVNAGVTTPVSTYMLTNSELLSLINDMPITNDQKKLMSNNVQIVRQQSYSIMSIIKEEVLAYVVQLPLYGVIDTPCWKLHTSPLCTINTKEGSNICLTRTDRGWYCDNAGSVSFFPQAETCKVQSNRVFCDTMNSLTLPSEVNLCNIDIFNPKYDCKIMTSKTDVSSSVITSLGAIVSCYGKTKCTASNKNRGIIKTFSNGCDYVSNKGVDTVSVGNTLYYVNKQEGKSLYVKGEPIINFYDPLVFPSDEFDASISQVNEKINQSLAFIRKSDELLHNVNVGKSTTNIMITTIIIVIIVILLLLIAVGLFLYCKARSTPVTLSKDQLSGINNIAFSN

SEQ ID NO: 8422 - protein, 574 aa, Artificial Sequence
  derived and/or modified protein sequence (wt) from HRSV__AFM55266.1__F0
MELPILKTNAITTILAAVTFCFASSQNITEEFYQSTCSAVSKGYLSALRTGWYTSVITIELSNIKENKCNGTDAKVKLIKQELDKYKNAVTELQLLMQSTPASNNRARRELPRFMNYTLNNTKNTNVTLSKKRKRRFLGFLLGVGSAIASGIAVSKVLHLEGEVNKIKSALLSTNKAVVSLSNGVSVLTSKVLDLKNYIDKQLLPIVNKQSCSISNIETVIEFQQKNNRLLEITREFSVNAGVTTPVSTYMLTNSELLSLINDMPITNDQKKLMSNNVQIVRQQSYSIMSIIKEEVLAYVVQLPLYGVIDTPCWKLHTSPLCTTNTKEGSNICLTRTDRGWYCDNAGSVSFFPQAETCKVQSNRVFCDTMNSLTLPSEVNLCNIDIFNPKYDCKIMTSKTDVSSSVITSLGAIVSCYGKTKCTASNKNRGIIKTFSNGCDYVSNKGVDTVSVGNTLYYVNKQEGKSLYVKGEPIINFYDPLVFPSDEFDASISQVNEKINQSLAFIRKSDELLHNVNAGKSTTNIMITTIIIVIVVILLSLIAVGLLLYCKARSTPVTLSKDQLSGINNIAFSS

SEQ ID NO: 8423 - protein, 574 aa, Artificial Sequence
  derived and/or modified protein sequence (wt) from HRSV__AFM55277.1__F0
MELPILKTNAITTILAAVTLCFASSQNITEEFYQSTCSAVSKGYLSALRTGWYTSVITIELSNIKENKCNGTDAKVKLIKQELDKYKNAVTELQLLMQSTPASNNRARRELPRFMNYTLNNTKNTNVTLSKKRKRRFLGFLLGVGSAIASGIAVSKVLHLEGEVNKIKSALLSTNKAVVSLSNGVSVLTSKVLDLKNYIDKQLLPIVNKQSCSISNIETVIEFQQKNNRLLEITREFSVNAGVTTPVSTYMLTNSELLSLINDMPITNDQKKLMSNNVQIVRQQSYSIMSIIKEEVLAYVVQLPLYGVIDTPCWKLHTSPLCTTNTKEGSNICLTRTDRGWYCDNAGSVSFFPQAETCKVQSNRVFCDTMNSLTLPSEVNLCNIDIFNSKYDCKIMTSKTDVSSSVITSLGAIVSCYGKTKCTASNKNRGIIKTFSNGCDYVSNKGVDTVSVGNTLYYVNKQEGKSLYVKGEPIINFYDPLVFPSDEFDASISQVNEKINQSLAFIRKSDELLHNVNAGKSTTNIMITTIIIVIVVILLSLIAVGLLLYCKARSTPVTLSKDQLSGINNIAFSS

SEQ ID NO: 8424 - protein, 574 aa, Artificial Sequence
  derived and/or modified protein sequence (wt) from HRSV__AFM55255.1__F0
MELPILKTNAITTILAAVTLCFASSQNITEEFYQSTCSAVSKGYLSALRTGWYTSVITIELSNIKENKCNGTDAKVKLIKQELDKYKNAVTELQLLMQSTPAANNRARRELPRFMNYTLNNTKNNNVTLSKKRKRRFLGFLLGVGSAIASGIAVSKVLHLEGEVNKIKSALLSTNKAVVSLSNGVSVLTSKVLDLKNYIDKQLLPIVNKQSCSISNIETVIEFQQKNNRLLEITREFSVNAGVTTPVSTYMLTNSELLSLINDMPITNDQKKLMSNNVQIVRQQSYSIMSIIKEEVLAYVVQLPLYGVIDTPCWKLHTSPLCTINTKEGSNICLTRTDRGWYCDNAGSVSFFPQAETCKVQSNRVFCDTMNSLTLPSEVNLCNIDIFNPKYDCKIMTSKTDVSSSVITSLGAIVSCYGKTKCTASNKNRGIIKTFSNGCDYVSNKGVDTVSVGNTLYYVNKQEGKSLYVKGEPIINFYDPLVFPSDEFDASISQVNEKINQSLAFIRKSDELLHNVNVGKSTTNIMITTIIIVIIVILLLLIAVGLFLYFKARSTPVTLSKDQLSGINNIAFSN

SEQ ID NO: 8425 - protein, 574 aa, Artificial Sequence
  derived and/or modified protein sequence (wt) from HRSV__AFM55222.1__F0
MELPILKTNVITTILAAVTLCFASSQNITEEFYQSTCSAVSKGYLSALRTGWYTSVITIELSNIKENKCNGTDAKVKLIKQELDKYKNAVTELQLLMQSTPAANNRARRELPRFMNYTLNNTKTTNVTLSKKRKRRFLGFLLGVGSAIASGIAVSKVLHLEGEVNKIKSALLSTNKAVVSLSNGVSVLTSKVLDLKNYIDKQLLPIVNKQSCSISNIETVIEFQQKNNRLLEITREFSVNAGVTTPVSTYMLTNSELLSLINDMPITNDQKKLMSNNVQIVRQQSYSIMSIIKEEVLAYVVQLPLYGVIDTPCWKLHTSPLCTTNTKEGSNICLTRTDRGWYCDNAGSVSFFPQAETCKVQSNRVFCDTMNSLTLPSEVNLCNIDIFNPKYDCKIMTSKTDVSSSVITSLGAIVSCYGKTKCTASNKNRGIIKTFSNGCDYVSNKGVDTVSVGNTLYYVNKQEGKSLYVKGEPIINFYDPLVFPSDEFDASISQVNEKINQSLAFIRKSDELLHNVNAGKSTTNIMITTIIIVIIVILLSLIAVGLLLYCKARSTPVTLSKDQLSGINNIAFSS

SEQ ID NO: 8426 - protein, 574 aa, Artificial Sequence
  derived and/or modified protein sequence (wt) from HRSV__AFM55211.1__F0
MELPILKTNAITTILAAVTLCFASSQNITEEFYQSTCSAVSKGYLSALRTGWYTSVITIELSNIKENKCNGTDAKVKLIKQELDKYKNAVTELQLLMQSTPAANNRARRELPRFMNYTLNNTKTTNVTLSRKRKRRFLGFLLGVGSAIASGIAVSKVLHLEGEVNKIKSALLSTNKAVVSLSNGVSVLTSKVLDLKNYIDKQLLPIVNKQSCSISNIETVIEFQQKNNRLLEITREFSVNAGVTTPVSTYMLTNSELLSLINDMPITNDQKKLMSNNVQIVRQQSYSIMSIIKEEVLAYVVQLPLYGVIDTPCWKLHTSPLCTTNTKEGSNICLTRTDRGWYCDNAGSVSFFPQAETCKVQSNRVFCDTMNSLTLPSEVNLCNIDIFNPKYDCKIMTSKTDVSSSVITSLGAIVSCYGKTKCTASNKNRGIIKTFSNGCDYVSNKGVDTVSVGNTLYYVNKQEGKSLYVKGEPIINFYDPLVFPSDEFDASISQVNEKINQSLAFIRKSDELLHNVNAGKSTTNIMITTIIIVIIVILLSLIAVGLLLYCKARSTPVTLSKDQLSGINNIAFSS

SEQ ID NO: 8427 - protein, 574 aa, Artificial Sequence
  derived and/or modified protein sequence (wt) from HRSV__AFM55244.1__F0
MELPILKTNAITTIFAAVTLCFASSQNITEEFYQSTCSAVSKGYLSALRTGWYTSVITIELSNIKENKCNGTDAKVKLIKQELDKYKNAVTELQLLMQSTPAANNRARRELPRFMNYTLNNTKNNNVTLSKKRKRRFLGFLLGVGSAIASGIAVSKVLHLEGEVNKIKSALLSTNKAVVSLSNGVSVLTSKVLDLKNYIDKQLLPIVNKQSCSISNIETVIEFQQKNNRLLEITREFSVNAGVTTPVSTYMLTNSELLSLINDMPITNDQKKLMSNNVQIVRQQSYSIMSIIKEEVLAYVVQLPLYGVIDTPCWKLHTSPLCTTNTKEGSNICLTRTDRGWYCDNAGSVSFFPQAETCKVQSNRVFCDTMNSLTLPSEVNLCNIDIFNPKYDCKIMTSKTDVSSSVITSLGAIVSCYGKTKCTASNKNRGIIKTFSNGCDYVSNKGVDTVSVGNTLYYVNKQEGKSLYVKGEPIINFYDPLVFPSDEFDASISQVNEKINQSLAFIRKSDELLHNVNVGKSTTNIMITTIIIVIIVILLLLIAVGLFLYCKARSTPVTLSKDQLSGINNIAFSN

SEQ ID NO: 8428 - protein, 574 aa, Artificial Sequence
  derived and/or modified protein sequence (wt) from HRSV__AFI25262.1__F0
MELLIHRSSAIFLTLAINALYLTSSQNITEEFYQSTCSAVSRGYFSALRTGWYTSVITIELSNIKEIKCNGTDTKVKLIKQELDKYKNAVTELQLLMQNTPAANNRARREAPQYMNYTINTTKNLNVSISKKRKRRFLGFLLGVGSAIASGIAVSKVLHLEGEVNKIKNALLSTNKAVVSLSNGVSVLTSKVLDLKNYINNQLLPIVNQQSCRISNIETVIEFQQKNSRLLEITREFSVNAGVTTPLSTYMLTNSELLSLINDMPITNDQKKLMSSNVQIVRQQSYSIMSIIKEEVLAYVVQLPIYGVIDTPCWKLHTSPLCTTNIKEGSNICLTRTDRGWYCDNAGSVSFFPQADTCKVQSNRVFCDTMNSLTLPSEVSLCNTDIFNSKYDCKIMTSKTDISSSVITSLGAIVSCYGKTKCTASNKNRGIIKTFSNGCDYVSNKGVDTVSVGNTLYYVNKLEGKNLYVKGEPIINYYDPLVFPSDEFDSSISQVNEKINQSLAFIRRSDELLHNVNTGKSTTNIMITAIIIVIIVVLLSLIAIGLLLYCKAKNTPVTLSKDQLSGINNIAFSK

SEQ ID NO: 8429 - protein, 574 aa, Artificial Sequence
  derived and/or modified protein sequence (wt) from HRSV__AFD34266.1__F0
MELLIHRSSAIFLTLAINALYLTSSQNITEEFYQSTCSAVSRGYFSALRTGWYTSVITIELSNIKETKCNGTDTKVKLIKQELDKYKNAVTELQLLMQNTPAANNRARREAPQYMNYTINTTKNLNVSISKKRKRRFLGFLLGVGSAIASGIAVSKVLHLEGEVNKIKNALLSTNKAVVSLSNGVSVLTSKVLDLKNYINNQLLPIVNQQSCRISNIETVIEFQQKNSRLLEITREFSVNAGVTTPLSTYMLTNSELLSLINDMPITNDQKKLMSSNVQIVRQQSYSIMSIIKEEVLAYVVQLPIYGVIDTPCWKLHTSPLCTTNIKEGSNICLTRTDRGWYCDNAGSVSFFPQADTCKVQSNRVFCDTMNSLTLPSEVSLCNTDIFNSKYDCKIMTSKTDISSSVITSLGAIVSCYGKTKCTASNKNRGIIKTFSNGCDYVSNKGVDTVSVGNTLYYVNKLEGKNLYVKGEPIINYYDPLVFPSDEFDASISQVNEKINQSLAFIRRSDELLHNVNTGKSTTNIMITVIIIVIIVVLLSLIAIGLLLYCKAKNTPVTLSKDQLSGINNIAFSK

SEQ ID NO: 8430 - protein, 574 aa, Artificial Sequence
  derived and/or modified protein sequence (wt) from HRSV__AFM55332.1__F0
MELPILKTNAITTILAAVTLCFASSQNITEEFYQSTCSAVSKGYLSALRTGWYTSVITIELSNIKENKCNGTDAKVKLIKQELDKYKNAVTELQLLMQSTPATNNRARRELPRFMNYTLNNTKNTNVTLSKKRKRRFLGFLLGVGSAIASGIAVSKVLHLEGEVNKIKSALLSTNKAVVSLSNGVSVLTSKVLDLKNYIDKQLLPIVNKQSCSISNIETVIEFQQKNNRLLEITREFSVNAGVTTPVSTYMLTNSELLSLINDMPITNDQKKLMSNNVQIVRQQSYSIMSIIKEEVLAYVVQLPLYGVIDTPCWKLHTSPLCTTNTKEGSNICLTRTDRGWYCDNAGSVSFFPQAETCKVQSNRVFCDTMNSLTLPSEVNLCNIDIFNPKYDCKIMTSKTDVSSSVITSLGAIVSCYGKTKCTASNKNRGIIKTFSNGCDYVSNKGVDTVSVGNTLYYVNKQEGKSLYVKGEPIINFYDPLVFPSDEFDASISQVNEKINQSLAFIRKSDELLHNVNAGKSTTNIMITTIIIVIIVILLSLIAVGLLLYCKARSTPVTLSKDQLSGINNIAFSS

SEQ ID NO: 8431 - protein, 574 aa, Artificial Sequence
  derived and/or modified protein sequence (wt) from HRSV__AFD34264.1__F0
MELLIHRSSAILLTLAINALYLTSSQNITEEFYQSTCSAVSRGYFSALRTGWYTSVITIELSNIKETKCNGTDTKVKLIKQELDKYKNAVTELQLLMQNTPAANNRARREAPQYMNYTINTTKNLNVSISKKRKRRFLGFLLGVGSAIASGIAVSKVLHLEGEVNKIKNALLSTNKAVVSLSNGVSVLTSKVLDLKNYINNQLLPIVNQQSCRISNIETVIEFQQKNSRLLEITREFSVNAGVTTPLSTYMLTNGELLSLINDMPITNDQKKLMSSNAQIVRQQSYSIMSIIKEEVLAYVVQLPIYGVIDTPCWKLHTSPLCTTNIKEGSNICLTRTDRGWYCDNAGSVSFFPQADTCKVQSNRVFCDTMNSLTLPSEVSLCNTDIFNSKYDCKIMTSKTDISSSVITSLGAIVSCYGKTKCTASNKNRGIIKTFSNGCDYVSNKGVDTVSVGNTLYYVNKLEGKNLYVKGEPIINYYDPLVFPSDEFDASISQVNEKINQSLAFIRRSDELLHNVNTGKSTTNIMITAIIIVIIVVLLSLIAIGLLLYCKAKNTPVTLSKEQLSGINNIAFSK

SEQ ID NO: 8432 - protein, 574 aa, Artificial Sequence
  derived and/or modified protein sequence (wt) from HRSV__AFD34262.1__F0
MELLIHRSSAIFLTLAINALYLTSSQNITEEFYQSTCSAVSRGYFSALRTGWYTSVITIELSNIKETKCNGTDTKVKLIKQELDKYKNAVTELQLLMQNTPAANNRARREAPQYMNYTINTTKNLNVSISKKRKRRFLGFLLGVGSAIASGIAVSKVLHLEGEVNKIKNALLSTNKAVVSLSNGVSVLTSKVLDLKNYINNQLLPIVNQQSCRISNIETVIEFQQKNSRLLEITREFSVNAGVTTPLSTHMLTNSELLSLINDMPITNDQKKLMSSNVQIVRQQSYSIMSIIKEEVLAYVVQLPIYGVIDTPCWKLHTSPLCTTNIKEGSNICLTRTDRGWYCDNAGSVSFFPQADTCKVQSNRVFCDTMNSLTLPSEVSLCNTDIFNSKYDCKIMTSKTDISSSVITSLGAIVSCYGKTKCTASNKNRGIIKTFSNGCDYVSNKGVDTVSVGNTLYYVNKLEGKNLYVKGEPIINYYDPLVFPSDEFDASISQVNEKINQSLAFIRRSDELLHNVNTGKSTTNIMITAIIIVIIVVLLSLIAIGLLLYCKAKNTPVTLSKDQLSGINNIAFSK

SEQ ID NO: 8433 - protein, 574 aa, Artificial Sequence
  derived and/or modified protein sequence (wt) from HRSV__AFD34265.1__F0
MELLIHRSSAIFLTLAINALYLTSSQNITEEFYQSTCSAVSRGYLSALRTGWYTSVITIELSNIKETKCNGTDTKVKLIKQELDKYKNAVTELQLLMQNTPAANNRARREASQYMNYTINTTKNLNVSISKKRKRRFLGFLLGVGSAIASGIAVSKVLHLEGEVNKIKNALLSTNKAVVSLSNGVSVLTSKVLDLKNYINNQLLPIVNQQSCRISNIETVIEFQQKNSRLLEIAREFSVNAGVTTPLSTYMLTNSELLSLINDMPITNDQKKLMSSNVQIVRQQSYSIMSIIKEEVLAYVVQLPIYGVIDTPCWKLHTSPLCTTNIKEGSNICLTRTDRGWYCDNAGSVSFFPQADTCKVQSNRVFCDTMNSLTLPSEVSLCNTDIFNSKYDCKIMTSKTDISSSVITSLGAIVSCYGKTKCTASNKNRGIIKTFSNGCDYVSNKGVDTVSVGNTLYYVNKLEGKNLYVKGEPIINYYDPLVFPSDEFDASISQVNEKINQSLAFIRRSDELLHNVNTGKSTTNIMITAIIIVIIVVLLSLIAIGLLLYCKAKNTPVTLSKDQLSGINNIAFSK

SEQ ID NO: 8434 - protein, 574 aa, Artificial Sequence
  derived and/or modified protein sequence (wt) from HRSV__AFD34261.1__F0
MELLIHRSSAIFLTLAINALYLTSSQNITEEFYQSTCSAVSRGYFSALRTGWYTSVITIELSNIKETKCNGTDTKVKLIKQELDKYKNAVTELQLLMQNTPAANNRARREAPQYMNYTINTTKNLNVSISKKRKRRFLGFLLGVGSAIASGIAVSKVLHLEGEVNKIKNALLSTNKAVVSLSNGVSVLTSKVLDLKNYINNQLLPIVNQQSCRISNIETVIEFQQKNSRLLEITREFGVNAGVTTPLSTYMLTNSELLSLINDMPITNDQKKLMSSNVQIVRQQSYSIMSIIKEEVLAYVVQLPIYGVIDTHCWKLHTSPLCTTNIKEGSNICLTRTDRGWYCDNAGSVSFFPQADTCKVQSNRVFCDTMNSLTLPSEVSLCNTDIFNSKYDCKIMTSKTDISSSVITSLGAIVSCYGKTKCTASNKNRGIIKTFSNGCDYVSNKGVDTVSVGNTLYYVNKLEGKNLYVKGEPIINYYDPLVFPSDEFDASISQVNEKINQSLAFIRRSDELLHNVNTGKSTTNIMITAIIIVIIVVLLSLIAIGLLLYCKAKNTPVTLSKDQLSGINNIAFSK

SEQ ID NO: 8435 - protein, 574 aa, Artificial Sequence
  derived and/or modified protein sequence (wt) from HRSV__AFD34260.1__F0
MELLIHRSSAIFLTLAINALYLTSSQNITEEFYQSTCSAVSRGYFSALRTGWYTSVITIELSNIKETKCNGTDTKVKLIKQELDKYKNAVTELQLLMQNTPAANNRARREAPQYMNYTINTTKNLNVSISKKRKRRFLGFLLGVGSAIASGIAVSKVLHLEGEVNKIKNALLSTNKAVVSLSNGVSVLTSKVLDLKNYINNQLLPIVNKQSCRISNIETVIEFQQKNSRLLEITREFSVNAGVTTPLSTYMLTNSELLSLINDMPITNDQKKLMSSNVQIVRQQSYSIMSIIKEEVLAYVVQLPIYGVIDTPCWKLHTSPLCTTNIKEGSNICLTRTDRGWYCDNAGSVSFFPQADTCKVQSNRVFCDTMNSLTLPSEVSLCNTDIFNSKYDCKIMTSKTDVSSSVITSLGAIVSCYGKTKCTASNKNRGIIKTFSNGCDYVSNKGVDTVSVGNTLYYVNKLEGKNLYVKGEPIINYYDPLVFPSDEFDASISQVNEKINQSLAFIRRSDELLHNVNTGKSTTNIMITAIIIVIIVVLLSLIAIGLLLYCKAKNTPVTLSKDQLSGINNIAFSK

SEQ ID NO: 8436 - protein, 574 aa, Artificial Sequence
  derived and/or modified protein sequence (wt) from HRSV__AFD34259.1__F0
MELLIYRSSAIFLTLAINALYLTSSQNITEEFYQSTCSAVSRGYFSALRTGWYTSVITIELSNIKETKCNGTDTKVKLIKQELDKYKNAVTELQLLMQNTPAANNRARREAPQYMNYTINTTKNLNVSISKKRKRRFLGFLLGVGSAIASGMAVSKVLHLEGEVNKIKNALLSTNKAVVSLSNGVSVLTSKVLDLKNYINNQLLPIVNQQSCRISNIETVIEFQQKNSRLLEITREFSVNAGVTTPLSTYMLTNSELLSLINDMPITNDQKKLMSSNVQIVRQQSYSIMSIIKEEVLAYVVQLPIYGVIDTPCWKLHTSPLCTTNIKEGSNICLTRTDRGWYCDNAGSVSFFPQADTCKVQSNRVFCDTMNSLTLPSEVSLCNTDIFNSKYDCKIMTSKTDISSSVITSLGAIVSCYGKTKCTASNKNRGIIKTFSNGCDYVSNKGVDTVSVGNTLYYVNKLEGKNLYVKGEPIINYYDPLVFPSDEFDASISQVNEKINQSLAFIRRSDELLHNVNTGKSTTNIMITVIIIVIIVVLLSLIAIGLLLYCKAKNTPVTLSKDQLSGINNIAFSK

SEQ ID NO: 8437 - protein, 574 aa, Artificial Sequence
  derived and/or modified protein sequence (wt) from HRSV__AEQ63641.1__F0
MELLIHRSSAIFLTLAINAFYLTSSQNITEEFYQSTCSAVSRGYLSALRTGWYTSVITIELSNIKETKCNGTDTKVKLIKQELDKYKNAVTELQLLMQNTPAANNRARREAPQYMNYTINTTKNLNVSISKKRKRRFLGFLLGVGSAIASGIAVSKVLHLEGEVNKIKNALLSTNKAVVSLSNGVSVLTSKVLDLKNYINNQLLPIVNQQSCRISNIETVIEFQQKNSRLLEITREFSVNAGVTTPLSTYMLTNSELLSLINDMPITNDQKKLMSSNVQIVRQQSYSIMSIIKEEVLAYVVQLPIYGVIDTPCWKLHTSPLCTTNIKEGSNICLTRTDRGWYCDNAGSVSFFPQADTCKVQSNRVFCDTMNSLTLPSEVSLCNTDIFNSKYDCKIMTSKTDISSSVITSLGAIVSCYGKTKCTASNKNRGIIKTFSNGCDYVSNKGVDTVSVGNTLYYVNKLEGKNLYVKGEPIINYYDPLVFPSDEFDASISQVNEKINQSLAFIRRSDELLHNVNTGKSTTNIMITAIIIVIIVVLLSLIAIGLLLYCKAKNTPVTLSKDQLSGINNIAFSK

SEQ ID NO: 8438 - protein, 574 aa, Artificial Sequence
  derived and/or modified protein sequence (wt) from HRSV__AEQ63487.1__F0
MELPILKTNAITTILAAVTLCFASSQNITEEFYQSTCSAVSKGYLSALRTGWYTSVITIELSNIKENKCNGTDAKVKLIKQELDKYKNAVTELQLLMQSTPAANNRARRELPRFMNYTLNNTKNTNVTVSKKRKRRFLGFLLGVGSAIASGIAVSKVLHLEGEVNKIKSALLSTNKAVVSLSNGVSVLTSKVLDLKNYIDKQLLPIVNKQSCSISNIETVIEFQQKNNRLLEITREFSVNAGVTTPVSTYMLTNSELLSLINDMPITNDQKKLMSNNVQIVRQQSYSIMSIIKEEVLAYVVQLPLYGVIDTPCWKLHTSPLCTTNTKEGSNICLTRTDRGWYCDNAGSVSFFPQAETCKVQSNRVFCDTMNSLTLPNEVNLCNIDIFNPKYDCKIMTSKTDVSSSVITSLGAIVSCYGKTKCTASNKNRGIIKTFSNGCDYVSNKGVDTVSVGNTLYYVNKQEGKSLYVKGEPIINFYDPLVFPSDEFDASISQVNEKINQSLAFIRKSDELLHNVNAGKSTTNIMITTIIIVIIVILLSLIAVGLLLYCKARSTPVTLSKDQLSGINNIAFSN

SEQ ID NO: 8439 - protein, 574 aa, Artificial Sequence
  derived and/or modified protein sequence (wt) from HRSV__AEQ63520.1__F0
MELPILKTNAITTILAAVTLCFASSQNITEEFYQSTCSAVSKGYLSALRTGWYTSVITIELSNIKENKCNGTDAKVKLIKQELDKYKNAVTELQLLMQSTPAANNRARRELPRFMNYTLNNTKNTNVTVSKKRKRRFLGFLLGVGSAIASGIAVSKVLHLEGEVNKIKSALLSTNKAVVSLSNGVSVLTSKVLDLKNYIDKQLLPIVNKQSCSISNIETVIEFQQKNNRLLEITREFSVNAGVTTPVSTYMLTNSELLSLINDMPITNDQKKLMSNNVQIVRQQSYSIMSIIKEEVLAYVVQLPLYGVIDTPCWKLHTSPLCTTNTKEGSNICLTRTDRGWYCDNAGSVSFFPQAETCKVQSNRVFCDTMNSLTLPSEVNLCNIDIFNPKYDCKIMTSKTDVSSSVITSLGAIVSCYGKTKCTASNKNRGIIKTFSNGCDYVSNKGVDTVSVGNTLYYVNKQEGKSLYVKGEPIINFYDPLVFPSDEFDASISQVNEKINQSLAFIRKSDELLHNVNAGKSTTNIMITTIIIVIIVILLSLIAVGLLLYCKARSTPVTLSKDQLSGINNIAFSN

SEQ ID NO: 8440 - protein, 574 aa, Artificial Sequence
  derived and/or modified protein sequence (wt) from HRSV__4CCF_A__F0
MELLILKANAITTILTAVTFCFASGQNITEEFYQSTCSAVSKGYLSALRTGWYTSVITIELSNIKKNKCNGTDAKVKLIKQELDKYKNAVTELQLLMQSTQATNNRARRELPRFMNYTLNNAKKTNVTLSKKRKRRFLGFLLGVGSAIASGVAVSKVLHLEGEVNKIKSALLSTNKAVVSLSNGVSVLTSKVLDLKNYIDKQVLPIVNKQSCSISNIETVIEFQQKNNRLLEITREFSVNAGVTTPVSTYMLTNSELLSLINDMPITNDQKKLMSNNVQIVRQQSYSIMSIIKEEVLAYVVQLPLYGVIDTPCWKLHTSPLCTTNTKEGSNICLTRTDRGWYCDNAGSVSFFPQAETCKVQSNRVFCDTMNSLTLPSEVNLCNVDIFNPKYDCKIMTSKTDVSSSVITSLGAIVSCYGKTKCTASNKNRGIIKTFSNGCDYVSNKGVDTVSVGNTLYYVNKQEGKSLYVKGEPIINFYDPLVFPSDEFDASISQVNEKINQSLAFIRKSDELLHNVNAGKSTTNIMITTIIIVIIVILLSLIAVGLLLYCKARSTPVTLSKDQLSGINNIAFSN

SEQ ID NO: 8441 - protein, 574 aa, Artificial Sequence
  derived and/or modified protein sequence (wt) from HRSV__AEQ63334.1__F0
MELPILKTNAITTILAAVTLCFASSQNITEEFYQSTCSAVSKGYLSALRTGWYTSVITIELSNIKENKCNGTDAKVKLIKQELDKYKNAVTELQLLMQSTPAANSRARRELPRFMNYTLNNTKNTNVTLSKKRKRRFLGFLLGVGSAIASGIAVSKVLHLEGEVNKIKSALLSTNKAVVSLSNGVSVLTSKVLDLKNYIDKQLLPIVNKQSCSISNIETVIEFQQKNNRLLEITREFSVNAGVTTPVSTYMLTNSELLSLINDMPITNDQKKLMSNNVQIVRQQSYSIMSIIKEEVLAYVVQLPLYGVIDTPCWKLHTSPLCTTNTKEGSNICLTRTDRGWYCDNAGSVSFFPQADTCKVQSNRVFCDTMNSLTLPSEVNLCNIDIFNPKYDCKIMTSKTDVSSSVITSLGAIVSCYGKTKCTASNKNRGIIKTFSNGCDYVSNKGVDTVSVGNTLYYVNKQEGKSLYVKGEPIINFYDPLVFPSDEFDASISQVNEKINQSLAFIRKSDELLHNVNAGKSTTNIMITTIIIVIIVILLSLIAVGLLLYCKARSTPVTLSKDQLSGINNIAFSN

SEQ ID NO: 8442 - protein, 574 aa, Artificial Sequence
  derived and/or modified protein sequence (wt) from HRSV__AEO45949.1__F0
MELPILKTNAITTILAAVTLCFASSQNITEEFYQSTCSAVSKGYLSALRTGWYTSVITIELSNIKENKCNGTDAKVKLIKQELDKYKNAVTELQLLMQSTPAANNRARRELPRFMNYTLNNTKTTNVTLSKKRKRRFLGFLLGVGSAIASGIAVSKVLHLEGEVNKIKSALLSTNKAVVSLSNGVSVLTSKVLDLKNYIDKQLLPIVNKQSCSISNIETVIEFQQKNNRLLEITREFSVNAGVTTPVSTYMLTNSELLSLINDMPITNDQKKLMSNNVQIVRQQSYSIMSIIKEEVLAYVVQLPLYGVIDTPCWKLHTSPLCTTNTKEGSNICLTRTDRGWYCDNAGSVSFFPQAETCKVQSNRVFCDTMNSLTLPSEVNLCNVDIFNPKYDCKIMTSKTDVSSSVITSLGAIVSCYGKTKCTASNKNRGIIKTFSNGCDYVSNKGVDTVSVGNTLYYVNKQEGKSLYVKGEPIINFYDPLVFPSDEFDASISQVNEKINQSLAFIRKSDELLHNVNVGKSTTNIMITTIIIVIIVILLSLIAVGLLLYCKARSTPVTLSKDQLSGINNIAFSS

SEQ ID NO: 8443 - protein, 574 aa, Artificial Sequence
  derived and/or modified protein sequence (wt) from HRSV__AEO45939.1__F0
MDLPILKTNAITTILAAVTLCFASSQNITEEFYQSTCSAVSKGYLSALRTGWYTSVITIELSNIKENKCNGTDAKVKLIKQELDKYKNAVTELQLLMQSTPASNNRARRELPRFMNYTLNNTKNTNVTLSKKRKRRFLGFLLGVGSAIASGIAVSKVLHLEGEVNKIKSALLSTNKAVVSFIDGVSVLTSKVLDLKNYIDKQLLPIVNKQSCSISNIETVIEFQQKNNRLLEITREFSVNAGVTTPVSTYMLTNSELLSLINDMPITNDQKKLMSNNVQIVRQQSYSIMSIIKEEVLAYVVQLPLYGVIDTPCWKLHTSPLCTTNTKEGSNICLTRTDRGWYCDNAGSVSFFPQAETCKVQSNRVFCDTMNSLTLPSEVNLCNIDIFNPKYDCKIMTSKTDVSSSVITSLGAIVSCYGKTKCTASNKNRGIIKTFSNGCDYVSNKGVDTVSVGNTLYYVNKQEGKSLYVKGEPIINFYDPLVFPSDEFDASISQVNEKINQSLAFIRKSDELLHNVNVGKSTTNIMITTIIIVIIVILLSLIAVGLLLYCKARSTPVTLSKDQLSGINNIAFSN

SEQ ID NO: 8444 - protein, 574 aa, Artificial Sequence
  derived and/or modified protein sequence (wt) from HRSV__AEQ63312.1__F0
MELPVLKTNAITTILAAVTLCFASSQNITEEFYQSTCSAVSKGYLSALRTGWYTSVITIELSNIKENKCNGTDAKVKLIKQELDKYKNAVTELQLLMQSTPAANNRARRELPRFMNYTLNNTKNTNVTLSKKRKRRFLGFLLGVGSAIASGIAVSKVLHLEGEVNKIKSALLSTNKAVVSLSNGVSVLTSKVLDLKNYIDKQLLPIVNKQSCSISNIETVIEFQQKNNRLLEITREFSVNAGVTTPVSTYMLTNSELLSLINDMPITNDQKKLMSNNVQIVRQQSYSIMSIIKEEVLAYVVQLPLYGVIDTPCWKLHTSPLCTTNTKEGSNICLTRTDRGWYCDNAGSVSFFPQADTCKVQSNRVFCDTMNSLTLPSEVNLCNIDIFNPKYDCKIMTSKTDVSSSVITSLGAIVSCYGKTKCTASNKNRGIIKTFSNGCDYVSNKGVDTVSVGNTLYYVNKQEGKSLYVKGEPIINFYDPLVFPSDEFDASISQVNEKINQSLAFIRKSDELLHNVNAGKSTTNIMITTIIIVIIVILLSLIAVGLLLYCKARSTPVTLSKDQLSGINNIAFSN

SEQ ID NO: 8445 - protein, 574 aa, Artificial Sequence
  derived and/or modified protein sequence (wt) from HRSV__AEQ63586.1__F0
MELLIHRSSAIFLTLAINALYLTSSQNITEEFYQSTCSAVSRGYLSALRTGWYTSVITIELSNIKETKCNGTDTKVKLIKQELDKYKNAVTELQLLMQNTPAANNRARREAPQYMNYTINTTKNLNVSISKKRKRRFLGFLLGVGSAIASGIAVSKVLHLEGEVNKIKNALLSTNKAVVSLSNGVSVLTSKVLDLKNYINNQLLPIVNQQSCRISNIETVIEFQQKNSRLLEITREFSVNAGVTTPLSTYMLTNSELLSLINDMPITNDQKKLMSSNVQIVRQQSYSIMSIIKEEVLAYVVQLPIYGVIDTPCWKLHTSPLCTTNIKEGSNICLTRTDRGWYCDNAGSVSFFPQADTCKVQSNRVFCDTMNSLTLPSEVSLCNTDIFNSKYDCKIMTSKTDISSSVITSLGAIVSCYGKTKCTASNKNRGIIKTFSNGCDYVSNKGVDTVSVGNTLYYVNKLEGKNLYVKGEPIINYYDPLVFPSDEFDASISQVNEKINQSLAFIRRSDELLHNVNTGKSTTNIMITAIIIVIIVVLLSLIAIGLLLYCKAKNTPVTLSKDQLSGINNIAFSK

SEQ ID NO: 8446 - protein, 574 aa, Artificial Sequence
  derived and/or modified protein sequence (wt) from HRSV__AEO45919.1__F0
MELPILKINAITTILAAITLCFASSQNITEEFYQSTCSAVSKGYLSALRTGWYTSVITIELSNIKENKCNGTDAKVKLIKQELDKYKNAVTELQLLMQSTPAANNRARRELPRFMNYTLNNTKNTNVTVSKKRKRRFLGFLLGVGSAIASGIAVSKVLHLEGEVNKIKSALLSTNKAVVSLSNGVSVLTSKVLDLKNYIDKQLLPIVNKQSCSISNIETVIEFQQKNNRLLEITREFSVNAGVTTPVSTYMLTNSELLSLINDMPITNDQKKLMSNNVQIVRQQSYSIMSIIKEEVLAYVVQLPLYGVIDTPCWKLHTSPLCTTNTKEGSNICLTRTDRGWYCDNAGSVSFFPQAETCKVQSNRVFCDTMNSLTLPSEVNLCNVDIFNPKYDCKIMTSKTDVSSSVITSLGAIVSCYGKTKCTASNKNRGIIKTFSNGCDYVSNKGVDTVSVGNTLYYVNKQEGKSLYVKGEPIINFYDPLVFPSDEFDASISQVNEKINQSLAFIRKSDELLHNVNVGKSTTNIMITTIIIVIIVILLSLIAVGLLLYCKARSTPVTLSKDQLSGINNIAFSN

SEQ ID NO: 8447 - protein, 574 aa, Artificial Sequence
  derived and/or modified protein sequence (wt) from HRSV__AEO45909.1__F0
MELPILKTNAITTIFAAVTLCFASSQNITEEFYQSTCSAVSKGYLSALRTGWYTSVITIELSNIKENKCNGTDAKVKLIKQELDKYKNAVTELQLLMQSTPAANNRARRELPRFMNYTLNNTKNNNVTLSKKRKRRFLGFLLGVGSAIASGIAVSKVLHLEGEVNKIKSALLSTNKAVVSLSNGVSVLTSKVLDLKNYIDKQLLPIVNKQSCSISNIETVIEFQQKNNRLLEITREFSVNAGVTTPVSTYMLTNSELLSLINDMPITNDQKKLMSNNVQIVRQQSYSIMSIIKEEVLAYVVQLPLYGVIDTPCWKLHTSPLCTTNTKEGSNICLTRTDRGWYCDNAGSVSFFPQAETCKVQSNRVFCDTMNSLTLPSEVNLCNVDIFNPKYDCKIMTSKTDVSSSVITSLGAIVSCYGKTKCTASNKNRGIIKTFSNGCDYVSNKGVDTVSVGNTLYYVNKQEGKSLYVKGEPIINFYDPLVFPSDEFDASISQVNEKINQSLAFIRKSDELLHNVNVGKSTTNIMITTIIIVIIVILLLLIAVGLLLYCKARSTPVTVINDQLSGINNIAFSN

SEQ ID NO: 8448 - protein, 574 aa, Artificial Sequence
  derived and/or modified protein sequence (wt) from HRSV__AEO45889.1__F0
MELPILKTNAITTIFAAVTLCFASSQNITEEFYQSTCSAVSKGYLSALRTGWYTSVITIELSNIKENKCNGTDAKVKLIKQELDKYKNAVTELQLLMQSTPAANNRARRELPRFMNYTLNNTKNNNVTLSKKRKRRFLGFLLGVGSAIASGIAVSKVLHLEGEVNKIKSALLSTNKAVVSLSNGVSVLTSKVLDLKNYIDKQLLPIVNKQSCSISNIETVIEFQQKNNRLLEITREFSVNAGVTTPVSTYMLTNSELLSLINDMPITNDQKKLMSNNVQIVRQQSYSIMSIIKEEVLAYVVQLPLYGVIDTPCWKLHTSPLCTTNTKEGSNICLTRTDRGWYCDNAGSVSFFPQAETCKVQSNRVFCDTMNSLTLPSEVNLCNVDIFNPKYDCKIMTSKTDVSSSVITSLGAIVSCYGKTKCTASNKNRGIIKTFSNGCDYVSNKGVDTVSVGNTLYYVNKQEGKSLYVKGEPIINFYDPLVFPSDEFDASISQVNEKINQSLAFIRKSDELLHNVNVGKSTTNIMITTIIIVIIVILLLLIAVGLFLYCKARSTPVTVIDDYLSGINNISFIY

SEQ ID NO: 8449 - protein, 574 aa, Artificial Sequence
  derived and/or modified protein sequence (wt) from HRSV__AEO45879.1__F0
MELPILKTNAITTIFAAVTLCFASSQNITEEFYQSTCSAVSKGYLSALRTGWYTSVITIELSNIKENKCNGTDAKVKLIKQELDKYKNAVTELQLLMQSTPAANNRARRELPRFMNYTLNNTKNNNVTLSKKRKRRFLGFLLGVGSAIASGIAVSKVLHLEGEVNKIKSALLSTNKAVVSLSNGVSVLTSKVLDLKNYIDKQLLPIVNKQSCSISNIETVIEFQQKNNRLLEITREFSVNAGVTTPVSTYMLTNSELLSLINDMPITNDQKKLMSNNVQIVRQQSYSIMSIIKEEVLAYVVQLPLYGVIDTPCWKLHTSPLCTTNTKEGSNICLTRTDRGWYCDNAGSVSFFPQAETCKVQSNRVFCDTMNSLTLPSEVNLCNVDIFNPKYDCKIMTSKTDVSSSVITSLGAIVSCYGKTKCTASNKNRGIIKTFSNGCDYVSNKGVDTVSVGNTLYYVNKQEGKSLYVKGEPIINFYDPLVFPSDEFDASISQVNEKINQSLAFIRKSDELLHNVNAGKSTTNIMITTIIIVIIVILLSLIAVGLLLYCKARSTPVTLSKDQLSGINNIAFSN

SEQ ID NO: 8450 - protein, 574 aa, Artificial Sequence
  derived and/or modified protein sequence (wt) from HRSV__AEO45869.1__F0
MELPILKTNAITAILAAVSLCFASSQNITEEFYQSTCSAVSKGYLSALRTGWYTSVITIELSNIKENKCNGTDAKVKLIKQELDKYKNAVTELQLLMQSTPAANNRARRELPRFMNYTLNNTKNNNVTLSKKRKRRFLGFLLGVGSAIASGIAVSKVLHLEGEVNKIKSALLSTNKAVVSLSNGVSVLTSKVLDLKNYIDKQLLPIVNKQSCSISNIETVIEFQQKNNRLLEITREFSVNAGVTTPVSTYMLTNSELLSLINDMPITNDQKKLMSNNVQIVRQQSYSIMSIIKEEVLAYVVQLPLYGVIDTPCWKLHTSPLCTTNTKEGSNICLTRTDRGWYCDNAGSVSFFPQAETCKVQSNRVFCDTMNSLTLPSEVNLCNVDIFNPKYDCKIMTSKTDVSSSVITSLGAIVSCYGKTKCTASNKNRGIIKTFSNGCDYVSNKGVDTVSVGNTLYYVNKQEGKSLYVKGEPIINFYDPLVFPSDEFDASISQVNEKINQSLAFIRKSDELLHNVNVGKSTTNIMITTIIIVIIVILLLLIAVGLLLYCKARSTPVTLSKDQLSGINNIAFSN

SEQ ID NO: 8451 - protein, 574 aa, Artificial Sequence
  derived and/or modified protein sequence (wt) from HRSV__AEO45929.1__F0
MELPILKTNAITTILAAVTLCFASSQNITEEFYQSTCSAVSKGYLSALRTGWYTSVITIELSNIKENKCNGTDAKVKLIKQELDKYKNAVTELQLLMQSTPAANNRARRELPRFMNYTLNNTKTTNVTLSKKRKRRFLGFLLGVGSAIASGIAVSKVLHLEGEVNKIKSALLSTNKAVVSLSNGVSVLTSKVLDLKNYIDKQLLPIVNKQSCSISNIETVIEFQQKNNRLLEITREFSVNAGVTTPVSTYMLTNSELLSLINDMPITNDQKKLMSNNVQIVRQQSYSIMSIIKEEVLAYVVQLPLYGVIDTPCWKLHTSPLCTTNTKEGSNICLTRTDRGWYCDNAGSVSFFPQAETCKVQSNRVFCDTMNSLTLPSEVNLCNIDIFNPKYDCKIMTSKTDVSSSVITSLGAIVSCYGKTKCTASNKNRGIIKTFSNGCDYVSNKGVDTVSVGNTLYYVNKQEGKSLYVKGEPIINFYDPLVFPSDEFDASISQVNEKINQSLAFIRKSDELLHNVNAGKSTTNIMITTIIIVIIVILLSLIAVGLLLYCKARSTPVTLSKDQLSGINNIAFSS

SEQ ID NO: 8452 - protein, 574 aa, Artificial Sequence
  derived and/or modified protein sequence (wt) from HRSV__AEO45850.1__F0
MELPILKTNAITTILTAVTFCFASSQNITEEFYQSTCSAVSKGYLSALRTGWYTSVITIELSNIKENKCNGTDAKVKLIKQELDKYKNAVTELQLLMQSTPAANNRARRELPRFMNYTLNNTKNNNVTLSKKRKRRFLGFLLGVGSAIASGIAVSKVLHLEGEVNKIKSALLSTNKAVVSLSNGVSVLTSKVLDLKNYIDKQLLPIVNKQSCSISNIETVIEFQQKNNRLLEITREFSVNAGVTTPVSTYMLTNSELLSLINDMPITNDQKKLMSNNVQIVRQQSYSIMSIIKEEVLAYVVQLPLYGVIDTPCWKLHTSPLCTTNTKEGSNICLTRTDRGWYCDNAGSVSFFPQAETCKVQSNRVFCDTMNSLTLPSEVNLCNVDIFNPKYDCKIMTSKTDVSSSVITSLGAIVSCYGKTKCTASNKNRGIIKTFSNGCDYVSNKGVDTVSVGNTLYYVNKQEGKSLYVKGEPIINFYDPLVFPSDEFDASISQVNEKINQSLAFIRKSDELLHNVNVGKSTTNIMITTIIIVIIVILLLLIAVGLLLYCKARSTPVTLSKDQLSGINNIAFSN

SEQ ID NO: 8453 - protein, 574 aa, Artificial Sequence
  derived and/or modified protein sequence (wt) from HRSV__AEO45859.1__F0
MDLPILKTNAITAILAAVSLCFASSQNITEEFYQSTCSAVSKGYLSALRTGWYTSVITIELSNIKENKCNGTDAKVKLIKQELDKYKNAVTELQLLMQSTPAANNRARRELPRFMNYTLNNTKNNNVTLSKKRKRRFLGFLLGVGSAIASGIAVSKVLHLEGEVNKIKSALLSTNKAVVSLSNGVSVLTSKVLDLKNYIDKQLLPIVNKQSCSISNIETVIEFQQKNNRLLEITREFSVNAGVTTPVSTYMLTNSELLSLINDMPITNDQKKLMSNNVQIVRQQSYSIMSIIKEEVLAYVVQLPLYGVIDTPCWKLHTSPLCTTNTKEGSNICLTRTDRGWYCDNAGSVSFFPQAETCKVQSNRVFCDTMNSLTLPSEVNLCNVDIFNPKYDCKIMTSKTDVSSSVITSLGAIVSCYGKTKCTASNKNRGIIKTFSNGCDYVSNKGVDTVSVGNTLYYVNKQEGKSLYVKGEPIINFYDPLVFPSDEFDASISQVNEKINQSLAFIRKSDELLHNVNVGKSTTNIMITTIIIVIIVILLLLIAVGLFLYCKARSTPVTLSKDQLSGINNIAFSN

SEQ ID NO: 8454 - protein, 574 aa, Artificial Sequence
  derived and/or modified protein sequence (wt) from HRSV__AEQ63444.1__F0
MDLPILKTNAITAILAAVSLCFASSQNITEEFYQSTCSAVSKGYLSALRTGWYTSVITIELSNIKENKCNGTDAKVKLIKQELDKYKNAVTELQLLMQSTPAANNRARRELPRFMNYTLNNTKNNNVTLSKKRKRRFLGFLLGVGSAIASGIAVSKVLHLEGEVNKIKSALLSTNKAVVSLSNGVSVLTSKVLDLKNYIDKQLLPIVNKQSCSISNIETVIEFQQKNNRLLEITREFSVNAGVTTPVSTYMLTNSELLSLINDMPITNDQKKLMSNNVQIVRQQSYSIMSIIKEEVLAYVVQLPLYGVIDTPCWKLHTSPLCTTNTKEGSNICLTRTDRGWYCDNAGSVSFFPQAETCKVQSNRVFCDTMNSLTLPSEVNLCNIDIFNPKYDCKIMTSKTDVSSSVITSLGAIVSCYGKTKCTASNKNRGIIKTFSNGCDYVSNKGVDTVSVGNTLYYVNKQEGKSLYVKGEPIINFYDPLVFPSDEFDASISQVNEKINQSLAFIRKSDELLHNVNVGKSTTNIMITTIIIVIIVILLLLIAVGLFLYCKARSTPVTLSKDQLSGINNIAFSN

SEQ ID NO: 8455 - protein, 574 aa, Artificial Sequence
  derived and/or modified protein sequence (wt) from HRSV__AEO23054.1__F0
MELLIHRSSAIFLTLAINALYLTSSQNITEEFYQSTCSAVSRGYFSALRTGWYTSVITIELSNIKETKCNGTDTKVKLIKQELDKYKNAVTELQLLMQNTPAANNRARREAPQYMNYTINTTKNLNVSTSKKRKRRFLGFLLGVGSAIASGIAVSKVLHLEGEVNKIKNALLATNKAVVSLSNGVSVLTSKVLDLKNYINNQLLPIVNQQSCRISNIETVIEFQQKNSRLLEITREFSVNAGVTTPLSTYMLTNSELLSLINDMPITNDQKKLMSSNVQIVRQQSYSIMSIIKEEVLAYVVQLPIYGVIDTPCWKLHTSPLCTTNIKEGSNICLTRTDRGWYCDNAGSVSFFPQADTCKVQSNRVFCDTMNSLTLPSEVSLCNTDIFNSKYDCKIMTSKTDISSSVITSLGAIVSCYGKTKCTASNKNRGIIKTFSNGCDYVSNKGVDTVSVGNTLYYVNKLEGKNLYVKGEPIINYYDPLVFPSDEFDASISQVNEKINQSLAFIRRSDELLHNVNTGKSTTNIMITAIIIVIIVVLLSLIAIGLLLYCKAKNTPVTLSKDQLSGINNIAFSK

SEQ ID NO: 8456 - protein, 574 aa, Artificial Sequence
  derived and/or modified protein sequence (wt) from HRSV__AEO23052.1__F0
MELPILKANAISTILAAVTLCFASSQNITEEFYQSTCSAVSKGYLSALRTGWYTSVITIELSNIKENKCNGTDAKVKLIKQELDKYKNAVTELQLLMQSTPAANSRARRELPRFMNYTLNNTKNTNVTLSKKRKRRFLGFLLGVGSAIASGIAVSKVLHLEGEVNKIKSALLSTNKAVVSLSNGVSVLTSKVLDLKNYIDKQLLPIVNKQSCSISNIETVIEFQQKNNRLLEITREFSVNAGVTTPVSTYMLTNSELLSLINDMPITNDQKKLMSSNVQIVRQQSYSIMSIIKEEVLAYVVQLPLYGVIDTPCWKLHTSPLCTTNTKEGSNICLTRTDRGWYCDNAGSVSFFPQAETCKVQSNRVFCDTMNSLTLPSEVNLCNIDIFNPKYDCKIMTSKTDVSSSVITSLGAIVSCYGKTKCTASNKNRGIIKTFSNGCDYVSNKGVDTVSVGNTLYYVNKQEGKSLYVKGEPIINFYDPLVFPSDEFDASISQVNEKINQSLAFIRKSDELLHNVNAGKSTTNIMITTIIIVIIVILLALIAVGLLLYCKARSTPVTLSKDQLSGINNIAFSN

SEQ ID NO: 8457 - protein, 574 aa, Artificial Sequence
  derived and/or modified protein sequence (wt) from HRSV__AEO45830.1__F0
MELPILKTNAITTIFAAVTLCFASSQNITEEFYQSTCSAVSKGYLSALRTGWYTSVITIELSNIKENKCNGTDAKVKLIKQELDKYKNAVTELQLLMQSTPAANNRARRELPRFMNYTLNNTKNNNVTLSKKRKRRFLGFLLGVGSAIASGIAVSKVLHLEGEVNKIKSALLSTNKAVVSLSNGVSVLTSKVLDLKNYIDKQLLPIVNKQSCSISNIETVIEFQQKNNRLLEITREFSVNAGVTTPVSTYMLTNSELLSLINDMPITNDQKKLMSNNVQIVRQQSYSIMSIIKEEVLAYVVQLPLYGVIDTPCWKLHTSPLCTTNTKEGSNICLTRTDRGWYCDNAGSVSFFPQAETCKVQSNRVFCDTMNSLTLPSEVNLCNVDIFNPKYDCKIMTSKTDVSSSVITSLGAIVSCYGKTKCTASNKNRGIIKTFSNGCDYVSNKGVDTVSVGNTLYYVNKQEGKSLYVKGEPIINFYDPLVFPSDEFDASISQVNEKINQSLAFIRKSDELLHNVNVGKSTTNIMITTIIIVIIVILLLLIAVGLFLYCKARSTPVTLSKDQLSGINNIAFSN

SEQ ID NO: 8458 - protein, 574 aa, Artificial Sequence
  derived and/or modified protein sequence (wt) from HRSV__AEO45840.1__F0
MELPILKTNAITTILAAVTLCFASSQNITEEFYQSTCSAVSKGYLSALRTGWYTSVITIELSNIKENKCNGTDAKVKLIKQELDKYKNAVTELQLLMQSTPAANNRARRELPRFMNYTLNNTKTTNVTLSKKRKRRFLGFLLGVGSAIASGIAVSKVLHLEGEVNKIKSALLSTNKAVVSLSNGVSVLTSKVLDLKNYIDKQLLPIVNKQSCSISNIETVIEFQQKNNRLLEITREFSVNAGVTTPVSTYMLTNSELLSLINDMPITNDQKKLMSNNVQIVRQQSYSIMSIIKEEVLAYVVQLPLYGVIDTPCWKLHTSPLCTTNTKEGSNICLTRTDRGWYCDNAGSVSFFPQAETCKVQSNRVFCDTMNSLTLPSEVNLCNVDIFNPKYDCKIMTSKTDVSSSVITSLGAIVSCYGKTKCTASNKNRGIIKTFSNGCDYVSNKGVDTVSVGNTLYYVNKQEGKSLYVKGEPIINFYDPLVFPSDEFDASISQVNEKINQSLAFIRKSDELLHNVNVGKSTTNIMITTIIIVIIVILLSLIAVGLLLYCKARSTPVTVSKDQLSGINNIAFSN

SEQ ID NO: 8459 - protein, 574 aa, Artificial Sequence
  derived and/or modified protein sequence (wt) from HRSV__AEO23051.1__F0
MELPILKTNAITTILAAVTLCFASSQNITEEFYQSTCSAVSKGYLSALRTGWYTSVITIELSNIKENKCNGTDAKVKLIKQELDKYKNAVTELQLLMQSTPAANSRARRELPRFMNYTLNNTKNTNVTLSKKRKRRFLGFLLGVGSAIASGIAVSKVLHLEGEVNKIKSALLSTNKAVVSLSNGVSVLTSKVLDLKNYIDKQLLPIVNKQSCSISNIETVIEFQQKNNRLLEITREFSVNAGVTTPVSTYMLTNSELLSLINDMPITNDQKKLMSNNVQIVRQQSYSIMSIIKEEVLAYVVQLPLYGVIDTPCWKLHTSPLCTTNTKEGSNICLTRTDRGWYCDNAGSVSFFPQAETCKVQSNRVFCDTMNSLTLPSEVNLCNIDIFNPKYDCKIMTSKTDVSSSVITSLGAIVSCYGKTKCTASNKNRGIIKTFSNGCDYVSNKGVDTVSVGNTLYYVNKQEGKSLYVKGEPIINFYDPLVFPSDEFDASISQVNEKINQSLAFIRKSDELLHNVNAGKSTTNIMITTIIIVIIVILLSLIAVGLLLYCKARSTPVTLSKDQLSGINNIAFSN

SEQ ID NO: 8460 - protein, 574 aa, Artificial Sequence
  derived and/or modified protein sequence (wt) from HRSV__AEC32087.1__F0
MELPILKTNAITTILAAVTLCFASSQNITEEFYQSTCSAVSKGYLSALRTGWYTSVITIELSNIKENKCNGTDAKVKLIKQELDKYKNAVTELQLLMQSTQAANNRARRELPRFMNYTLNNTKTTNVTLSKKRKRRFLGFLLGVGSAIASGIAVSKVLHLEGEVNKIKSALLSTNKAVVSLSNGVSVLTSKVLDLKNYIDKQLLPIVNKQSCSISNIETVIEFQQKNNRLLEITREFSVNAGVTTPVSTYMLTNSELLSLINDMPITNDQKKLMSNNVQIVRQQSYSIMSIIKEEVLAYVVQLPLYGVIDTPCWKLHTSPLCTTNTKEGSNICLTRTDRGWYCDNAGSVSFFPQAETCKVQSNRVFCDTMNSLTLPSEVNLCNIDIFNPKYDCKIMTSKTDVSSSVITSLGAIVSCYGKTKCTASNKNRGIIKTFSNGCDYVSNKGVDTVSVGNTLYYVNKQEGKSLYVKGEPIINFYDPLVFPSDEFDASISQVNEKINQSLAFIRKSDELLHNVNAGKSTTNIMITTIIIVIIVILLSLIAVGLLLYCKARSTPVTLSKDQLSGINNIAFSS

SEQ ID NO: 8461 - protein, 574 aa, Artificial Sequence
  derived and/or modified protein sequence (wt) from HRSV__ADZ95785.1__F0
MELPILKANAITTILAAVTFCFASSQNITEEFYQSTCSAVSKGYLSALRTGWYTSVITIELSNIKENKCNGTDAKVKLIKQELDKYKNAVTELQLLMQSTPAANNRARRELPRFMNYTLNNTKKTNVTLSKKRKRRFLGFLLGVGSAIASGIAVSKVLHLEGEVNKIKSALLSTNKAVVSLSNGVSVLTSKVLDLKNYIDKQLLPIVNKQSCRISNIETVIEFQQKNNRLLEITREFSVNAGVTTPVSTYMLTNSELLSLINDMPITNDQKELMSNNVQIVRQQSYSIMSIIKEEVLAYVVQLPLYGVIDTPCWKLHTSPLCTTNTKEGSNICLTRTDRGWYCDNAGSVSFFPQAETCKVQSNRVFCDTMNSLTLPSEVNLCNVDIFNPKYDCKIMTSKTDVSSSVITSLGAIVSCYGKTKCTASNKNRGIIKTFSNGCDYVSNKGVDTVSVGNTLYYVNKQEGKSLYVKGEPIINFYDPLVFPSDEFDASISQVNEKINQSLAFIRKSDELLHHVNAGKSTTNIMITTIIIVIIVILLSLIAVGLLLYCKARSTPVTLSKDQLSGINNIAFSN

SEQ ID NO: 8462 - protein, 574 aa, Artificial Sequence
  derived and/or modified protein sequence (wt) from HRSV__AEC32085.1__F0
MELPILKTNAITTILAAVTLCFASSQNITEEFYQSTCSAVSKGYLSALRTGWYTSVITIELSTIKENKCNGTDAKGKLIKQELDKYKNAVTELQLLMQSTPAANNRARRELPRFMNYTLNNAKNTNVTLSKKRKRRFLGFLLGVGSAIASGIAVSKVLHLEGEVNKIKSALLSTNKAVVSLSNGVSVLTSKVLDLKNYIDKQLLPIVNKQSCSISNIETVIEFQQKNNRLLEITREFSVNAGVTTPVSTYMLTNSELLSLINDMPITNDQKKLMSNNVQIVRQQSYSIMSIIKEEVLAYVVQLPLYGVIDTPCWKLHTSPLCTTNTKEGSNICLTRTDRGWYCDNAGSVSFFPQAETCKVQSNRVFCDTMNSLTLPSEVNLCNIDIFNPKYDCKIMTSKTDVSSSVITSLGAIVSCYGKTKCTASNKNRGIIKTFSNGCDYVSNKGVDTVSVGNTLYYVNKQEGKSLYVKGEPIINFYDPLVFPSDEFDASISQVNEKINQSLAFIRKSDELLHNVNAGKSTTKIMITTIIIVIIVILLSLIAVGLLLYCKARSTPVTLSKDQLSGINNIAFSS

SEQ ID NO: 8463 - protein, 574 aa, Artificial Sequence
  derived and/or modified protein sequence (wt) from HRSV__ADZ95784.1__F0
MELPILKANAITTILAAVTFCFASSQNITEEFYQSTCSAVSKGYLSALRTGWYTSVITIELSNIKENKCNGTDAKVKLIKQELDKYKNAVTELQLLMQSTPAANNRARRELPRFMNYTLNNTKKTNVTLSKKRKRRFLGFLLGVGSAIASGIAVSKVLHLEGEVNKIKSALLSTNKAVVSLSNGVSVLTSKVLDLKNYIDKQLLPIVNKQSCRISNIETVIEFQQKNNRLLEITREFSVNAGVTTPVSTYMLTNSELLSLINDMPITNDQKQLMSNNVQIVRQQSYSIMSIIKEEVLAYVVQLPLYGVIDTPCWKLHTSPLCTTNTKEGSNICLTRTDRGWYCDNAGSVSFFPQAETCKVQSNRVFCDTMNSLTLPSEVNLCNVDIFNPKYDCKIMTSKTDVSSSVITSLGAIVSCYGKTKCTASNKNRGIIKTFSNGCDYVSNKGVDTVSVGNTLYYVNKQEGKSLYVKGEPIINFYDPLVFPSDEFDASISQVNEKINQSLAFIRKSDELLHHVNAGKSTTNIMITTIIIVIIVILLSLIAVGLLLYCKARSTPVTLSKDQLSGINNIAFSN

SEQ ID NO: 8464 - protein, 574 aa, Artificial Sequence
  derived and/or modified protein sequence (wt) from HRSV__ADZ95783.1__F0
MELPILKANAITTILAAVTFCFASSQNITEEFYQSTCSAVSKGYLSALRTGWYTSVITIELSNIKENKCNGTDAKVKLIKQELDKYKNAVTELQLLMQSTPAANNRARRELPRFMNYTLNNTKKTNVTLSKKRKRRFLGFLLGVGSAIASGIAVSKVLHLEGEVNKIKSALLSTNKAVVSLSNGVSVLTSKVLDLKNYIDKQLLPIVNKQSCRISNIETVIEFQQKNNRLLEITREFSVNAGVTTPVSTYMLTNSELLSLINDMPITNDQKTLMSNNVQIVRQQSYSIMSIIKEEVLAYVVQLPLYGVIDTPCWKLHTSPLCTTNTKEGSNICLTRTDRGWYCDNAGSVSFFPQAETCKVQSNRVFCDTMNSLTLPSEVNLCNVDIFNPKYDCKIMTSKTDVSSSVITSLGAIVSCYGKTKCTASNKNRGIIKTFSNGCDYVSNKGVDTVSVGNTLYYVNKQEGKSLYVKGEPIINFYDPLVFPSDEFDASISQVNEKINQSLAFIRKSDELLHHVNAGKSTTNIMITTIIIVIIVILLSLIAVGLLLYCKARSTPVTLSKDQLSGINNIAFSN

SEQ ID NO: 8465 - protein, 574 aa, Artificial Sequence
  derived and/or modified protein sequence (wt) from HRSV__ADZ95782.1__F0
MELPILKANAITTILAAVTFCFASSQNITEEFYQSTCSAVSKGYLSALRTGWYTSVITIELSNIKENKCNGTDAKVKLIKQELDKYKNAVTELQLLMQSTPAANNRARRELPRFMNYTLNNTKKTNVTLSKKRKRRFLGFLLGVGSAIASGIAVSKVLHLEGEVNKIKSALLSTNKAVVSLSNGVSVLTSKVLDLKNYIDKQLLPIVNKQSCRISNIETVIEFQQKNNRLLEITREFSVNAGVTTPVSTYMLTNSELLSLINDMPITNDQKMLMSNNVQIVRQQSYSIMSIIKEEVLAYVVQLPLYGVIDTPCWKLHTSPLCTTNTKEGSNICLTRTDRGWYCDNAGSVSFFPQAETCKVQSNRVFCDTMNSLTLPSEVNLCNVDIFNPKYDCKIMTSKTDVSSSVITSLGAIVSCYGKTKCTASNKNRGIIKTFSNGCDYVSNKGVDTVSVGNTLYYVNKQEGKSLYVKGEPIINFYDPLVFPSDEFDASISQVNEKINQSLAFIRKSDELLHHVNAGKSTTNIMITTIIIVIIVILLSLIAVGLLLYCKARSTPVTLSKDQLSGINNIAFSN

SEQ ID NO: 8466 - protein, 574 aa, Artificial Sequence
  derived and/or modified protein sequence (wt) from HRSV__ADZ95781.1__F0
MELPILKANAITTILAAVTFCFASSQNITEEFYQSTCSAVSKGYLSALRTGWYTSVITIELSNIKENKCNGTDAKVKLIKQELDKYKNAVTELQLLMQSTPAANNRARRELPRFMNYTLNNTKKTNVTLSKKRKRRFLGFLLGVGSAIASGIAVSKVLHLEGEVNKIKSALLSTNKAVVSLSNGVSVLTSKVLDLKNYIDKQLLPIVNKQSCRISNIETVIEFQQKNNRLLEITREFSVNAGVTTPVSTYMLTNSELLSLINDMPITNDQKNLMSNNVQIVRQQSYSIMSIIKEEVLAYVVQLPLYGVIDTPCWKLHTSPLCTTNTKEGSNICLTRTDRGWYCDNAGSVSFFPQAETCKVQSNRVFCDTMNSLTLPSEVNLCNVDIFNPKYDCKIMTSKTDVSSSVITSLGAIVSCYGKTKCTASNKNRGIIKTFSNGCDYVSNKGVDTVSVGNTLYYVNKQEGKSLYVKGEPIINFYDPLVFPSDEFDASISQVNEKINQSLAFIRKSDELLHHVNAGKSTTNIMITTIIIVIIVILLSLIAVGLLLYCKARSTPVTLSKDQLSGINNIAFSN

SEQ ID NO: 8467 - protein, 574 aa, Artificial Sequence
  derived and/or modified protein sequence (wt) from HRSV__ADZ95778.1__F0
MELPILKTNAITTILAAVTLCFASSQNITEEFYQSTCSAVSKGYLSALRTGWYTSVITIELSSIKENKCNGTDAKVKLIKQELDKYKNAVTELQLLMQSTPAANNRARRELPRFMNYTLNNTKTTNVTLSRKRKRRFLGFLLGVGSAIASGIAVSKVLHLEGEVNKIKSALLSTNKAVVSLSNGVSVLTSKVLDLKNYIDKQLLPIVNKQSCSISNIETVIEFQQKNNRLLEITREFSVNAGVTTPVSTYMLTNSELLSLINDMPITNDQKKLMFNNVQIVRQQSYSIMSIIKEEVLAYVVQLPLYGVIDTPCWKLHTSPLCTTNTKEGSNICLTRTDRGWYCDNAGSVSFFPQAETCKVQSNRVFCDTMNSLTLPSEVNLCNIDIFNPKYDCKIMTSKTDVSSSVITSLGAIVSCYGKTKCTASNKNRGIIKTFSNGCDYVSNKGVDTVSVGNTLYYVNKQEGKSLYVKGEPIINFYDPLVFPSDEFDASISQVNEKINQSLAFIRKSDELLHNVNAGKSTTNIMITTIIIVIIVILLSLIAVGLLLYCKARSTPVTLSKDQLSGINNIAFSS

SEQ ID NO: 8468 - protein, 574 aa, Artificial Sequence
  derived and/or modified protein sequence (wt) from HRSV__ACY68435.1__F0
MELPILKTNAITTILAAVTLCFASSQNITEEFYQSTCSAVSKGYLSALRTGWYTSVITIELSTIKENKCNGTDAKVKLIKQELDKYKNAVTELQLLMQSTPAANNRARRELPRFMNYTLNNAKNTNVTLSKKRKRRFLGFLLGVGSAIASGIAVSKVLHLEGEVNKIKSALLSTNKAVVSLSNGVSVLTSKVLDLKNYIDKQLLPIVNKQSCSISNIETVIEFQQKNNRLLEITREFSVNAGVTTPVSTYMLTNSELLSLINDMPITNDQKKLMSNNVQIVRQQSYSIMSIIKEEVLAYVVQLPLYGVIDTPCWKLHTSPLCTTNTKEGSNICLTRTDRGWYCDNAGSVSFFPQAETCKVQSNRVFCDTMNSLTLPSEVNLCNIDIFNPKYDCKIMTSKTDVSSSVITSLGAIVSCYGKTKCTASNKNRGIIKTFSNGCDYVSNKGVDTVSVGNTLYYVNKQEGKSLYVKGEPIINFYDPLVFPSDEFDASISQVNEKINQSLAFIRKSDELLHNVNAGKSTTNIMITTIIIVIIVILLSLIAVGLLLYCKARSTPVTLSKDQLSGINNIAFSS

SEQ ID NO: 8469 - protein, 574 aa, Artificial Sequence
  derived and/or modified protein sequence (wt) from HRSV__ACO83302.1__F0
MELPILKANAITTILAAVTFCFASSQNITEEFYQSTCSAVSKGYLSALRTGWYTSVITIELSNIKENKCNGTDAKVKLIKQELDKYKNAVTELQLLMQSTPAANNRARRELPRFMNYTLNNTKKTNVTLSKKRKRRFLGFLLGVGSAIASGIAVSKVLHLEGEVNKIKSALLSTNKAVVSLSNGVSVLTSKVLDLKNYIDKQLLPIVNKQSCRISNIETVIEFQQKNNRLLEITREFSVNAGVTTPVSTYMLTNSELLSLINDMPITNDQKKLMSNNVQIVRQQSYSIMSIIKEEVLAYVVQLPLYGVIDTPCWKLHTSPLCTTNTKEGSNICLTRTDRGWYCDNAGSVSFFPQAETCKVQSNRVFCDTMNSLTLPSEVNLCNVDIFNPKYDCKIMTSKTDVSSSVITSLGAIVSCYGKTKCTASNKNRGIIKTFSNGCDYVSNKGVDTVSVGNTLYYVNKQEGKSLYVKGEPIINFYDPLVFPSDEFDASISQVNEKINQSLAFIRKSDELLHHVNAGKSTTNIMITTIIIVIIVILLSLIAVGLLLYCKARSTPVTLSKDQLSGINNIAFSN

SEQ ID NO: 8470 - protein, 574 aa, Artificial Sequence
  derived and/or modified protein sequence (wt) from HRSV__ABI35685.1__F0
MELPILKTNAITTILAAVTLCFASSQNITEEFYQSTCSAVSKGYLSALRTGWYTSVITIELSNIKENKCNGTDAKVKLIKQELDKYKNAVTELQLLMQSTPAANNRARRELPRFMNYTLNNTKNNNVTLSKKRKRRFLGFLLGVGSAIASGIAVSKVLHLEGEVNKIKSALLSTNKAVVSLSNGVSVLTSKVLDLKNYIDKQLLPIVNKQSCSISNIETVIEFQQKNNRLLEITREFSVNAGVTTPVSTYMLTNSELLSLINDMPITNDQKKLMSNNVQIVRQQSYSIMSIIKEEVLAYVVQLPLYGVIDTPCWKLHTSPLCTTNTKEGSNICLTRTDRGWYCDNAGSVSFFPQAETCKVQSNRVFCDTMNSLTLPSEVNLCNIDIFNPKYDCKIMTSKADVSSSVITSLGAIVSCYGKTKCTASNKNRGIIKTFSNGCDYVSNKGVDTVSVGNTLYYVNKQEGKSLYVKGEPIINFYDPLVFPSDEFDASISQVNEKINQSLAFIRKSDELLHNVNVGKSTTNIMITTIIIVIIVILLLLIAVGLFLYCKARSTPVTLSKDQLSGINNIAFSN

SEQ ID NO: 8471 - protein, 574 aa, Artificial Sequence
  derived and/or modified protein sequence (wt) from HRSV__AFI25251.1__F0
MELLIHRSSAIFLTLAINALYLTSSQNITEEFYQSTCSAVSRGYFSALRTGWYTSVITIELSNIKETKCNGTDTKVKLIKQELDKYKNAVTELQLLMQNTPAANNRARREAPQYMNYTINTTKNLNVSISKKRKRRFLGFLLGVGSAIASGIAVSKVLHLEGEVNKIKNALLSTNKAVVSLSNGVSVLTSKVLDLKNYINNQLLPIVNQQSCRISNIETVIEFQQKNSRLLEITREFSVNAGVTTPLSTYMLTNSELLSLINDMPITNDQKKLMSSNVQIVRQQSYSIMSIMKEEVLAYVVQLPIYGVIDTPCWKLHTSPLCTTNIKEGSNICLTRTDRGWYCDNAGSVSFFPQADTCKVQSNRVFCDTMNSLTLPSEVSLCNTDIFNSKYDCKIMTSKTDISSSVITSLGAIVSCYGKTKCTASNKNRGIIKTFSNGCDYVSNKGVDTVSVGNTLYYVNKLEGKNLYVKGEPIINYYDPLVFPSDEFDASISQVNEKINQSLAFIRRSDELLHNVNTGKSTTNIMITVIIIVIIVVLLSLIAIGLLLYCKAKNTPVTLSKDQLSGINNIAFSK

SEQ ID NO: 8472 - protein, 574 aa, Artificial Sequence
  derived and/or modified protein sequence (wt) from HRSV__AAX23994.1__F0
MELPILKANAITTILAAVTFCFASSQNITEEFYQSTCSAVSKGYLSALRTGWYTSVITIELSNIKENKCNGTDAKVKLINQELDKYKNAVTELQLLMQSTTAANNRARRELPRFMNYTLNNTKKTNVTLSKKRKRRFLGFLLGVGSAIASGIAVSKVLHLEGEVNKIKSALLSTNKAVVSLSNGVSVLTSKVLDLKNYIDKQLLPIVNKQSCRISNIETVIEFQQKNNRLLEITREFSVNAGVTTPVSTYMLTNSELLSLINDMPITNDQKKLMSNNVQIVRQQSYSIMSIIKEEVLAYVVQLPLYGVIDTPCWKLHTSPLCTTNTKEGSNICLTRTDRGWYCDNAGSVSFFPQAETCKVQSNRVFCDTMNSLTLPSEVNLCNVDIFNPKYDCKIMTSKTDVSSSVITSLGAIVSCYGKTKCTASNKNRGIIKTFSNGCDYVSNKGVDTVSVGNTLYYVNKQEGKSLYVKGEPIINFYDPLVFPSDEFDASISQVNEKINQSLAFIRKSDELLHHVNAGKSTTNIMITTIIIVIIVILLSLIAVGLLLYCKARSTPVTLSKDQLSGINNIAFSN

SEQ ID NO: 8473 - protein, 574 aa, Artificial Sequence
  derived and/or modified protein sequence (wt) from HRSV__AAQ97026.1__F0
MELPILKANAITTILAAVTFCFASSQNITEEFYQSTCSAVSKGYLSALRTGWYTSVITIELSNIKENKCNGTDAKVKLIKQELDKYKNAVTELQLLMQSTSAANNRARRELPRFMNYTLNNTKKTNVTLSKKRKRRFLGFLLGVGSAIASGTAVSKVLHLEGEVNKIKSALLSTNKAVVSLSNGVSVLTSKVLDLKNYIDKQLLPIVNKQSCRISNIETVIEFQQKNNRLLEITREFSVNAGVTTPVSTYMLTNSELLSLINDMPITNDQKKLMSNNVQIVRQQSYSIMSIIKEEVLAYVVQLPLYGVIDTPCWKLHTSPLCTTNTKEGSNICLTRTDRGWYCDNAGSVSFFPQAETCKVQSNRVFCDTMNSLTLPSEVNLCNVDIFNPKYGCKIMTSKTDVSSSVITSLGAIVSCYGKTKCTASNKNRGIIKTFSNGCDYVSNKGVDTVSVGNTLYYVNKQEGKSLYVKGEPIINFYDPLVFPSDEFDASISQVNEKINQSLAFIRKSDELLHHVNAGKSTTNIMITTIIIVIIVILLSLIAVGLLLYCKARSTPVTLSKDQLSGINNIAFSN

SEQ ID NO: 8474 - protein, 574 aa, Artificial Sequence
  derived and/or modified protein sequence (wt) from HRSV__AAR14266.1__F0
MELLIHRSSAIFLTLAINALYLTSSQNITEEFYQSTCSAVSRGYFSALRTGWYTSVITIELSNIKETKCNGTDTKVKLIKQELDKYKNAVTELQLLTQNTPAANNRARREAPQYMNYTINTTKNLNVSISKKRKRRFLGFLLGVGSAIASGIAVSKVLHLEGEVNKIKNALLSTNKAVVSLSNGVSVLTSKVLDLKSYINNQLLPIVNQQSCRISNIETVIEFQQKNSRLLEITREFSVNAGVTTPLSTYMLTNSELLSLINDMPITNDQKKLMSSNVQIVRQQSYSIMSIIKEEVLAYVVQLPIYGVIDTPCWKLHTSPLCTTNIKEGSNICLTRTDRGWYCDNAGSVSFFPQADTCKVQSNRVFCDTMNSLTLPSEVSLCNTDIFNSKYDCKIMTSKTDISSSVITSLGAIVSCYGKTKCTASNKNRGIIKTFSNGCDYVSNKGVDTVSVGNTLYYVNKLEGKNLYVKGEPIINYYDPLVFPSDEFDASISQVNEKINQSLAFIRRSDELLHNVNTGKSTTNIMITTIIIVIIVVLLSLIAIGLLLYCKAKNTPVTLSKDQLSGINNIAFSK

SEQ ID NO: 8475 - protein, 574 aa, Artificial Sequence
  derived and/or modified protein sequence (wt) from HRSV__AAQ97027.1__F0
MELPILKANAITTILAAVTFCFASSQNITEEFYQSTCSAVSKGYLSALRTGWYTSVITIELSNIKENKCNGTDAKVKLIKQELDKYKNAVTELQLLMQSTSAANNRARRELPRFMNYTLNNTKKTNVTLSKKRKRRFLGFLLGVGSAIASGTAVSKVLHLEGEVNKIKSALLSTNKAVVSLSNGVSVLTSKVLDLKNYIDKQLLPIVNKQSCRISNIETVIEFQQKNNRLLEITREFSVNAGVTTPVSTYMLTNSELLSLINDMPITNDQKKLMSNNVQIVRQQSYSIMSIIKEEVLAYVVQLPLYGVIDTPCWKLHTSPLCTTNTKEGSNICLTRTDRGWYCDNAGSVSFFPQAETCKVQSNRVFCDTMNSLTLPSEVNLCNVDIFNPKYDCRIMTSKTDVSSSVITSLGAIVSCYGKTKCTASNKNRGIIKTFSNGCDYVSNKGVDTVSVGNTLYYVNKQEGKSLYVKGEPIINFYDPLVFPSDEFDASISQVNEKINQSLAFIRKSDELLHHVNAGKSTTNIMITTIIIVIIVILLSLIAVGLLLYCKARSTPVTLSKDQLSGINNIAFSN

SEQ ID NO: 8476 - protein, 574 aa, Artificial Sequence
  derived and/or modified protein sequence (wt) from HRSV__AAQ97030.1__F0
MELPILKANAITTILAAVTFCFASSQNITEEFYQSTCSAVSKGYLSALRTGWYTSVITIELSNIKENKCNGTDAKVKLIKQELDKYKNAVTELQLLMQSTSAANNRARRELPRFMNYTLNNTKKTNVTLSKKRKRRFLGFLLGAGSAIASGTAVSKVLHLEGEVNKIKSALLSTNKAVVSLSNGVSVLTSKVLDLKNYIDKQLLPIVNKQSCRISNIETVIEFQQKNNRLLEITREFSVNAGVTTPVSTYMLTNSELLSLINDMPITNDQKKLMSNNVQIVRQQSYSIMSIIKEEVLAYVVQLPLYGVIDTPCWKLHTSPLCTTNTKEGSNICLTRTDRGWYCDNAGSVSFFPQAETCKVQSNRVFCDTMNSLTLPSEVNLCNVDIFNPKYDCKIMTSKTDVSSSVITSLGAIVSCYGKTKCTASNKNRGIIKTFSNGCDYVSNKGVDTVSVGNTLYYVNKQEGKSLYVKGEPIINFYDPLVFPSDEFDASISQVNEKINQSLAFIRKSDELLHHVNAGKSTTNIMITTIIIVIIVILLSLIAVGLLLYCKARSTPVTLSKDQLSGINNIAFSN

SEQ ID NO: 8477 - protein, 574 aa, Artificial Sequence
  derived and/or modified protein sequence (wt) from HRSV__AAQ97028.1__F0
MELPILKANAITTILAAVTFCFASSQNITEEFYQSTCSAVSKGYLSALRTGWYTSVITIELSNIKENKCNGTDAKVKLIKQELDKYKNAVTELQLLMQSTSAANNRARRELPRFMNYTLNNTKKTNVTLSKKRKRRFLGFLLGVGSAIASGTAVSKVLHLEGEVNKIKSALLSTNKAVVSLSNGVSVLTSKVLDLKNYIDKQLLPIVNKQSCRISNIETVIEFQQKNNRLLEITREFSVNAGVTTPVSTYMLTNSELLSLINDMPITNDQKKLMSNNVQIVRQQSYSIMSIIKEEVLAYVVQLPLYGVIDTPCWKLHTSPLCTTNTKEGSNICLTRTDRGWYCDNAGSVSFFPQAETCKVQSNRVFCDTMNSLTLPSEVNLCNVDIFNPKYDCKIMTSKTDVSSSVITSLGAIVSCYGKTKCTASNKNRGIIKTFSNGCDYVSNKGVDTVSVGNTLYYVNKQEGKSLYVKGEPIINFYDPLVFPSDEFEASISQVNEKINQSLAFIRKSDELLHHVNAGKSTTNIMITTIIIVIIVILLSLIAVGLLLYCKARSTPVTLSKDQLSGINNIAFSN

SEQ ID NO: 8478 - protein, 574 aa, Artificial Sequence
  derived and/or modified protein sequence (wt) from HRSV__AAC57027.1__F0
MELPILKTNAITAILAAVTLCFASSQNITEEFYQSTCSAVSKGYLSALRTGWYTSVITIELSNIKENKCNGTDAKVKLIKQELDKYKSAVTELQLLMQSTPATNNRARRELPRFMNYTLNNTKNTNVTLSKKRKRRFLGFLLGVGSAIASGIAVSKVLHLEGEVNKIKSALLSTNKAVVSLSNGVSVLTSKVLDLKNYIDKQLLPIVNKQSCSISNIETVIEFQQKNNRLLEITREFSVNAGVTTPVSTYMLTNSELLSLINDMPITNDQKKLMSNNVQIVRQQSYSIMSIIKEEVLAYVVQLPLYGVIDTPCWKLHTSPLCTTNTKEGSNICLTRTDRGWYCDNAGSVSFFPLAETCKVQSNRVFCDTMNSLTLPSEVNLCNIDIFNPKYDCKIMTSKTDVSSSVITSLGAIVSCYGKTKCTASNKNRGIIKTFSNGCDYVSNKGVDTVSVGNTLYYVNKQEGKSLYVKGEPIINFYDPLVFPSDEFDASISQVNEKINQSLAFIRKSDELLHNVNAGKSTTNIMITTIIIVIIVILLSLIAVGLLLYCKARSTPVTLSKDQLSGINNIAFSN

SEQ ID NO: 8479 - protein, 574 aa, Artificial Sequence
  derived and/or modified protein sequence (wt) from HRSV__AAQ97029.1__F0
MELPILKANAITTILAAVTFCFASSQNITEEFYQSTCSAVSKGYLSALRTGWYTSVITIELSNIKENKCNGTDAKVKLIKQELDKYKNAVTELQLLMQSTSAANNRARRELPRFMNYTLNNTKKTNVTLSKKRKRRFLGLLLGVGSAIASGTAVSKVLHLEGEVNKIKSALLSTNKAVVSLSNGVSVLTSKVLDLKNYIDKQLLPIVNKQSCRISNIETVIEFQQKNNRLLEITREFSVNAGVTTPVSTYMLTNSELLSLINDMPITNDQKKLMSNNVQIVRQQSYSIMSIIKEEVLAYVVQLPLYGVIDTPCWKLHTSPLCTTNTKEGSNICLTRTDRGWYCDNAGSVSFFPQAETCKVQSNRVFCDTMNSLTLPSEVNLCNVDIFNPKYDCKIMTSKTDVSSSVITSLGAIVSCYGKTKCTASNKNRGIIKTFSNGCDYVSNKGVDTVSVGNTLYYVNKQEGKSLYVKGEPIINFYDPLVFPSDEFDASISQVNEKINQSLAFIRKSDELLHHVNAGKSTTNIMITTIIIVIIVILLSLIAVGLLLYCKARSTPVTLSKDQLSGINNIAFSN

SEQ ID NO: 8480 - protein, 574 aa, Artificial Sequence
  derived and/or modified protein sequence (wt) from HRSV__AAQ97031.1__F0
MELPILKANAITTILAAVTFCFASSQNITEEFYQSTCSAVSKGYLSALRTGWYTSVITIELSNIKENKCNGTDAKVKLIKQELDKYKNAVTELQLLMQSTSAANNRARRELPRFMNYTLNNTKKTNVTLSKKRKRRFLGFLLGVGSAIASGTAVSKVLHLEGEVNKIKSALLSTNKAVVSLSNGVSVLTSKVLDLKNYIDKQLLPIVNKQSCRISNIETVIEFQQKNNRLLEITREFSVNAGVTTPVSTYMLTNSELLSLINDMPITNDQKKLMSNNVQIVRQQSYSIMSIIKEEVLAYVVQLPLYGVIDTPCWKLHTSPLCTTNTKEGSNICLTRTDRGWYCDNAGSVSFFPQAETCKVQSNRVFCDTMNSLTLPSEVNLCNVDIFNPKYDCKIMTSKTDVSSSVITSLGAIVSCYGKTKCTASNKNRGIIKTFSNGCDYVSNKGVDTVSVGNTLYYVNKQEGKSLYVKGEPIINFYDPLVFPSDEFDASISQVNEKINQSLAFIRKSDELLHHVNAGKSTTNIMITTIIIVIIVILLSLIAVGLLLYCKARSTPVTLSKDQLSGINNIAFSN

SEQ ID NO: 8481 - protein, 574 aa, Artificial Sequence
  derived and/or modified protein sequence (wt) from HRSV__AAM68160.1__F0
MDLPILKTNAITTILAAVLLCFASSQNITEEFYQSTCSAVSKGYLSALRTGWYTSVITIELSNIKENKCNGTDAKVKLIKQELDKYKNAVTELQLLMQSTPAANNRARRELPRFMNYTLNNTKNNNVTLSKKRKRRFLGFLLGVGSAIASGIAVSKVLHLEGEVNKIKSALLSTNKAVVSLSNGVSVLTSKVLDLKNYIDKQLLPIVNKQSCSISNIETVIEFQQKNNRLLEITREFSVNAGVTTPVSTYMLTNSELLSLINDMPITNDQKKLMSNNVQIVRQQSYSIMSIIKEEVLAYVVQLPLYGVIDTPCWKLHTSPLCTTNTKEGSNICLTRTDRGWYCDNAGSVSFFPQAETCKVQSNRVFCDTMNSLTLPSEVNLCNIDIFNPKYDCKIMTSKTDVSSSVITSLGAIVSCYGKTKCTASNKNRGIIKTFSNGCDYVSNKGVDTVSVGNTLYYVNKQEGKSLYVKGEPIINFYDPLVFPSDEFDASISQVNEKINQSLAFIRKSDELLHNVNVGKSTTNIMITTIIIVIIVILLLLIAVGLFLYCKARSTPVTLSKDQLSGINNIAFSN

SEQ ID NO: 8482 - protein, 574 aa, Artificial Sequence
  derived and/or modified protein sequence (wt) from HRSV__AAM44851.1__F0
MELPILKANAITTILAAVTLCFVSSQNITEEFYQSTCSAVSKGYLSALRTGWYTSVITIELSNIKENKCNGTDAKVKLIKQELDKYKNAVTELQLLMQSTPAANNRARRELPRFMNYTLNNTKNTNVTLSKKRKRRFLGFLLGVGSAIASGIAVSKVLHLEGEVNKIKSALLSTNKAVVSLSNGVSVLTSKVLDLKNYIDKQLLPIVNKQSCSISNIETVIEFQQKNNRLLEITREFSVNAGVTTPVSTYMLTNSELLSLINDMPITNDQKKLMSNNVQIVRQQSYSIMSIIKEEVLAYVVQLPLYGVIDTPCWKLHTSPLCTTNTKEGSNICLTRTDRGWYCDNAGSVSFFPQAETCKVQSNRVFCDTMNSLTLPSEVNLCNVDIFNPKYDCKIMTSKTDVSSSVITSLGAIVSCYGKTKCTASNKNRGIIKTFSNGCDYVSNKGVDTVSVGNTLYYVNKQEGKNLYVKGEPIINFYDPLVFPSDEFDASISQVNEKINQSLAFIRKSDELLHNVNAGKSTTNIMITTIIIVIIVILLSLIAVGLLLYCKARSTPVTLSKDQLSGINNIAFSS

SEQ ID NO: 8483 - protein, 574 aa, Artificial Sequence
  derived and/or modified protein sequence (wt) from HRSV__P11209.2__F0
MELPILKTNAITAILAAVTLCFASSQNITEEFYQSTCSAVSKGYLSALRTGWYTSVITIELSNIKENKCNGTDAKVKLIKQELDKYKSAVTELQLLMQSTPATNNRARRELPRFMNYTLNNTKNTNVTLSKKRKRRFLGFLLGVGSAIASGIAVSKVLHLEGEVNKIKSALLSTNKAVVSLSNGVSVLTSKVLDLKNYIDKQLLPIVNKQSCSISNIETVIEFQQKNNRLLEITREFSVNAGVTTPVSTYMLTNSELLSLINDMPITNDQKKLMSNNVQIVRQQSYSIMSIIKEEVLAYVVQLPLYGVIDTPCWKLHTSPLCTTNTKEGSNICLTRTDRGWYCDNAGSVSFFPLAETCKVQSNRVFCDTMNSLTLPSEVNLCNIDIFNPKYDCKIMTSKTDVSSSVITSLGAIVSCYGKTKCTASNKDRGIIKTFSNGCDYVSNKGVDTVSVGNTLYYVNKQEGKSLYVKGEPIINFYDPLVFPSDEFDASISQVNEKINQSLAFIRKSDELLHNVNAGKSTTNIMITTIIIVIIVILLSLIAVGLLLYCKARSTPVTLSKDQLSGINNIAFSN

SEQ ID NO: 8484 - protein, 574 aa, Artificial Sequence
  derived and/or modified protein sequence (wt) from HRSV__P13843.1__F0
MELLIHRSSAIFLTLAVNALYLTSSQNITEEFYQSTCSAVSRGYFSALRTGWYTSVITIELSNIKETKCNGTDTKVKLIKQELDKYKNAVTELQLLMQNTPAANNRARREAPQYMNYTINTTKNLNVSISKKRKRRFLGFLLGVGSAIASGIAVSKVLHLEGEVNKIKNALLSTNKAVVSLSNGVSVLTSKVLDLKNYINNRLLPIVNQQSCRISNIETVIEFQQMNSRLLEITREFSVNAGVTTPLSTYMLTNSELLSLINDMPITNDQKKLMSSNVQIVRQQSYSIMSIIKEEVLAYVVQLPIYGVIDTPCWKLHTSPLCTTNIKEGSNICLTRTDRGWYCDNAGSVSFFPQADTCKVQSNRVFCDTMNSLTLPSEVSLCNTDIFNSKYDCKIMTSKTDISSSVITSLGAIVSCYGKTKCTASNKNRGIIKTFSNGCDYVSNKGVDTVSVGNTLYYVNKLEGKNLYVKGEPIINYYDPLVFPSDEFDASISQVNEKINQSLAFIRRSDELLHNVNTGKSTTNIMITTIIIVIIVVLLSLIAIGLLLYCKAKNTPVTLSKDQLSGINNIAFSK

SEQ ID NO: 8485 - protein, 574 aa, Artificial Sequence
  derived and/or modified protein sequence (wt) from HRSV__AAO72325.1__F0
MELPILKTNAITTILAAVTLCFASSQNITEEFYQSTCSAVSKGYLSALRTGWYTSVITIELSNIKENKCNGTDAKAKLIKQELDKYKNAVTELQLLMQSTPAANNRARRELPRFMNYTLNNTKNTNVTLSKKRKRRFLGFLLGVGSAIASGIAVSKVLHLEGEVNKIKSALLSTNKAVVSLSNGVSVLTSKVLHLKNYIDKQFLPIVNKQSCSISNIATVIEFQQKNNRLLEITREFSVNAGVTTPVSTYMLTNSELLSLINDMPITNDQKKLMSNNVQIVRQQSYSIMSIIKEEVLAYVVQLPLYGVMDTPCWKLHTSPLCTTNTKEGSNICLTRTDRGWYCDNAGSVSFFPQAETCKVQSNRVFCDTMNSLTLPSEVNLCNIDIFNPKYDCKIMTSKTDVSSSVITSLGAIVSCYGKTKCTASNKNRGIIKTFSNGCDYVSNKGVDTVSVGNTLYYVNKQEGKSLYVKGEPIINFYDPLVFPSDEFDASISQVNEKINQSLAFIRKSDELLHNVNAGKSTINIMITTIIIVIIVILLSLIAVGLLLYCKARSTPVTLSKDQLSGINNIAFSS

SEQ ID NO: 8486 - protein, 574 aa, Artificial Sequence
  derived and/or modified protein sequence (wt) from HRSV__AAM68157.1__F0
MDLPILKTNAITTILAAVSLCFASSQNITEEFYQSTCSAVSKGYLSALRTGWYTSVITIELSNIKENKCNGTDAKVKLIKQELDKYKNAVTELQLLMQSTPAANNRARRELPRFMNYTLNNTKNNNVTLSKKRKRRFLGFLLGVGSAIASGIAVSKVLHLEGEVNKIKSALLSTNKAVVSLSNGVSVLTSKVLDLKNYIDKQLLPIVNKQSCSISNIETVIEFQQKNNRLLEITREFSVNAGVTTPVSTYMLTNSELLSLINDMPITNDQKKLMSNNVQIVRQQSYSIMSIIKEEVLAYVVQLPLYGVIDTPCWKLHTSPLCTTNTKEGSNICLTRTDRGWYCDNAGSVSFFPQAETCKVQSNRVFCDTMNSLTLPSEVNLCNIDIFNPKYDCKIMTSKTDVSSSVITSLGAIVSCYGKTKCTASNKNRGIIKTFSNGCDYVSNKGVDTVSVGNTLYYVNKQEGKSLYVKGEPIINFYDPLVFPSDEFDASISQVNEKINQSLAFIRKSDELLHNVNVGKSTTNIMITTIIIVIIVILLLLIAVGLFLYCKARSTPVTLSKDQLSGINNIAFSN

SEQ ID NO: 8487 - protein, 574 aa, Artificial Sequence
  derived and/or modified protein sequence (wt) from HRSV__CAA26143.1__F0
MELLILKANAITTILTAVTFCFASGQNITEEFYQSTCSAVSKGYLSALRTGWYTSVITIELSNIKENKCNGTDAKVKLIKQELDKYKNAVTELQLLMQSTPATNNRARRELPRFMNYTLNNAKKTNVTLSKKRKRRFLGFLLGVGSAIASGVAVSKVLHLEGEVNKIKSALLSTNKAVVSLSNGVSVLTSKVLDLKNYIDKQLLPIVNKQSCSISNIETVIEFQQKNNRLLEITREFSVNAGVTTPVSTYMLTNSELLSLINDMPITNDQKKLMSNNVQIVRQQSYSIMSIIKEEVLAYVVQLPLYGVIDTPCWKLHTSPLCTTNTKEGSNICLTRTDRGWFCDNAGSVSFFPQAETCKVQSNRVFCDTMNSLTLPSEVNLCNVDIFNPKYDCKIMTSKTDVSSSVITSLGAIVSCYGKTKCTASNKNRGIIKTFSNGCDYVSNKGVDTVSVGNTLYYVNKQEGKSLYVKGEPIINFYDPLVFPSDEFDASISQVNEKINQSLAFIRKSDELLHNVNAGKSTTNIMITTIIIVIIVILLSLIAVGLLLYCKARSTPVTLSKDQLSGINNIAFSN

SEQ ID NO: 8488 - protein, 574 aa, Artificial Sequence
  derived and/or modified protein sequence (wt) from HRSV__1512372A__F0
MELPILKANAITTILAAVTFCFASSQNITEEFYQSTCSAVSKGYLSALRTGWYTSVITIELSNIKENKCNGTDAKVKLIKQELDKYKNAVTELQLLMQSTPAANNRARRELPRFMNYTLNNTKKTNVTLSKKRKRRFLGFLLGVGSAIASGTAVSKVLHLEGEVNKIKSALLSTNKAVVSLSNGVSVLTSKVLDLKNYIDKQLLPIVDKQSCRISNIETVIEFQQKNNRLLEITREFSVNAGVTTPVSTYMLTNSELLSLINDMPITNDQKKLMSNNVQIVRQQSYSIMSIIKEEVLAYVVQLPLYGVIDTPCWKLHTSPLCTTNTKEGSNICLTRTDRGWYCDNAGSVSFFPQAETCKVQSNRVFCDTMNSLTLPSEVNLCNVDIFNPKYDCKIMTSKTDVSSSVITSLGAIVSCYGKTKCTASNKNRGIIKTFSNGCDYASNKGVDTVSVGNTLYYVNKQEGKSLYVKGEPIINFYDPLVFPSDEFDASISQVNEKINQSLAFIRKSDELLHHVNAGKSTTNIMITTIIIVIIVILLSLIAVGLLLYCKARSTPVTLSKDQLSGINNIAFSN

SEQ ID NO: 8489 - protein, 574 aa, Artificial Sequence
  derived and/or modified protein sequence (wt) from HRSV__AAB86664.1__F0
MELLILKANAITTILTAVTFCFASGQNITEEFYQSTCSAVSKGYLSALRTGWYTSVITIELSNIKENKCNGTDAKVKLIKQELDKYKNAVTELQLLMQSTPATNNRARRELPRFMNYTLNNAKKTNVTLSKKRKRRFLGFLLGVGSAIASGVAVSKVLHLEGEVNKIKSALLSTNKAVVSLSNGVSVLTSKVLDLKNYIDKQLLPIVNKQSCSISNIATVIEFQQKNNRLLEITREFSVNAGVTTPVSTYMLTNSELLSLINDMPITNDQKKLMSNNVQIVRQQSYSIMSIIKEEVLAYVVQLPLYGVIDTPCWKLHTSPLCTTNTKEGSNICLTRTDRGWYCDNAGSVSFFPQAETCKVQSNRVFCDTMNSLTLPSEVNLCNVDIFNPKYDCKIMTSKTDVSSSVITSLGAIVSCYGKTKCTASNKNRGIIKTFSNGCDYVSNKGVDTVSVGNTLYYVNKQEGKSLYVKGEPIINFYDPLVFPSDEFDASISQVNEKINQSLAFIRKSDELLHNVNAGKSTINIMITTIIIVIIVILLSLIAVGLLLYCKARSTPVTLSKDQLSGINNIAFSN

SEQ ID NO: 8490 - protein, 574 aa, Artificial Sequence
  derived and/or modified protein sequence (wt) from HRSV__AAO72324.1__F0
MELPILKTNAITTILAAVTLCFASSQNITEEFYQSTCSAVSKGYLSALRTGWYTSVITIELSNIKENKCNGTDAKVKLIKQELDKYKNAVTELQLLMQSTPAANNRARRELPRFMNYTLNNTKNTNVTLSKKRKRRFLGFLLGVGSAIASGIAVSKVLHLEGEVNKIKSALLSTNKAVVSLSNGVSVLTSKVLDLKNYIDKQLLPIVNKQSCSISNIATVIEFQQKNNRLLEITREFSVNAGVTTPVSTYMLTNSELLSLINDMPITNDQKKLMSNNVQIVRQQSYSIMSIIKEEVLAYVVQLPLYGVIDTPCWKLHTSPLCTTNTKEGSNICLTRTDRGWYCDNAGSVSFFPQAETCKVQSNRVFCDTMNSLTLPSEVNLCNIDIFNPKYDCKIMTSKTDVSSSVITSLGAIVSCYGKTKCTASNKNRGIIKTFSNGCDYVSNKGVDTVSVGNTLYYVNKQEGKSLYVKGEPIINFYDPLVFPFDEFDASISQVNEKINQSLAFIRKSDELLHNVNAGKSTINIMITTIIIVIIVILLSLIAVGLLLYCKARSTPVTLSKDQLSGINNIAFSN

SEQ ID NO: 8491 - protein, 574 aa, Artificial Sequence
  derived and/or modified protein sequence (wt) from HRSV__AAB82446.1__F0
MELLIHRLSAIFLTLAINALYLTSSQNITEEFYQSTCSAVSRGYFSALRTGWYTSVITIELSNIKETKCNGTDTKVKLIKQELDKYKNAVTELQLLMQNTPAANNRARREAPQYMNYTINTTKNLNVSISKKRKRRFLGFLLGVGSAIASGIAVSKVLHLEGEVNKIKNALLSTNKAVVSLSNGVSVLTSKVLDLKNYINNQLLPIVNQQSCRISNIGTVIEFQQKNSRLLEINREFSVNAGVTTPLSTYMLTNSELLSLINDMPITNDQKKLMSSNVQIVRQQSYSIMSIIKEEVLAYVVQLPIYGVIDTPCWKLHTSPLCTTNIKEGSNICLTRTDRGWYCDNAGSVSFFPQADTCKVQSNRVFCDTMNSLTLPSEVSLCNTDIFNSKYDCKIMTSKTDISSSVITSLGAIVSCYGKTKCTASNKNRGIIKTFSNGCDYVSNKGVDTVSVGNTLYYVNKLEGKNLYVKGEPIINYYDPLVFPSDEFDASISQVNEKINQSLAFIRRSDELLHNVNTGKSTTNIMITTIIIVIIVVLLSLIAIGLLLYCKAKNTPVTLSKDQLSGINNIAFSK

SEQ ID NO: 8492 - protein, 574 aa, Artificial Sequence
  derived and/or modified protein sequence (wt) from HRSV__AAO72323.1__F0
MELPILKTNAITTILAAVTLCFASSQNITEEFYQSTCSAVSKGYLSALRTGWYTSVITIELSNIKENKCNGTDAKVKLIKQELDKYKNAVTELQLLMQSTPAANNRARRELPRFMNYTLNNTKNTNVTLSKKRKRRFLGFLLGVGSAIASGIAVSKVLHLEGEVNKIKSALLSTNKAVVSLSNGVSVLTSKVLDLKNYIDKQLLPIVNKQSCSISNIATVIEFQQKNNRLLEITREFSVNAGVTTPVSTYMLTNSELLSLINDMPITNDQKKLMSNNVQIVRQQSYSIMSIIKEEVLAYVVQLPLYGVMDTPCWKLHTSPLCTTNTKEGSNICLTRTDRGWYCDNAGSVSFFPQAETCKVQSNRVFCDTMNSLTLPSEVNLCNIDIFNPKYDCKIMTSKTDVSSSVITSLGAIVSCYGKTKCTASNKNRGIIKTFSNGCDYVSNKGVDTVSVGNTLYYVNKQEGKSLYVKGEPIINFYDPLVFPSDEFDASISQVNEKINQSLAFIRKSDELLHNVNAGKSTINIMITTIIIVIIVILLSLIAVGLLLYCKARSTPVTLSKDQLSGINNIAFSN

SEQ ID NO: 8493 - protein, 574 aa, Artificial Sequence
  derived and/or modified protein sequence (wt) from HRSV__AAM68154.1__F0
MELPILKTNAITTILAAVTLCFASSQNITEEFYQSTCSAVSKGYLSALRTGWYTSVITIELSNIKENKCNGTDAKVKLIKQELDKYKNAVTELQLLMQSTPAANNRARRELPRFMNYTLNNTKTTNVTLSRKRKRRFLGFLLGVGSAIASGIAVSKVLHLEGEVNKIKSALLSTNKAVVSLSNGVSVLTSKVLDLKNYIDKQLLPIVNKQSCSISNIETVIEFQQKNNRLLEITREFSVNAGVTTPVSTYMLTNSELLSLINDMPITNDQKKLMSNNVQIVRQQSYSIMSIIKEEVLAYVVQLPLYGVIDTPCWKLHTSPLCTTNTKEGSNICLTRTDRGWYCDNAGSISFFPQAETCKVQSNRVFCDTMNSLTLPSEVNLCNIDIFNPKYDCKIMTSKTDVSSSVITSLGAIVSCYGKTKCTASNKNRGIIKTFSNGCDYVSNKGVDTVSVGNTLYYVNKQEGKSLCVKGEPIINFYDPLVFPSDEFDASISQVNEKINQSLAFIRKSDELLHNVNAGKSTTNIMITTIIIVIIVILLSLIAVGLLLYCKARSTPVTLSKDQLSGINNIAFSS

SEQ ID NO: 8494 - protein, 574 aa, Artificial Sequence
  derived and/or modified protein sequence (wt) from HRSV__AAA47410.1__F0
MELPILKANAITTILAAVTFCFASSQNITEEFYQSTCSAVSKGYLSALRTGWYTSVITIELSNIKENKCNGTDAKVKLMKQELDKYKNAVTELQLLMQSTPAANNRARRELPRFMNYTLNNTKKTNVTLSKKRKRRFLGFLLGVGSAIASGIAVSKVLHLEGEVNKIKSALLSTNKAVVSLSNGVSVLTSKVLDLKNYIDKQLLPIVNKQSCRISNIETVIEFQQKNNRLLEITREFSVNAGVTTPVSTYMLTNSELLSLINDMPITNDQKKLMSNNVQIVRQQSYSIMSIIKEEVLAYVVQLPLYGVIDTPCWKLHTSPLCTTNTKEGSNICLTRTDRGWYCDNAGSVSFFPQAETCKVQSNRVFCDTMNSLTLPSEVNLCNVDIFNPKYDCKIMTSKTDVSSSVITSLGAIVSCYGKTKCTASNKNRGIIKTFSNGCDYVSNKGVDTVSVGNTLYYVNKQEGKSLYVKGEPIINFYDPLVFPSDEFDASISQVNEKINQSLAFIRKSDELLHNVNAGKSTTNIMITTIIIVIIVILLSLIAVGLLLYCKARSTPVTLSKDQLSGINNIAFSN

SEQ ID NO: 8495 - protein, 574 aa, Artificial Sequence
  derived and/or modified protein sequence (wt) from HRSV__P12568.1__F0
MELPILKANAITTILAAVTFCFASSQNITEEFYQSTCSAVSKGYLSALRTGWYTSVITIELSNIKENKCNGTDAKVKLIKQELDKYKNAVTELQLLMQSTPAANNRARRELPRFMNYTLNNTKKTNVTLSKKRKRRFLGFLLGVGSAIASGTAVSKVLHLEGEVNKIKSALLSTNKAVVSLSNGVSVLTSKVLDLKNYIDKQLLPIVNKQSCRISNIETVIEFQQKNNRLLEITREFSVNAGVTTPVSTYMLTNSELLSLINDMPITNDQKKLMSNNVQIVRQQSYSIMSIIKEEVLAYVVQLPLYGVIDTPCWKLHTSPLCTTNTKEGSNICLTRTDRGWYCDNAGSVSFFPQAETCKVQSNRVFCDTMNSLTLPSEVNLCNVDIFNPKYDCKIMTSKTDVSSSVITSLGAIVSCYGKTKCTASNKNRGIIKTFSNGCDYASNKGVDTVSVGNTLYYVNKQEGKSLYVKGEPIINFYDPLVFPSDEFDASISQVNEKINQSLAFIRKSDELLHHVNAGKSTTNIMITTIIIVIIVILLSLIAVGLLLYCKARSTPVTLSKDQLSGINNIAFSN

SEQ ID NO: 8496 - protein, 574 aa, Artificial Sequence
  derived and/or modified protein sequence (wt) from HRSV__ARB07894.1__F0
MELLIHRLSAIFLTLAINALYLTSSQNITEEFYQSTCSAVSRGYFSALRTGWYTSVITIELSNIKETKCNGTDTKVKLIKQELDKYKNAVTELQLLMQNTPAANNRARREAPQYMNYTINTTKNLNVSISKKRKRRFLGFLLGVGSAIASGIAVSKVLHLEGEVNKIKNALLSTNKAVVSLSNGVSVLTSKVLDLKNYINNQLLPIVNQQSCRISNIETVIEFQQKNSRLLEINREFSVNAGVTTPLSTYMLTNSELLSLINDMPITNDQKKLMSSNVQIVRQQSYSIMSIIKEEVLAYVVQLPIYGVIDTPCWKLHTSPLCTTNIKEGSNICLTRTDRGWYCDNAGSVSFFPQADTCKVQSNRVFCDTMYSLTLPSEVSLCNTDIFNSKYDCKIMTSKTDISSSVITSLGAIVSCYGKTKCTASNKNRGIIKTFSNGCDYVSNKGVDTVSVGNTLYYVNKLEGKNLYVKGEPIINYYDPLVFPSDEFDASISQVNEKINQSLAFIRRSDELLHNVNTGKSTTNIMITTIIIVIIVVLLSLIAIGLLLYCKAKNTPVTLSKDQLSGINNIAFSK

SEQ ID NO: 8497 - protein, 574 aa, Artificial Sequence
  derived and/or modified protein sequence (wt) from HRSV__AGG39517.1__F0
MELLIHRSSAIFLTLAINALYLTSSQNITEEFYQSTCSAVSRGYFSALRTGWYTSVITIELSNIKETKCNGTDTKVKLIKQELDKYKNAVTELQLLMQNTPAANNRARREAPQYMNYTINTTKNLNVSISKKRKRRFLGFLLGVGSAIASGIAVSKVLHLEGEVNKIKNALLSTNKAVVSLSNGVSVLTSKVLDLKNYINNQLLPIVNQQSCRISNIETVIEFQQKNSRLLEITREFSVNAGVTTPLSTYMLTNSELLSLINDMPITNDQKKLMSSNVQIVRQQSYSIMSIIKEEVLAYVVQLPIYGVIDTPCWKLHTSPLCTTNIKEGSNICLTRTDRGWYCDNAGSVSFFPQADTCKVQSNRVFCDTMNSLTLPSEVSLCNTDIFNSKYDCKIMTSKTDISSSVITSLGAIVSCYGKTKCTASNKNRGIIKTFSNGCDYVSNKGVDTVSVGNTLYYVNKLEGKNLYVKGEPIINYYDPLVFPSDEFDASISQVNEKINQSLAFIRRSDELLHNVNTGKSTTNIMITAIIIVIIVVLLSLIAIGLLLYCKAKNTPVTLSKDQLSGINNIAFSK

SEQ ID NO: 8498 - protein, 574 aa, Artificial Sequence
  derived and/or modified protein sequence (wt) from HRSV__BBC54612.1__F0
MELPILKTNAITTILAAVTLCFTSSQNITEEFYQSTCSAVSKGYLSALRTGWYTSVITIELSNIKENKCNGTDAKVKLIKQELDKYKNAVTELQLLMQSTPAANSRARRELPRFMNYTLNNTKNTNVTLSKKRKRRFLGFLLGVGSAIASGIAVSKVLHLEGEVNKIKSALLSTNKAVVSLSNGVSVLTSKVLDLKNYIDKQLLPIVNKQSCSISNIETVIEFQQKNNRLLEITREFSVNAGVTTPVSTYMLTNSELLSLINDMPITNDQKKLMSSNVQIVRQQSYSIMSIIKEEVLAYVVQLPLYGVIDTPCWKLHTSPLCTTNTKEGSNICLTRTDRGWYCDNAGSVSFFPQAETCKIQSNRVFCDTMNSLTLPSEVNLCNIDIFNPKYDCKIMTSKTDVSSSVITSLGAIVSCYGKTKCTASNKNRGIIKTFSNGCDYVSNKGVDTVSVGNTLYYVNKQEGKSLYVKGEPIINFYDPLVFPSDEFDASISQVNEKINQSLAFIRKSDELLHNVNAGKSTTNIMITTIIIVIIVILLALIAVGLLLYCKARSTPVTLSKDQLSGINNIAFSN

SEQ ID NO: 8499 - protein, 574 aa, Artificial Sequence
  derived and/or modified protein sequence (wt) from HRSV__BBC54636.1__F0
MELPILKTNAITTILAAVTLCFASSQNITEEFYQSTCSAVSKGYLSALRTGWYTSVITIELSNIKENKCNGTDAKVKLIKQELDKYKNAVTELQLLMQSTPAANSRARRELPRLMNYTLNNTKNTNVTLSKKRKRRFLGFLLGVGSAIASGIAVSKVLHLEGEVNKIKSALLSTNKAVVSLSNGVSVLTSKVLDLKNYIDKQLLPIVNKQSCSISNIETVIEFQQKNNRLLEITREFSVNAGVTTPVSTYMLTNSELLSLINDMPITNDQKKLMSSNVQIVRQQSYSIMSIIKEEVLAYVVQLPLYGVIDTPCWKLHTSPLCTTNTKEGSNICLTRTDRGWYCDNAGSVSFFPQAETCKVQSNRVFCDTMNSLTLPSEVNLCNIDIFNPKYDCKIMTSKTDVSSSVITSLGAIVSCYGKTKCTASNKNRGIIKTFSNGCDYVSNKGVDTVSVGNTLYYVNKQEGKSLYVKGEPIINFYDPLVFPSDEFDASISQVNEKINQSLAFIRKSDELLHNVNAGKSTTNIMITTIIIVIIVILLALIAVGLLLYCKARSTPVTLSKDQLSGINNIAFSN

SEQ ID NO: 8500 - protein, 574 aa, Artificial Sequence
  derived and/or modified protein sequence (wt) from HRSV__BBC54627.1__F0
MELPILKTNAITTILAAVTLCFASSQNITEEFYQSTCSAVSKGYLSALRTGWYTGVITIELSNIKENKCNGTDAKVKLIKQELDKYKNAVTELQLLMQSTPAANSRARRELPRFMNYTLNNTKSTNVTLSKKRKRRFLGFLLGVGSAIASGIAVSKVLHLEGEVNKIKSALLSTNKAVVSLSNGVSVLTSKVLDLKNYIDKQLLPIVNKQSCSISNIETVIEFQQKNNRLLEITREFSVNAGVTTPVSTYMLTNSELLSLINDMPITNDQKKLMSSNVQIVRQQSYSIMSIIKEEVLAYVVQLPLYGVIDTPCWKLHTSPLCTTNTKEGSNICLTRTDRGWYCDNAGSVSFFPQAETCKVQSNRVFCDTMNSLTLPSEVNLCNIDIFNPKYDCKIMTSKTDVSSSVITSLGAIVSCYGKTKCTASNKNRGIIKTFSNGCDYVSNKGVDTVSVGNTLYYVNKQEGKSLYVKGEPIINFYDPLVFPSDEFDASISQVNEKINQSLAFIRKSDELLHNVNAGKSTTNIMITTIIIVIIVILLALIAVGLLLYCKARSTPVTLSKDQLSGINNIAFSN

SEQ ID NO: 8501 - protein, 574 aa, Artificial Sequence
  derived and/or modified protein sequence (wt) from HRSV__BBC54621.1__F0
MELPILKTNAITTILAAVTLCFASSQNITEEFYQSTCSAVSKGYLSALRTGWYTSVITIELSNIKENKCNGTDAKVKLIKQELDKYKNAVTELQLLMQSTPAANSRARRELPRFMNYTLNNTKNTNVTLSKKRKRRFLGFLLGVGSAIASGIAVSKVLHLEGEVNKIKSALLSTNKAVVSLSNGVSVLTSKVLDLKNYIDKQLLPIVNKQSCSISNIETVIEFQQKNNRLLEITREFSVNAGVTTPVSTYMLTNSELLSLINDMPITNDQKKLMSSNVQIVRQQSYSIMSIIKEEVLAYVVQLPLYGVIDTPCWKLHTSPLCTTNTKEGSNICLTRTDRGWYCDNAGSVSFFPQAETCKVQTNRVFCDTMNSLTLPSEVNLCNIDIFNPKYDCKIMTSKTDVSSSVITSLGAIVSCYGKTKCTASNKNRGIIKTFSNGCDYVSNKGVDTVSVGNTLYYVNKQEGKSLYVKGEPIINFYDPLVFPSDEFDASISQVNEKINQSLAFIRKSDELLHNVNAGKSTTNIMITTIIIVIIVILLALIAVGLLLYCKARSTPVTLSKDQLSGINNIAFSN

SEQ ID NO: 8502 - protein, 574 aa, Artificial Sequence
  derived and/or modified protein sequence (wt) from HRSV__BBC54570.1__F0
MELPILKTNAITTILASVTLCFASSQNITEEFYQSTCSAVSKGYLSALRTGWYTSVITIELSNIKENKCNGTDAKVKLIKQELDKYKNAVTELQLLMQSTPAANSRARRELPRFMNYTLNNTKNTNVTLSKKRKRRFLGFLLGVGSAIASGIAVSKVLHLEGEVNKIKSALLSTNKAVVSLSNGVSVLTSKVLDLKNYIDKQLLPIVNKQSCSISNIETVIEFQQKNNRLLEITREFSVNAGVTTPVSTYMLTNSELLSLINDMPITNDQKKLMSSNVQIVRQQSYSIMSIIKEEVLAYVVQLPLYGVIDTPCWKLHTSPLCTTNTKEGSNICLTRTDRGWYCDNAGSVSFFPQAETCKVQSNRVFCDTMNSLTLPSEVNLCNIDIFNPKYDCKIMTSKTDVSSSVITSLGAIVSCYGKTKCTASNKNRGIIKTFSNGCDYVSNKGVDTVSVGNTLYYVNKQEGKSLYVKGEPIINFYDPLVFPSDEFDASISQVNEKINQSLAFIRKSDELLHNVNAGKSTTNIMITTIIIVIIVILLALIAVGLLLYCKARSTPVTLSKDQLSGINNIAFSN

SEQ ID NO: 8503 - protein, 574 aa, Artificial Sequence
  derived and/or modified protein sequence (wt) from HRSV__BBC54579.1__F0
MELPIFKTNAITTILAAVTLCFTSSQNITEEFYQSTCSAVSKGYLSALRTGWYTSVITIELSNIKENKCNGTDAKVKLIKQELDKYKNAVTELQLLMQSTPAANSRARRELPRFMNYTLNNTKNTNVTLSKKRKRRFLGFLLGVGSAIASGIAVSKVLHLEGEVNKIKSALLSTNKAVVSLSNGVSVLTSKVLDLKNYIDKQLLPIVNKQSCSISNIETVIEFQQKNNRLLEITREFSVNAGVTTPVSTYMLTNSELLSLINDMPITNDQKKLMSSNVQIVRQQSYSIMSIIKEEVLAYVVQLPLYGVIDTPCWKLHTSPLCTTNTKEGSNICLTRTDRGWYCDNAGSVSFFPQAETCKVQSNRVFCDTMNSLTLPSEVNLCNIDIFNPKYDCKIMTSKTDVSSSVITSLGAIVSCYGKTKCTASNKNRGIIKTFSNGCDYVSNKGVDTVSVGNTLYYVNKQEGKSLYVKGEPIINFYDPLVFPSDEFDASISQVNEKINQSLAFIRKSDELLHNVNAGKSTTNIMITTIIIVIIVILLALIAVGLLLYCKARSTPVTLSKDQLSGINNIAFSN

SEQ ID NO: 8504 - protein, 574 aa, Artificial Sequence
  derived and/or modified protein sequence (wt) from HRSV__BBC54595.1__F0
MELPILKTNAITTILAAVTLCFASSQNITEEFYQSTCSAVSKGYLSALRTGWYTSVITIELSNIKENKCNGTDAKVKLIKQELDKYKNAVTELQLLMQSTPAANSRARRELPRFMNYTLNNTKNTNVTLSKKRKRRFLGFLLGVGSAIASGIAVSKVLHLEGEVNKIKSALLSTNKAVVSLSNGVSVLTSKVLDLKNYIDKQLLPIVNKQSCSISNIETVIEFQQKNNRLLEITREFSVNAGVTTPVSTYMLTNSELLSLINDMPITNDQKKLMSSNVQIVRQQSYSIMSIIKEEVLAYVVQLPLYGVIDTPCWKLHTSPLCTTNTKEGSNICLTRTDRGWYCDNAGSVSFFPQAETCKVQSNRVFCDTMNSLTLPSEVNLCNIDIFNPKYDCKIMTSKTDVSSSVITSLGAIVSCYGKTKCTASNKNRGIIKTFSNGCDYVSNKGVDTVSVGNTLYYVNKQEGKSLYVKGEPIINFYDPLVFPSDEFDASISQVNEKINQSLAFIRKSDELLHNVNAGKSTTNIMITTIIIVIIVILLALIVVGLLLYCKARSTPVTLSKDQLSGINNIAFSN

SEQ ID NO: 8505 - protein, 574 aa, Artificial Sequence
  derived and/or modified protein sequence (wt) from HRSV__BBC54555.1__F0
MELPILKTNAITTILAAVTLCFASSQNITEEFYQSTCSAVSKGYLSALRTGWYTSVITIELSNIKENKCNGTDAKVKLIKQELDKYKNAVTELQLLMQSTPAANSRARRELPRFMNYTLNNTKNTNVTLGKKRKRRFLGFLLGVGSAIASGIAVSKVLHLEGEVNKIKSALLSTNKAVVSLSNGVSVLTSKVLDLKNYIDKQLLPIVNKQSCSISNIETVIEFQQKNNRLLEITREFSVNAGVTTPVSTYMLTNSELLSLINDMPITNDQKKLMSSNVQIVRQQSYSIMSIIKEEVLAYVVQLPLYGVIDTPCWKLHTSPLCTTNTKEGSNICLTRTDRGWYCDNAGSVSFFPQAETCKVQSNRVFCDTMNSLTLPSEVNLCNIDIFNPKYDCKIMTSKTDVSSSVITSLGAIVSCYGKTKCTASNKNRGIIKTFSNGCDYVSNKGVDTVSVGNTLYYVNKQEGKSLYVKGEPIINLYDPLVFPSDEFDASISQVNEKINQSLAFIRKSDELLHNVNAGKSTTNIMITTIIIVIIVILLALIAVGLLLYCKARSTPVTLSKDQLSGINNIAFSN

SEQ ID NO: 8506 - protein, 574 aa, Artificial Sequence
  derived and/or modified protein sequence (wt) from HRSV__BBC54552.1__F0
MELPILKTNAITTILAAVALCFASSQNITEEFYQSTCSAVSKGYLSALRTGWYTSVITIELSNIKENKCNGTDAKVKLIKQELDKYKNAVTELQLLMQSTPAANSRARRELPRFMNYTLNNTKNTNVTLSKKRKRRFLGFLLGVGSAIASGIAVSKVLHLEGEVNKIKSALLSTNKAVVSLSNGVSVLTSKVLDLKNYIDKQLLPIVNKQSCSISNIETVIEFQQKNNRLLEITREFSVNAGVTTPVSTYMLTNSELLSLINDMPITNDQKKLMSSNVQIVRQQSYSIMSIIKEEVLAYVVQLPLYGVIDTPCWKLHTSPLCTTNTKEGSNICLTRTDRGWYCDNAGSVSFFPQAETCKVQSNRVFCDTMNSLTLPSEVNLCNIDIFNPKYDCKIMTSKTDVSSSVITSLGAIVSCYGKTKCTASNKNRGIIKTFSNGCDYVSNKGVDTVSVGNTLYYVNKQEGKSLYVKGEPIINFYDPLVFPSDEFDASISQVNEKINQSLAFIRKSDELLHNVNAGKSTTNIMITTIIIVIIVILLALIAVGLLLYCKARSTPVTLSKDQLSGINNIAFSN

SEQ ID NO: 8507 - protein, 574 aa, Artificial Sequence
  derived and/or modified protein sequence (wt) from HRSV__BBC54564.1__F0
MELPILKTNAITTILAAVTLCFASSQNITEEFYQSTCSAVSKGYLSALRTGWYTSVITIELSNIKENKCNGTDAKVKLIKQELDKYKNAVTELQLLMQSTPAANSRARRELPRFMNYTLNNTKNTNVTLSKKRKRRFLGFLLGVGSAIASGIAVSKVLHLEGEVNKIKSALLSTNKAVVSLSNGVSVLTSKVLDLKNYIDKQLLPIVNKQSCSISNIETVIEFQQKNNRLLEITREFSVNAGVTTPVSTYMLTNSELLSLINDMPITNDQKKLMSSNVQIVRQQSYSIMSIIKEEVLAYVVQLPLYGVIDTPCWKLHTSPLCTTNTKEGSNICLTRTDRGWYCDNAGSVSFFPQAETCKVQSIRVFCDTMNSLTLPSEVNLCNIDIFNPKYDCKIMTSKTDVSSSVITSLGAIVSCYGKTKCTASNKNRGIIKTFSNGCDYVSNKGVDTVSVGNTLYYVNKQEGKSLYVKGEPIINFYDPLVFPSDEFDASISQVNEKINQSLAFIRKSDELLHNVNAGKSTTNIMITTIIIVIIVILLALIAVGLLLYCKARSTPVTLSKDQLSGINNIAFSN

SEQ ID NO: 8508 - protein, 574 aa, Artificial Sequence
  derived and/or modified protein sequence (wt) from HRSV__BBC54581.1__F0
MELPIFKTNAITTILAAVTLCFASSQNITEEFYQSTCSAVSKGYLSALRTGWYTSVITIELSNIKENKCNGTDAKVKLIKQELDKYKNAVTELQLLMQSTPAANSRARRELPRFMNYTLNNTKNTSVTLSKKRKRRFLGFLLGVGSAIASGIAVSKVLHLEGEVNKIKSALLSTNKAVVSLSNGVSVLTSKVLDLKNYIDKQLLPIVNKQSCSISNIETVIEFQQKNNRLLEITREFSVNAGVTTPVSTYMLTNSELLSLINDMPITNDQKKLMSSNVQIVRQQSYSIMSIIKEEVLAYVVQLPLYGVIDTPCWKLHTSPLCTTNTKEGSNICLTRTDRGWYCDNAGSVSFFPQAETCKVQSNRVFCDTMNSLTLPSEVNLCNIDIFNPKYDCKIMTSKTDVSSSVITSLGAIVSCYGKTKCTASNKNRGIIKTFSNGCDYVSNKGVDTVSVGNTLYYVNKQEGKSLYVKGEPIINFYDPLVFPSDEFDASISQVNEKINQSLAFIRKSDELLHNVNAGKSTTNIMITTIIIVIIVILLALIAVGLLLYCKARSTPVTLSKDQLSGINNIAFSN

SEQ ID NO: 8509 - protein, 574 aa, Artificial Sequence
  derived and/or modified protein sequence (wt) from HRSV__BBC54571.1__F0
MELPILKTNAITTILAAVTLCFASSQNITEEFYQSTCSAVSKGYLSALRTGWYTSVITIELSNIKENKCNGTDAKVKLIKQELDKYKNAVTELQLLMQSTPAANSRARRELPRLMNYTLKNTKNTNVTLSKKRKRRFLGFLLGVGSAIASGIAVSKVLHLEGEVNKIKSALLSTNKAVVSLSNGVSVLTSKVLDLKNYIDKQLLPIVNKQSCSISNIETVIEFQQKNNRLLEITREFSVNAGVTTPVSTYMLTNSELLSLINDMPITNDQKKLMSSNVQIVRQQSYSIMSIIKEEVLAYVVQLPLYGVIDTPCWKLHTSPLCTTNTKEGSNICLTRTDRGWYCDNAGSVSFFPQAETCKVQSNRVFCDTMNSLTLPSEVNLCNIDIFNPKYDCKIMTSKTDVSSSVITSLGAIVSCYGKTKCTASNKNRGIIKTFSNGCDYVSNKGVDTVSVGNTLYYVNKQEGKSLYVKGEPIINFYDPLVFPSDEFDASISQVNEKINQSLAFIRKSDELLHNVNAGKSTTNIMITTIIIVIIVILLALIAVGLLLYCKARSTPVTLSKDQLSGINNIAFSN

SEQ ID NO: 8510 - protein, 574 aa, Artificial Sequence
  derived and/or modified protein sequence (wt) from HRSV__BBC54553.1__F0
MELLILKTNAITTILAAVTLCFASSQNITEEFYQSTCSAVSKGYLSALRTGWYTSVITIELSNIKENKCNGTDAKVKLIKQELDKYKNAVTELQLLMQSTPAANSRARRELPRFMNYTLNNTKNTNVTLSKKRKRRFLGFLLGVGSAIASGIAVSKVLHLEGEVNKIKSALLSTNKAVVSLSNGVSVLTSKVLDLKNYIDKQLLPIVNKQSCSISNIETVIEFQQKNNRLLEITREFSVNAGVTTPVSTYMLTNSELLSLINDMPITNDQKKLMSSNVQIVRQQSYSIMSIIKEEVLAYVVQLPLYGVIDTPCWKLHTSPLCTTNTKEGSNICLTRTDRGWYCDNAGSVSFFPQAETCKVQSNRVFCDTMNSLTLPSEVNLCNIDIFNPKYDCKIMTSKTDVSSSVITSLGAIVSCYGKTKCTASNKNRGIIKTFSNGCDYVSNKGVDTVSVGNTLYYVNKQEGKSLYVKGEPIINFYDPLVFPSDEFDASISQVNEKINQSLAFIRKSDELLHNVNAGKSTTNIMITTIIIVIIIILLALIAVGLLLYCKARSTPVTLSKDQLSGINNIAFSN

SEQ ID NO: 8511 - protein, 574 aa, Artificial Sequence
  derived and/or modified protein sequence (wt) from HRSV__BBC54565.1__F0
MELPILKTNAITTILAAVTLCFASSQNITEEFYQSTCSAVSKGYLSALRTGWYTSVITIELSNIKENKCNGTDAKVKLIKQELDKYKNAVTELQMLMQSTPAANSRARRELPRFMNYTLNNTKNTNVTLSKKRKRRFLGFLLGVGSAIASGIAVSKVLHLEGEVNKIKSALLSTNKAAVSLSNGVSVLTSKVLDLKNYIDKQLLPIVNKQSCSISNIETVIEFQQKNNRLLEITREFSVNAGVTTPVSTYMLTNSELLSLINDMPITNDQKKLMSSNVQIVRQQSYSIMSIIKEEVLAYVVQLPLYGVIDTPCWKLHTSPLCTTNTKEGSNICLTRTDRGWYCDNAGSVSFFPQAETCKVQSNRVFCDTMNSLTLPSEVNLCNIDIFNPKYDCKIMTSKTDVSSSVITSLGAIVSCYGKTKCTASNKNRGIIKTFSNGCDYVSNKGVDTVSVGNTLYYVNKQEGKSLYVKGEPIINFYDPLVFPSDEFDASISQVNEKINQSLAFIRKSDELLHNVNAGKSTTNIMITTIIIVIIVILLALIAVGLLLYCKARSTPVTLSKDQLSGINNIAFSN

SEQ ID NO: 8512 - protein, 574 aa, Artificial Sequence
  derived and/or modified protein sequence (wt) from HRSV__BBC54245.1__F0
MELPILKTNAITTILAAVTLCFASSQNITEEFYQSTCSAVSKGYLSALRTGWYTSVITIELSNIKENKCNGTDAKVKLIKQELDKYKNAVTELQLLMQSTPAANSRARRELPRFMNYTLNNTKNTNVTLSKKRKRRFLGFLLGVGSAIASGIAVSKVLHLEGEVNKIKSALLSTNKAVVSLSNGVSVLTSKVLDLKNYIDKQLLPIVNKQSCSISNIETVIEFQQKNNRLLEITREFSVNAGVTTPVSTYMLTNSELLSLINDMPITNDQKKLMSSNVQIVRQQSYSIMSIIKEEVLAYVVQLQLYGVIDTPCWKLHTSPLCTTNTKEGSNICLTRTDRGWYCDNAGSVSFFPQAETCKVQSNRVFCDTMNSLTLPSEVNLCNIDIFNPKYDCKIMTSKTDVSSSVITSLGAIVSCYGKTKCTASNKNRGIIKTFSNGCDYVSNKGVDTVSVGNTLYYVNKQEGKSLYVKGEPIINFYDPLVFPSDEFDASISQVNEKINQSLAFIRKSDELLHNVNAGKSTTNIIQPTIIIVIIVILLALIAVGLLLYCKARSTPVTLSKDQLSGINNIAFSN

SEQ ID NO: 8513 - protein, 574 aa, Artificial Sequence
  derived and/or modified protein sequence (wt) from HRSV__BBC54243.1__F0
MELPILKTNAITTILAAVTLCFASGQNITEEFYQSTCSAVSKGYLSALRTGWYTSVITIELSNIKENKCNGTDAKVKLIKQELDKYKNAVTELQLLMQSTPAASSRARRELPRFMNYTLNNTKNTNVTLSKKRKRRFLGFLLGVGSAIASGIAVSKVLHLEGEVNKIKSALLSTNKAVVSLSNGVSVLTSKVLDLKNYIDKQLLPIVNKQSCSISNIETVIEFQQKNNRLLEITREFSVNAGVTTPVSTYMLTNSELLSLINDMPITNDQKKLMSSNVQIVRQQSYSIMSIIKEEVLAYVVQLPLYGVIDTPCWKLHTSPLCTTNTKEGSNICLTRTDRGWYCDNAGSVSFFPQAETCKVQSNRVFCDTMNSLTLPSEVNLCNIDIFNPKYDCKIMTSKTDVSSSVITSLGAIVSCYGKTKCTASNKNRGIIKTFSNGCDYVSNKGVDTVSVGNTLYYVNKQEGKSLYVKGEPIINFYDPLVFPSDEFDASISQVNEKINQSLAFIRKSDELLHNVNAGKSTTNIMITTIIIVIIVILLALIAVGLLLYCKARSTPVTLSKDQLSGINNIAFSN

SEQ ID NO: 8514 - protein, 574 aa, Artificial Sequence
  derived and/or modified protein sequence (wt) from HRSV__BBC54238.1__F0
MELPILKTNAITTILAAVTLCFASSQNITEEFYQSTCSAVSKGYLSALRTGWYTSVITIELSNIKENKCNGTDAKVKLIKQELDKYKNAVTELQLLMQSTPAANSRARRELPRFMNYTLNNTKNTNVTLSKKRKRRFLGFLLGVGSAIASGIAVSKVLHLEGEVNKIKSALLSTNKAVVSLSNGVSVLTSKVLDLKNYIDKQLLPIVNKQSCSISNIETVIEFQQKNNRLLEITREFSVNAGVTTPVSTYMLTNSELLSLINDMPITNDQKKLMSSNVQIVRQQSYSIMSIIKKEVLAYVVQLPLYGVIDTPCWKLHTSPLCTTNTKEGSNICLTRTDRGWYCDNAGSVSFFPQAETCKVQSNRVFCDTMNSLTLPSEVNLCNIDIFNPKYDCKIMTSKTDVSSSVITSLGAIVSCYGKTKCTASNKNRGIIKTFSNGCDYVSNKGVDTVSVGNTLYYVNKQEGKSLYVKGEPIINFYDPLVFPSDEFDASISQVNEKINQSLAFIRKSDELLHNVNAGKSTTNIMITTIIIVIIVILLALIAVGLLLYCKARSTPVTLSKDQLSGINNIAFSN

SEQ ID NO: 8515 - protein, 574 aa, Artificial Sequence
  derived and/or modified protein sequence (wt) from HRSV__BBC54242.1__F0
MELPILKTNAITTILAAVTLCFASSQNITEEFYQSTCSAVSKGYLSALRTGWYTSVITIELSNIKENKCNGTDAKVKLIKQELDKYKNAVTELQLLMQSTPAANSRARRELPRFMNYTLNNTKNTNVTLSKKRKRRFLGFLLGVGSAIASGIAVSKVLHLEGEVNKIKSALLSTNKAVVSLSNGVSVLTSKVLDLKNYIDKQLLPIVNKQSCSISNIETVIEFQQKNNRLLEITREFSVNAGVTTPVSTYMLTNSELLSLINDMPITNDQKKLMSSNVQIVRQQSYSIMSIIKEEVLAYVVQLPLYGVIDTPCWKLHTSPLCTTNTKEGSNICLTRTDRGWYCDNAGSVSFFPQAETCKVQSNRVFCDTMNSLTLPSEVNLCNIDIFNPKYDCKIMTSKTDVSSSVITSLGAIVSCYGKTKCTASNKNRGIIKTFSNGCDYVSNKGVDTVSVGNTLYYVNKQEGKSLYVKGEPIINFYDPLVFPSDEFDASISQINEKINQSLAFIRKSDELLHNVNAGKSTTNIMITTIIIVIIVILLALIAVGLLLYCKARSTPVTLSKDQLSGINNIAFSN

SEQ ID NO: 8516 - protein, 574 aa, Artificial Sequence
  derived and/or modified protein sequence (wt) from HRSV__BBC54239.1__F0
MELPILKTNAITTILAAVTLCFASSQNITEEFYQSTCSAVSKGYLSALRTGWYTSVITIELSNIKENKCNGTDAKVKLIKQELDKYKNAVTELQLLMQSTPAANSRARRELPRFMNYTLNNTKNTNVTLSKKRKRRFLGFLLGVGSAIASGIAVSKVLHLEGEVNKIKSALLSTNKAVVSLSNGVSVLTSKVLDLKNYIDKQLLPIVNKQSCSISNIETVIEYQQKNNRLLEITREFSVNAGVTTPVSTYMLTNSELLSLINDMPITNDQKKLMSSNVQIVRQQSYSIMSIIKEEVLAYVVQLPLYGVIDTPCWKLHTSPLCTTNTKEGSNICLTRTDRGWYCDNAGSVSFFPQAETCKVQSNRVFCDTMNSLTLPSEVNLCNIDIFNPKYDCKIMTSKTDVSSSVITSLGAIVSCYGKTKCTASNKNRGIIKTFSNGCDYVSNKGVDTVSVGNTLYYVNKQEGKSLYVKGEPIINFYDPLVFPSDEFDASISQVNEKINQSLAFIRKSDELLHNVNAGKSTTNIMITTIIIVIIVILLALIAVGLLLYCKARSTPVTLSKDQLSGINNIAFSN

SEQ ID NO: 8517 - protein, 574 aa, Artificial Sequence
  derived and/or modified protein sequence (wt) from HRSV__BBC54235.1__F0
MELPILKTNAITTILAAVTLCFASSQNITEEFYQSTCSAVSKGYLSALRTGWYTSVITIELSNIKENKCNGTDAKVKLIKQELDKYKNAVTELQLLMQSTPVANSRARRELPRFMNYTLNDTKNTNVTLSKKRKRRFLGFLLGVGSAIASGIAVSKVLHLEGEVNKIKSALLSTNKAVVSLSNGVSVLTSKVLDLKNYIDKQLLPIVNKQSCSISNIETVIEFQQKNNRLLEITREFSVNAGVTTPVSTYMLTNSELLSLINDMPITNDQKKLMSSNVQIVRQQSYSIMSIIKEEVLAYVVQLPLYGVIDTPCWKLHTSPLCTTNTKEGSNICLTRTDRGWYCDNAGSVSFFPQAETCKVQSNRVFCDTMNSLTLPSEVNLCNIDIFNPKYDCKIMTSKTDVSSSVITSLGAIVSCYGKTKCTASNKNRGIIKTFSNGCDYVSNKGVDTVSVGNTLYYVNKQEGKSLYVKGEPIINFYDPLVFPSDEFDASISQVNEKINQSLAFIRKSDELLHNVNAGKSTTNIMITTIIIVIIVILLALIAVGLLLYCKARSTPVTLSKDQLSGINNIAFSN

SEQ ID NO: 8518 - protein, 574 aa, Artificial Sequence
  derived and/or modified protein sequence (wt) from HRSV__BBC54234.1__F0
MELPILKTNAITTILAAVTFCFAFSQNITEEFYQSTCSAVSKGYLSALRTGWYTSVITIELSNIKENKCNGTDAKVKLIKQDLDKYKNAVTELQLLMQSTPAANNRARRELPRFMNYTLNNTKNTNVTLSKKRKRRFLGFLLGVGSAIASGIAVSKVLHLEGEVNKIKSALLSTNKAVVSLSNGVSVLTSKVLDLKNYIDKQLLPIVNKQSCSISNIETVIEFQQKNNRLLEITREFSVNAGVTTPVSTYMLTNSELLSLINDMPITNDQKKLMSSNVQIVRQQSYSIMSIIKEEVLAYVVQLPLYGVIDTPCWKLHTSPLCTTNTKEGSNICLTRTDRGWYCDNAGSVSFFPQAETCKVQSNRVFCDTMNSLTLPSEVNLCNIDIFNPKYDCKIMTSKTDVSSSVITSLGAIVSCYGKTKCTASNKNRGIIKTFSNGCDYVSNKGVDTVSVGNTLYYVNKQEGKSLYVKGEPIINFYDPLVFPSDEFDASISQVNEKINQSLAFIRKSDELLHNVNAGKSTTNIMITTIIIVIIVILLALIAVGLLLYCKARSTPVTLSKDQLSGINNIAFSN

SEQ ID NO: 8519 - protein, 574 aa, Artificial Sequence
  derived and/or modified protein sequence (wt) from HRSV__BBC54236.1__F0
MDLPILKTNAITTIFAAVTLCFASSQNITEEFYQSTCSAVSKGYLSALRTGWYTSVITIELSNIKENKCNGTDAKVKLIKQELDKYKNAVTELQLLMQSTPAANSRARRELPRFMNYTLNNTKNTNVTLSKKRKRRFLGFLLGVGSAIASGIAVSKVLHLEGEVNKIKSALLSTNKAVVSLSNGVSVLTSKVLDLKNYIDKQLLPIVNKQSCSISNIETVIEFQQKNNRLLEITREFSVNAGVTTPVSTYMLTNSELLSLINDMPITNDQKKLMSSNVQIVRQQSYSIMSIIKEEVLAYVVQLPLYGVIDTPCWKLHTSPLCTTNTKEGSNICLTRTDRGWYCDNAGSVSFFPQAETCKVQSNRVFCDTMNSLTLPSEVNLCNIDIFNPKYDCKIMTSKTDVSSSVITSLGAIVSCYGKTKCTASNKNRGIIKTFSNGCDYVSNKGVDTVSVGNTLYYVNKQEGKSLYVKGEPIINFYDPLVFPSDEFDASISQVNEKINQSLAFIRKSDELLHNVNVGKSTTNIMITTIIIVIIVILLALIAVGLLLYCKARSTPVTLSKDQLSGINNIAFSN

SEQ ID NO: 8520 - protein, 574 aa, Artificial Sequence
  derived and/or modified protein sequence (wt) from HRSV__BBC54244.1__F0
MELPILKTNAITTILAAVTLCFASSQNITEEFYQSTCSAVSKGYLSALRTGWYTSVITIELSNIKENKCNGTDAKVKLIKQELDKYKNAVTEVQLLMQSTPADNSRARKEQPRFIDYTLNNTKNTNVTLSKKRKRRFLGFLLGVGSAIASGIAVSKVMHLEGEVNKIKSALLSTNKAVVSLSNGVSVLTSKVLDLKNYIDKQLLPIVNKQSCSISNIETVIEFQQKNNRLLEITREFSVNAGVTTPVSTYMLTNSELLSLINDMPITNDQKKLMSSNVQIVRQQSYSIMSIIKEEVLAYVVQLPLYGVIDTPCWKLHTSPLCTTNTKEGSNICLTRTDRGWYCDNAGSVSFFPQAETCKVQSNRVFCDTMNSLTLPSEVNLCNIDIFNPKYDCKIMTSKTDVSSSVITSLGAIVSCYGKTKCTASNKNRGIIKTFSNGCDYVSNKGVDTVSVGNTLYYVNKQEGKSLYVKGEPIINFYDPLVFPSDEFDASISQVNEKINQSLAFIRKSDELLHNVNAGKSTTNIMITTIIIVIIVILLALIAVGLLLYCKARSTPVTLSKDQLSGINNIAFSN

SEQ ID NO: 8521 - protein, 574 aa, Artificial Sequence
  derived and/or modified protein sequence (wt) from HRSV__BBC54186.1__F0
MELPILKTNAITTILAAVTLCFASSQNITEEFYQSTCSAVSKGYLSALRTGWYTSVITIELSNIKENKCNGTDAKVKLIKQELDKYKNAVTELQLLMQSTPAANSRARRELPRFMNYTLNNTKNTNVTLSKKRKRRFLGFLLGVGSAIASGIAVSKVLHLEGEVNKIKSALLSTNKAVVSLSNGVSVLTSKVLDLKNYIDKQLLPIVNKQSCSISNIETVIEFQQKNNRLLEITREFSVNAGVTTPVSTYMLTNSELLSLINDMPITNDQKKLMSSNVQIVRQQSYSIMSIIREEVLAYVVQLPLYGVIDTPCWKLHTSPLCTTNTKEGSNICLTRTDRGWYCDNAGSVSFFPQAETCKVQSNRVFCDTMNSLTLPSEVNLCNIDIFNPKYDCKIMTSKTDVSSSVITSLGAIVSCYGKTKCTASNKNRGIIKTFSNGCDYVSNKGVDTVSVGNTLYYVNKQEGKSLYVKGEPIINFYDPLVFPSDEFDASISQVNEKINQSLAFIRKSDELLHNVNAGKSTTNIMITTIIIVIIVILLALIAVGLLLYCKARSTPVTLSKDQLSGINNIAFSN

SEQ ID NO: 8522 - protein, 574 aa, Artificial Sequence
  derived and/or modified protein sequence (wt) from HRSV__BBC54178.1__F0
MELPILKTNAITTILAAVTLCFASSQNITEEFYQSTCSAVSKGYLSALRTGWYTSVITIELSNIKENKCNGTDAKVKLIKQELDKYKNAVTELQLLMQSTPAANSRARRELPRFMNYTLNNTKDTNVTLSKKRKRRFLGFLLGVGSAIASGIAVSKVLHLEGEVNKIKSALLSTNKAVVSLSNGVSVLTSKVLDLKNYIDKQLLPIVNKQSCSISNIETVIEFQQKNNRLLEITREFSVNAGVTTPVSTYMLTNSELLSLINDMPITNDQKKLMSSNVQIVRQQSYSIMSIIKEEVLAYVVQLPLYGVIDTPCWKLHTSPLCTTNTKEGSNICLTRTDRGWYCDNAGSVSFFPQAETCKVQSNRVFCDTMNSLTLPSEVNLCNIDIFNPKYDCKIMTSKTDVSSSVITSLGAIVSCYGKTKCTASNKNRGIIKTFSNGCDYVSNKGVDTVSVGNTLYYVNKQEGKSLYVKGEPIINFYDPLVFPSDEFDASISQVNEKINQSLAFIRKSDELLHNVNAGKSTTNIMITTIIIVIIVILLALIAVGLLLYCKARSTPVTLSKDQLSGINNIAFSN

SEQ ID NO: 8523 - protein, 574 aa, Artificial Sequence
  derived and/or modified protein sequence (wt) from HRSV__BBC54202.1__F0
MELPILKTNAITTILAAVTLCFASSQNITEEFYQSTCSAVSKGYLSALRTGWYTSVITIELSNIKENKCNGTDAKVKLIKQELDKYKNAVTELQLLMQSTPAANSRARRELPRFMNYTLNNTKNTNVTLSKKRKRRFLGFLLGVGSAIASGIAVSKVLHLEGEVNKIKSALLSTNKAVVSLSNGVSVLTSKVLDLKNYIDKQLLPIVNKQSCSISNIETVIEFQQKNNRLLEITREFSVNAGVTTPVSTYMLTNSELLSLINDMPITNDQKKLMSSNVQIVRQQSYSIMSIIKEEVLAYVVQLPLYGVIDTPCWKLHTSPLCTTNTKEGSNICLTRTDRGWYCDNAGSVSFFPQAETCKVQSNRVFCDTMNSLTLPSEVNLCNIDIFNPKYDCKIMTSKTDVSSSVITSLGAIVSCYGKTKCTASNKNRGIIKTFSNGCDYVSNKGVDTVSVGNTLHYVNKQEGKSLYVKGEPIINFYDPLVFPSDEFDASISQVNEKINQSLAFIRKSDELLHNVNAGKSTTNIMITTIIIVIIVILLALIAVGLLLYCKARSTPVTLSKDQLSGINNIAFSN

SEQ ID NO: 8524 - protein, 574 aa, Artificial Sequence
  derived and/or modified protein sequence (wt) from HRSV__BBC54151.1__F0
MDLPILKTNAITTILAAVTLCFASSQNITEEFYQSTCSAVSKGYLSALRTGWYTSVITIELSNIKENKCNGTDAKVKLIKQELDKYKNAVTELQLLMQSTPASNNRARRELPRFMNYTLNNTKNTNVTLSKKRKRRFLGFLLGVGSAIASGIAVSKVLHLEGEVNKIKSALLSTNKAVVSLSNGVSVLTSKVLDLKNYIDKQLLPVVNKQSCSISNIETVIEFQQKNNRLLEITREFSVNAGVTTPVSTYMLTNSELLSLINDMPITNDQKKLMSNNVQIVRQQSYSIMSIIKEEVLAYVVQLPLYGVIDTPCWKLHTSPLCTTNTKEGSNICLTRTDRGWYCDNAGSVSFFPQAETCKVQSNRVFCDTMNSLTLPSEVNLCNIDIFNPKYDCKIMTSKTDVSSSVITSLGAIVSCYGKTKCTASNKNRGIIKTFSNGCDYVSNKGVDTVSVGNTLYYVNKQEGKSLYVKGEPIINFYDPLVFPSDEFDASISQVNEKINQSLAFIRKSDELLHNVNAGKSTTNIMITTIIIVIVVILLSLIAVGLLLYCKARSTPVTLSKDQLSGINNIAFSS

SEQ ID NO: 8525 - protein, 574 aa, Artificial Sequence
  derived and/or modified protein sequence (wt) from HRSV__BBC54142.1__F0
MELPILKTNAITTILAAITLCFASSQNITEEFFQSTCSAVSKGYLSALRTGWYTSVITIELSNIKENKCNGTDAKVKLIKQELDKYKNAVTELQLLMQSTPAANSRARRELPRFMNYTLNNTKNTNVTLSKKRKRRFLGFLLGVGSAIASGIAVSKVLHLEGEVNKIKSALLSTNKAVVSLSNGVSVLTSKVLDLKNYIDKQLLPIVNKQSCSISNIETVIEFQQKNNRLLEITREFSVNAGVTTPVSTYMLTNSELLSLINDMPITNDQKKLMSNNVQIVRQQSYSIMSIIKEEVLAYVVQLPLYGVIDTPCWKLHTSPLCTTNTKEGSNICLTRTDRGWYCDNAGSVSFFPQAETCKVQSNRVFCDTMNSLTLPSEVNLCNIDIFNPKYDCKIMTSKTDVSSSVITSLGAIVSCYGKTKCTASNKNRGIIKTFSNGCDYVSNKGVDTVSVGNTLYYVNKQEGKSLYVKGEPIINFYDPLVFPSDEFDASISQVNEKINQSLAFIRKSDELLHNVNAGKSTTNIMITTIIIVIIVILLSLIAVGLLLYCKARSTPVTLSKDQLSGINNIAFSN

SEQ ID NO: 8526 - protein, 574 aa, Artificial Sequence
  derived and/or modified protein sequence (wt) from HRSV__BBC54134.1__F0
MDLPILKTNAITTILAAVTLCFTSSQNITEEFYQSTCSAVSKGYLSALRTGWYTSVITIELSNIKENKCNGTDAKVKLIKQELDKYKNAVTELQLLMQSTPASNNRARRELPRFMNYTLNNTKNTNVTLSKKRKRRFLGFLLGVGSAIASGIAVSKVLHLEGEVNKIKSALLSTNKAVVSLSNGVSVLTSKVLDLKNYIDKQLLPIVNKQSCSISNIETVIEFQQKNNRLLEITREFSVNAGVTTPVSTYMLTNSELLSLINDMPITNDQKKLMSNNVQIVRQQSYSIMSIIKEEVLAYVVQLPLYGVIDTPCWKLHTSPLCTTNTKEGSNICLTRTDRGWYCDNAGSVSFFPQAETCKVQSNRVFCDTMNSLTLPSEVNLCNIDIFNPKYDCKIMTSKTDVSSSVITSLGAIVSCYGKTKCTASNKNRGIIKTFSNGCDYVSNKGVDTVSVGNTLYYVNKQEGKSLYVKGEPIINFYDPLVFPSDEFDASISQVNEKINQSLAFIRKSDELLHNVNAGKSTTNIMITTIIIVIVVILLSLIAVGLLLYCKARSTPVTLSKDQLSGINNIAFSS

SEQ ID NO: 8527 - protein, 574 aa, Artificial Sequence
  derived and/or modified protein sequence (wt) from HRSV__BBC54170.1__F0
MELPILKTNAITTIFAAVTLCFASSQNITEEFYQSTCSAVSKGYLSALRTGWYTSVITIELSNIKENKCNGTDAKVKLIKQELDKYKNAVTELQLLMQSTPAANSRARRELPRFMNYTLNNTKNTNVTLSKKRKRRFLGFLLGVGSAIASGIAVSKVLHLEGEVNKIKSALLSTNKAVVSLSNGVSVLTSKVLDLKNYIDKQLLPIVNKQSCSISNIETVIEFQQKNNRLLEITREFSVNAGVTTPVSTYMLTNSELLSLINDMPITNDQKKLMSSNVQIVRQQSYSIMSIIKEEVLAYVVQLPLYGVIDTPCWKLHTSPLCTTNTKEGSNICLTRTDRGWYCDNAGSVSFFPQAETCKVQSNRVFCDTMNSLTLPSEVNLCNIDIFNPKYDCKIMTSKTDVSSSVITSLGAIVSCYGKTKCTASNKNRGIIKTFSNGCDYVSNKGVDTVSVGNTLYYVNKQEGKSLYVKGEPIINFYDPLVFPSDEFDASISQVNEKINQSLAFIRKSDELLHNVNVGKSTTNIMITTIIIVIIVILLALIAVGLLLYCKARSTPVTLSKDQLSGINNIAFSN

SEQ ID NO: 8528 - protein, 574 aa, Artificial Sequence
  derived and/or modified protein sequence (wt) from HRSV__BBC54210.1__F0
MELPILKTNAITTILAAVTLCFASSQNITEEFYQSTCSAVSKGYLSALRTGWYTSVITIELSNIKENKCNGTDAKVKLIKQELDKYKNAVTELQLLMQSTPVANSRARRELPRFMNYTLNNTKNTNVTLSKKRKRRFLGFLLGVGSAIASGIAVSKVLHLEGEVNKIKSALLSTNKAVVSLSNGVSVLTSKVLDLKNYIDKQLLPIVNKQSCSISNIETVIEFQQKNNRLLEITREFSVNAGVTTPVSTYMLTNSELLSLINDMPITNDQKKLMSSNVQIVRQQSYSIMSIIKEEVLAYVVQLPLYGVIDTPCWKLHTSPLCTTNTKEGSNICLTRTDRGWYCDNAGSVSFFPQAETCKVQSNRVFCDTMNSLTLPSEVNLCNIDIFNPKYDCKIMTSKTDVSSSVITSLGAIVSCYGKTKCTASNKNRGIIKTFSNGCDYVSNKGVDTVSVGNTLYYVNKQEGKSLYVKGEPIINFYDPLVFPSDEFDASISQVNEKINQSLAFIRKSDELLHNVNAGKSTTNIMITTIIIVIIVILLALIAVGLLLYCKARSTPVTLSKDQLSGINNIAFSN

SEQ ID NO: 8529 - protein, 574 aa, Artificial Sequence
  derived and/or modified protein sequence (wt) from HRSV__BBC54169.1__F0
MELPILKTNAITTILAVVTLCFASSQNITEEFYQSTCSAVSKGYLSALRTGWYTSVITIELSNIKENKCNGTDAKVKLIKQELDKYKNAVTELQLLMQSTPAANSRARRELPRFMNYTLNNTKNTNVTLSKKRKRRFLGFLLGVGSAIASGIAVSKVLHLEGEVNKIKSALLSTNKAVVSLSNGVSVLTSKVLDLKNYIDKQLLPIVNKQSCSISNIETVIEFQQKNNRLLEITREFSVNAGVTTPVSTYMLTNSELLSLINDMPITNDQKKLMSSNVQIVRQQSYSIMSIIKEEVLAYVVQLPLYGVIDTPCWKLHTSPLCTTNTKEGSNICLTRTDRGWYCDNAGSVSFFPQAETCKVQSNRVFCDTMNSLTLPSEVNLCNIDIFNPKYDCKIMTSKTDVSSSVITSLGAIVSCYGKTKCTASNKNRGIIKTFSNGCDYVSNKGVDTVSVGNTLYYVNKQEGKSLYVKGEPIINFYDPLVFPSDEFDASISQVNEKINQSLAFIRKSDELLHNVNAGKSTTNIMITTIIIVIIVILLALIAVGLLLYCKARSTPVTLSKDQLSGINNIAFSN

SEQ ID NO: 8530 - protein, 574 aa, Artificial Sequence
  derived and/or modified protein sequence (wt) from HRSV__BBC54213.1__F0
MELPILKTNAITTILAAVTFCFAFSQNITEEFYQSTCSAVSKGYLSALRTGWYTSVITIELSNIKENKCNGTDAKVKLIKQELDKYKNAVTELQLLMQSTPAANNRARRELPRFMNYTLNNTKNTNVTLSKKRKRRFLGFLLGVGSAIASGIAVSKVLHLEGEVNKIKSALLSTNKAVVSLSNGVSVLTSKVLDLKNYIDKQLLPIVNKQSCSISNIETVIEFQQKNNRLLEITREFSVNAGVTTPVSTYMLTNSELLSLINDMPITNDQKKLMSSNVQIVRQQSYSIMSIIKEEVLAYVVQLPLYGVIDTPCWKLHTSPLCTTNTKEGSNICLTRTDRGWYCDNAGSVSFFPQAETCKVQSNRVFCDTMNSLTLPSEVNLCNIDIFNPKYDCKIMTSKTDVSSSVITSLGAIVSCYGKTKCTASNKNRGIIKTFSNGCDYVSNKGVDTVSVGNTLYYVNKQEGKSLYVKGEPIINFYDPLVFPSDEFDASISQVNEKINQSLAFIRKSDELLHNVNAGKSTTNIMITTIIIVIIVILLALIAVGLLLYCKARSTPVTLSKDQLSGINNIAFSN

SEQ ID NO: 8531 - protein, 574 aa, Artificial Sequence
  derived and/or modified protein sequence (wt) from HRSV__BBC54203.1__F0
MELPILKTNAITTILAAVTLCFASSQNITEEFYQSTCSAVSKGYLSALRTGWYTSVITIELSNIKENKCNGTDAKVKLIKQELDKYKNAVTELQLLMQSTPAANSRARRELPRFMNYTLNNTKNTNVTLSKKRKRRFLGFLLGVGSAIASGIAVSKVLHLEGEVNKIKSALLSTNKAVVSLSNGVSVLTSKVLDLKNYIDKQLLPIVNKQSCSISNIETVIEFQQKNNRLLEITREFSVNAGVTTPVSTYMLTNSELLSLINDMPITNDQKKLMSSNVQIVRQQSYSIMSIIKEEVLAYVVQLPLYGVIDTPCWKLHTSPLCTTNTKEGSNICLTRTDRGWYCDNAGSVSFFPLAETCKVQSNRVFCDTMNSLTLPSEVNLCNIDIFNPKYDCKIMTSKTDVSSSVITSLGAIVSCYGKTKCTASNKNRGIIKTFSNGCDYVSNKGVDTVSVGNTLYYVNKQEGKSLYVKGEPIINFYDPLVFPSDEFDASISQVNEKINQSLAFIRKSDELLHNVNAGKSTTNIMITTIIIVIIVILLALIAVGLLLYCKARSTPVTLSKDQLSGINNIAFSN

SEQ ID NO: 8532 - protein, 574 aa, Artificial Sequence
  derived and/or modified protein sequence (wt) from HRSV__BBC54160.1__F0
MELPILKTNAITTILAAVTLCFASSQNITEEFYQSTCSAVSKGYLSALRTGWYTSVITIELSNIKENKCNGTDAKVKLIKQELDKYKNAVTELQLLMQSTPAANSRARRELPRFMNYTLNNTKNTNVTLSKKRKRRFLGFLLGVGSAIASGIAVSKVLHLEGEVNKIKSALLSTNKAVVSLSNGVSVLTSKVLDLKNYIDKQLLPIVNKQSCSISNIETVIEFQQKNNRLLEITREFSVNAGVTTPVSTYMLTNSELLSLINDMPITNDQKKLMSSNVQIVRQQSYSIMSIIKEEVLAYVVQLPLYGVIDTPCWKLHTSPLCTTNTKEGSNICLTRTDRGWYCDNAGSVSFFPQAETCKVQSNRVFCDTMNSLTLPSEVNLCNIDIFNPKYDCKIMTSKTDVSSSVITSLGAIVSCYGKTKCTASNKNRGIIKTFSNGCDYVSNKGVDTVSVGNTLYYVNKQEGKSLYVKGEPIINFYDPLVFPSDEFDASISQVNEKINQSLAFIRKSDELLHNVNASKSTTNIMITTIIIVIIVILLALIAVGLLLYCKARSTPVTLSKDQLSGINNIAFSN

SEQ ID NO: 8533 - protein, 574 aa, Artificial Sequence
  derived and/or modified protein sequence (wt) from HRSV__BBC54163.1__F0
MELPILKTNAITTIFAAVTLCFASSQNITEEFYQSTCSAVSKGYLSALRTGWYTSVITIELSNIKENKCNGTDAKVKLIKQELDKYKNAVTELQLLMQSTPAANSRARRELPRFMNYTLNNTKNTNVTLSKKRKRRFLGFLLGVGSAIASGIAVSKVLHLEGEVNKIKSALLSTNKVVVSLSNGVSVLTSKVLDLKNYIDKQLLPIVNKQSCSISNIETVIEFQQKNNRLLEITREFSVNAGVTTPVSTYMLTNSELLSLINDMPITNDQKKLMSSNVQIVRQQSYSIMSIIKEEVLAYVVQLPLYGVIDTPCWKLHTSPLCTTNTKEGSNICLTRTDRGWYCDNAGSVSFFPQAETCKVQSNRVFCDTMNSLTLPSEVNLCNIDIFNPKYDCKIMTSKTDVSSSVITSLGAIVSCYGKTKCTASNKNRGIIKTFSNGCDYVSNKGVDTVSVGNTLYYVNKQEGKSLYVKGEPIINFYDPLVFPSDEFDASISQVNEKINQSLAFIRKSDELLHNVNVGKSTTNIMITTIIIVIIVILLALIAVGLLLYCKARSTPVTLSKDQLSGINNIAFSN

SEQ ID NO: 8534 - protein, 574 aa, Artificial Sequence
  derived and/or modified protein sequence (wt) from HRSV__BBC54215.1__F0
MELPILKTNAITTILAAVTFCFASSQNITEEFYQSTCSAVSKGYLSALRTGWYTSVITIELSNIKENKCNGTDAKVKLIKQELDKYKNAVTELQLLMQSTPAANSRARRELPRFMNYTLNNTKNTNVTLSKKRKRRFLGFLLGVGSAIASGIAVSKVLHLEGEVNKIKSALLSTNKAVVSLSNGVSVLTSKVLDLKNYIDKQLLPIVNKQSCSISNIETVIEFQQKNNRLLEITREFSVNAGVTTPVSTYMLTNSELLSLINDMPITNDQKKLMSSNVQIVRQQSYSIMSIIKEEVLAYVVQLPLYGVIDTPCWKLHTSPLCTTNTKEGSNICLTRTDRGWYCDNAGSVSFFPQAETCKVQSNRVFCDTMNSLTLPSEVNLCNIDIFNSKYDCKIMTSKTDVSSSVITSLGAIVSCYGKTKCTASNKNRGIIKTFSNGCDYVSNKGVDTVSVGNTLYYVNKQEGKSLYVKGEPIINFYDPLVFPSDEFDASISQVNEKINQSLAFIRKSDELLHNVNAGKSTTNIMITTIIIVIIVILLALIAIGLLLYCKARSTPVTLSKDQLSGINNIAFSN

SEQ ID NO: 8535 - protein, 574 aa, Artificial Sequence
  derived and/or modified protein sequence (wt) from HRSV__BBC54156.1__F0
MELPILKTNAITTILAAVTLCFASSQNITEEFYQSTCSAVSKGYLSALRTGWYTSVITIELSNIKENKCNGTDAKVKLIKQELDKYKNAVTELQLLMQSTPAANSRARRELPRFMNYTLNNTKNTNVTLSKKRKRRFLGFLLGVGSAIASGIAVSKVLHLEGEVNKIKSALLSTNKAVVSLSNGVSVLTSKVLDLKNYIDKQLLPIVNKQSCSISNIETVIEFQQKNNRLLEITREFSVNAGVTTPVSTYMLTNSELLSLINDMPVTNDQKKLMSSNVQIVRQQSYSIMSIIKEEVLAYVVQLPLYGVIDTPCWKLHTSPLCTTNTKEGSNICLTRTDRGWYCDNAGSVSFFPQAETCKVQSNRVFCDTMNSLTLPSEVNLCNIDIFNPKYDCKIMTSKTDVSSSVITSLGAIVSCYGKTKCTASNKNRGIIKTFSNGCDYVSNKGVDTVSVGNTLYYVNKQEGKSLYVKGEPIINFYDPLVFPSDEFDASISQVNEKINQSLAFIRKSDELLHNVNAGKSTTNIMITTIIIVIIVILLALIAVGLLLYCKARSTPITLSKDQLSGINNIAFSN

SEQ ID NO: 8536 - protein, 574 aa, Artificial Sequence
  derived and/or modified protein sequence (wt) from HRSV__BBC54179.1__F0
MELPILKTNAITTILAAVTLCFASSQNITEEFYQSTCSAVSKGYLSALRTGWYTSVITIELSNIKENKCNGTDAKVKLIKQELDKYKNAVTELQLLMQSTPAANSRARRELPRFMNYTLNNTKNTNVTLSKKRKRRFLGFLLGVGSAIASGIAVSKVLHLEGEVNKIKSALLSTNKAVVSLSNGVSVLTSKVLDLKNYIDKQLLPIVNKQSCSISNIETVIEFQQKNNRLLEITREFSVNAGVTTPVSTYMLTNSELLSLINDMPITNDQKKLMSSNVQIVRQQSYSIMSIIKEEVLAYVVQLPLYGVIDTPCWKLHTSPLCTTNTKEGSNICLTRTDRGWYCDNAGSVSFFPQAETCKVQLNRVFCDTMNSLTLPSEVNLCNIDIFNPKYDCKIMTSKTDVSSSVITSLGAIVSCYGKTKCTASNKNRGIIKTFSNGCDYVSNKGVDTVSVGNTLYYVNKQEGKSLYVKGEPIINFYDPLVFPSDEFDASISQVNEKINQSLAFIRKSDELLHNVNAGKSTTNIMITTIIIVIIVILLALIAVGLLLYCKGRSTPVTLSKDQLRGINNIAFSN

SEQ ID NO: 8537 - protein, 574 aa, Artificial Sequence
  derived and/or modified protein sequence (wt) from HRSV__BBC54150.1__F0
MDLPILKTNAITTIFAAVTLCFASSQNITEEFYQSTCSAVSKGYLSALRTGWYTSVITIELSNIKENKCNGTDAKVKLIKQELDKYKNAVTELQLLMQSTPASNNRARRELPRFMNYTLNNTKNTNVTLSKKRKRRFLGFLLGVGSAIASGIAVSKVLHLEGEVNKIKSALLSTNKAVVSLSNGVSVLTSKVLDLKNYIDKQLLPIVNKQSCSISNIETVIEFQQKNNRLLEITREFSVNAGVTTPVSTYMLTNSELLSLINDMPITNDQKKLMSNNVQIVRQQSYSIMSIIKEEVLAYVVQLPLYGVIDTPCWKLHTSPLCTTNTKEGSNICLTRTDRGWYCDNAGSVSFFPQAETCKVQSNRVFCDTMNSLTLPSEVNLCNIDIFNPKYDCKIMTSKTDVSSSVITSLGAIVSCYGKTKCTASNKNRGIIKTFSNGCDYVSNKGVDTVSVGNTLYYVNKQEGKSLYVKGEPIINFYDPLVFPSDEFDASISQVNEKINQSLAFIRKSDELLHNVNAGKSTTNIMITTIIIVIVVILLSLIAVGLLLYCKARSTPVTLSKDQLSGINNIAFSS

SEQ ID NO: 8538 - protein, 574 aa, Artificial Sequence
  derived and/or modified protein sequence (wt) from HRSV__BBC54207.1__F0
MELPILKTNAITTILAAVTLCFASSQNITEEFYQSTCSAVSKGYLSALRTGWYTSVITIELSNIKENKCNGTDAKVKLIKQELDKYKNAVTELQLLMQSTPAANNRARRELPRFMNYTLDNTKNTNVTLSKKRKRRFLGFLLGVGSAIASGIAVSKVLHLEGEVNKIKSALLSTNKAVVSLSNGVSVLTSKVLDLKNYIDKQLLPIVNKQSCSISNIETVIEFQQKNNRLLEITREFSVNAGVTTPVSTYMLTNSELLSLINDMPITNDQKKLMSSNVQIVRQQSYSIMSIIKEEVLAYVVQLPLYGVIDTPCWKLHTSPLCTTNTKEGSNICLTRTDRGWYCDNAGSVSFFPQAETCKVQSNRVFCDTMNSLTLPSEVNLCNIDIFNPKYDCKIMTSKTDVSSSVITSLGAIVSCYGKTKCTASNKNRGIIKTFSNGCDYVSNKGVDTVSVGNTLYYVNKQEGKSLYVKGEPIINFYDPLVFPSDEFDASISQVNEKINQSLAFIRKSDELLHNVNAGKSTTNIMITTIIIVIIVILLALIAVGLLLYCKARSTPVTLSKDQLSGINNIAFSN

SEQ ID NO: 8539 - protein, 574 aa, Artificial Sequence
  derived and/or modified protein sequence (wt) from HRSV__BBC54194.1__F0
MELPILKTNAITTILAAVTLCFASSQNITEEFYQSTCSAVSKGYLSALRTGWYTSVITIELSNIKENKCNGTDAKVKLIKQELDKYKNAVTELQLLMQSTPAANSRARRELPRFMYYTLNNTKNTNVTLSKKRKRRFLGFLLGVGSAIASGIAVSKVLHLEGEVNKIKSALLSTNKAVVSLSNGVSVLTSKVLDLKNYIDKQLLPIVNKQSCSISNIETVIEFQQKNNRLLEITREFSVNAGVTTPVSTYMLTNSELLSLINDMPITNDQKKLMSSNVQIVRQQSYSIMSIIKEEVLAYVVQLPLYGVIDTPCWKLHTSPLCTTNTKEGSNICLTRTDRGWYCDNAGSVSFFPQAETCKVQSNRVFCDTMNSLTLPSEVNLCNIDIFNPKYDCKIMTSKTDVSSSVITSLGAIVSCYGKTKCTASNKNRGIIKTFSNGCDYVSNKGVDTVSVGNTLYYVNKQEGKSLYVKGEPIINFYDPLVFPSDEFDASISQVNEKINQSLAFIRKSDELLHNVNAGKSTTNIMITTIIIVIIVILLALIAVGLLLYCKARSTPVTLSKDQLSGINNIAFSN

SEQ ID NO: 8540 - protein, 574 aa, Artificial Sequence
  derived and/or modified protein sequence (wt) from HRSV__BBC54149.1__F0
MELPILKTNAITTILAAVTLCFASSQNITEEFYQSTCSAVSKGYLSALRTGWYTSVITIELSNIKENKCNGTDAKVKLIKQELDKYKNAVTELQLLMQSTPAANSRARRELPRFMNYTLNNTKNTNVTLSKKRKRRFLGFLLGVGSAIASGIAVSKVLHLEGEVNKIKSALLSTNKAVVSLSNGVSVLTSKVLDLKNYIDKQLLPIVNKQSCSISNIETVIEFQQKNNRLLEITREFSVNAGVTTPVSTYMLTNSELLSLINDMPITNDQKKLMSSNVQIVRQQSYSIMSIIKEEVLAYVVQLPLYGVIDTPCWKLHTSPLCTTNTKEGSNICLTRTDRGWYCDNAGSVSFFPQAETCKVQSNRVFCDTMNSLTLPSEVNLCNIDIFNHKYDCKIMTSKTDVSSSVITSLGAIVSCYGKTKCTASNKNRGIIKTFSNGCDYVSNKGVDTVSVGNTLYYVNKQEGKSLYVKGEPIINFYDPLVFPSDEFDASISQVNEKINQSLAFIRKSDELLHNVNAGKSTTNIMITTIIIVIIVILLALIAVGLLLYCKARSTPVTLSKDQLSGINNIAFSN

SEQ ID NO: 8541 - protein, 574 aa, Artificial Sequence
  derived and/or modified protein sequence (wt) from HRSV__BBC54138.1__F0
MDLPILKTNAITTILAAVTLCFASSQNITEEFYQSTCSAISKGYLSALRTGWYTSVITIELSNIKENKCNGTDAKVKLIKQELDKYKNAVTELQLLMQSTPASNNRARRELPRFMNYTLNNTKNTNVTLSKKRKRRFLGFLLGVGSAIASGIAVSKVLHLEGEVNKIKSALLSTNKAVVSLSNGVSVLTSKVLDLKNYIDKQLLPIVNKQSCSISNIETVIEFQQKNNRLLEITREFSVNAGVTTPVSTYMLTNSELLSLINDMPITNDQKKLMSNNVQIVRQQSYSIMSIIKEEVLAYVVQLPLYGVIDTPCWKLHTSPLCTTNTKEGSNICLTRTDRGWYCDNAGSVSFFPQAETCKVQSNRVFCDTMNSLTLPSEVNLCNIDIFNPKYDCKIMTSKTDVSSSVITSLGAIVSCYGKTKCTASNKNRGIIKTFSNGCDYVSNKGVDTVSVGNTLYYVNKQEGKSLYVKGEPIINFYDPLVFPSDEFDASISQVNEKINQSLAFIRKSDELLHNVNAGKSTTNIMITTIIIVIVVILLSLIAVGLLLYCKARSTPVTLSKDQLSGINNIAFSS

SEQ ID NO: 8542 - protein, 574 aa, Artificial Sequence
  derived and/or modified protein sequence (wt) from HRSV__BBC54199.1__F0
MELPILKTNAITTIFAAVTLCFASSQNITEEFYQSTCSAVSKGYLSALRTGWYTSVITIELSNIKENKCNGTDAKVKLIKQELDKYKNAVTELQLLMQSTPAANSRARRELPRFMNYTLNNTKNTNVTLSKKRKRRFLGFLLGVGSATASGIAVSKVLHLEGEVNKIKSALLSTNKAVVSLSNGVSVLTSKVLDLKNYIDKQLLPIVNKQSCSISNIETVIEFQQKNNRLLEITREFSVNAGVTTPVSTYMLTNSELLSLINDMPITNDQKKLMSSNVQIVRQQSYSIMSIIKEEVLAYVVQLPLYGVIDTPCWKLHTSPLCTTNTKEGSNICLTRTDRGWYCDNAGSVSFFPQAETCKVQSNRVFCDTMNSLTLPSEVNLCNIDIFNPKYDCKIMTSKTDVSSSVITSLGAIVSCYGETKCTASNKNRGIIKTFSNGCDYVSNKGVDTVSVGNTLYYVNKQEGKSLYVKGEPIINFYDPLVFPSDEFDASISQVNEKINQSLAFIRKSDELLHNVNVGKSTTNIMITTIIIVIIVILLALIAVGLLLYCKARSTPVTLSKDQLSGINNIAFSN

SEQ ID NO: 8543 - protein, 574 aa, Artificial Sequence
  derived and/or modified protein sequence (wt) from HRSV__BBC54220.1__F0
MELPILKTNAITTIFAAVTLCFASSQNITEEFYQSTCSAVSKGYLSALRTGWYTSVITIELSNIKENKCNGTDAKVKLIKQELDKYKNAVTELQLLMQSTPAANSRARRELPRFMNYTLNNTKNTNVTLSKKRKRRFLGFLLGVGSAIASGIAVSKVLHLEGEVNKIKSALLSTNKAVVSLSNGVSVLTSKVLDLKNYIDKQLLPIVNKQSCSISNIETVIEFQQKNNRLLEITREFSVNAGVTTPVSTYMLTNSELLSLINDMPITNDQKKLMSSNVQIVRQQSYSIMSIIKEEVLAYVVQLPLYGVIDTPCWKLHTSPLCTTNTKEGSNICLTRTDRGWYCDNAGSVSFFPQAETCKVQSNRVFCDTMNSLTLPSEVNLCNIDIFNPKYDCKIMTSKTDVSSSVITSLGAIVSCYGKTKCTASNKNRGIIKTFSNGCDYVSNKGVDTVSVGNTLYYVNKQEGKSLYVKGEPIINFYDPLVFPSDEFDASISQVNEKINQSLAFIRKSDELLHNVNVGKSTTNVMITTIIIVIIVILLALIAVGLLLYCKARSTPVTLSKDQLSGINNIAFSN

SEQ ID NO: 8544 - protein, 574 aa, Artificial Sequence
  derived and/or modified protein sequence (wt) from HRSV__BBC54181.1__F0
MELPIIKTNAITTILAAVTLCFASSQNITEEFYQSTCSAVSKGYLSALRTGWYTSVITIELSNIKENKCNGTDAKVKLIKQELDKYKNAVTELQLLMQSTPAANSRARRELPRFMNYTLNNTKNTNVTLSKKRKRRFLGFLLGVGSAIASGIAVSKVLHLEGEVNKIKSALLSTNKAVVSLSNGVSVLTSKVLDLKNYIDKQLLPIVNKQSCSISNIETVIEFQQKNNRLLEITREFSVNAGVTTPVSTYMLTNSELLSLINDMPITNDQKKLMSSNVQIVRQQSYSIMSIIKEEVLAYVVQLPLYGVIDTPCWKLHTSPLCTTNTKEGSNICLTRTDRGWYCDNAGSVSFFPQAETCKVQSNRVFCDTMNSLTLPSEVNLCNIDIFNPKYDCKIMTSKTDVSSSVITSLGAIVSCYGKTKCTASNKNRGIIKTFSNGCDYVSNKGVDTVSVGNTLYYVNKQEGKSLYVKGEPIINFYDPLVFPSDEFDASISQVNEKINQSLAFIRKSDELLHNVNAGKSTTNIMITTIIIVIIVILLALIAVGLLLYCKARSTPVTLSKDQLSGINNIAFSN

SEQ ID NO: 8545 - protein, 574 aa, Artificial Sequence
  derived and/or modified protein sequence (wt) from HRSV__BBC54132.1__F0
MDLPILKTNAITTIFAAVTLCFASSQNITEEFYQSTCSAVSKGYLSALRTGWYTSVITIELSNIKENKCNGTDAKVKLIKQELDKYKNAVTELQLLMQSTPASNNRARRELPRFMNYTLNNTKNTNVTLSKKRKRRFLGFLLGVGSAIASGIAVSKVLHLEGEVNKIKSALLSTNKAVVSLSNGVSVLTSKVLDLKNYIDKQLLPIVNKQSCSISNIETVIEFQQKNNRLLEITREFSVNAGVTTPVSTYMLTNSELLSLINDMPITNDQKKLMSNNVQIVRQQSYSIMSIIKEEVLAYVVQLPLYGVIDTPCWKLHTSPLCTTNTKEGSNICLTRTDRGWYCDNAGSVSFFPQAETCKVQSNRVFCDTMNSLTLPSEVNLCNIDIFNPKYDCKIMTSKTDVSSSVITSLGAIVSCYGKIKCTASNKNRGIIKTFSNGCDYVSNKGVDTVSVGNTLYYVNKQEGKSLYVKGEPIINFYDPLVFPSDEFDASISQVNEKINQSLAFIRKSDELLHNVNAGKSTTNIMITTIIIVIVVILLSLIAVGLLLYCKARSTPVTLSKDQLSGINNIAFSS

SEQ ID NO: 8546 - protein, 574 aa, Artificial Sequence
  derived and/or modified protein sequence (wt) from HRSV__BBC54146.1__F0
MELPILKTNAITTILATVTLCFASSQNITEEFYQSTCSAVSKGYLSALRTGWYTSVITIELSNIKKNKCNGTDAKVKLIKQELDKYKNAVTELQLLMQSTPAANSRARRELPRFINYTLNNTKNTNVTLSKKRKRRFLGFLLGVGSAIASGIAVSKVLHLEGEVNKIKSALLSTNKAVVSLSNGVSVLTSKVLDLKNYIDKQLLPIVNKQSCSISNIETVIEFQQKNNRLLEITREFSVNAGVTTPVSTYMLTNSELLSLINDMPITNDQKKLMSSNVQIVRQQSYSIMSIIKEEVLAYVVQLPLYGVIDTPCWKLHTSPLCTTNTKEGSNICLTRTDRGWYCDNAGSVSFFPQAETCKVQSNRVFCDTMNSLTLPSEVNLCNIDIFNPKYDCKIMTSKTDVSSSVITSLGAIVSCYGKTKCTASNKNRGIIKTFSNGCDYVSNKGVDTVSVGNTLYYVNKQEGKSLYVKGEPIINFYDPLVFPSDEFDASISQVNEKINQSLAFIRKSDELLHNVNAGKSTTNIMITTIIIVIIVILLALIAVGLLLYCKARSTPVTLSKDQLSGINNIAFSN

SEQ ID NO: 8547 - protein, 574 aa, Artificial Sequence
  derived and/or modified protein sequence (wt) from HRSV__BBC54122.1__F0
MDLPILKTNAITTILAAVTLCFASSQNITEEFYQSTCSAVSKGYLSALRTGWYTSVITIELSNIKENKCNGTDAKVKLIKQELDKYKNAVTELQLLMQSTPASNNRARRELPRFMNYTLNNTKNTNVTLSKKRKRRFLGFLLGVGSAIASGIAVSKVLHLEGEVNKIKSALLSTNKAVVSLSNGVSVLTSKVLDLKNYIDKQLLPIVNKQSCSISNIETVIEFQQKNNRLLEITREFSVNAGVTTPVSTYMLTNSELLSLINDMPITNDQKKLMSNNVQIVRQQSYSIMSIIKEEVLAYVVQLPLYGVIDTPCWKLHTSPLCTTNTKEGSNICLTRTDRGWYCDNAGSVSFFPQAETCKVQSNRVFCDTMNSLTLPSEVNLCNIDIFNPKYDCKIMTSKTDVSSSVITSLGAIVSCYGKTKCTASNKNRGIIKTFSNGCDYVSNKGVDTVSVGNTLYYVNKQEGKSLYVKGEPIINFYDPLIFPSDEFDASISQVNEKINQSLAFIRKSDELLHNINAGKSTTNIMITTIIIVIVVILLSLIAVGLLLYCKARSTPVTLSKDQLSGINNIAFSS

SEQ ID NO: 8548 - protein, 574 aa, Artificial Sequence
  derived and/or modified protein sequence (wt) from HRSV__BBC54124.1__F0
MDLPILKTNAITTILAAVTLCFASSQNITEEFYQSTCSAVSKGYLSALRTGWYTSVITIELSNIKENKCNGTDAKVKLIKQELDKYKNAVTELQLLMQSTPASNNRARRELPRFMNYTLNNTKNTNVTLSKKRKRRFLGFLLGVGSAIASGIAVSKVLHLEGEVNKIKSALLSTNKAVVSLSNGVSVLTSKVLDLKNYIDKQLLPIVNKQSCSISNIETVIEFQQKNNRLLEITREFSVNAGVTTPVSTYMLTNSELLSLINDMPITNDQKKLMSNNVQIVRQQSYSIMSIIKEEVLAYVVQLPLYGVIDTPCWKLHTSPLCTTNTKEGSNICLTRTDRGWYCDNAGSVSFFPQAETCKVQSNRVFCDTMNSLTLPSEVNLCNIDIFNPKYDCKIMTSKTDVSSSVITSLGAIVSCYGKTKCTASNKNRGIIKTFSNGCDYVSNKGVDTVSVGNTLYYVNKQEGKSLYVKGEPIINFYDPLVFPSDEFDASISQVNEKINQSLAFIRKSDELLHNVNAGKSSTNIMITTIIIVIVVILLSLIAVGLLLYCKARSTPVTLSKDQLSGINNIAFSS

SEQ ID NO: 8549 - protein, 574 aa, Artificial Sequence
  derived and/or modified protein sequence (wt) from HRSV__BBB35202.1__F0
MDLPILKTNAITTILAAVTLCFASSQNITEEFYQSTCSAVSKGYLSALRTGWYTSVITIELSNIKENKCNGTDAKVKLIKQELDKYKNAVTELQLLMQSTPASNNRARRELPRFMNYTLNNTKNTNVTLSKKRKRRFLGFLLGVGSAIASGIAVSKVLHLEGEVNKIKSALLSTNKAVVSLSNGVSVLTSKVLDLKNYIDKQLLPIVNKQSCSISNIETVIEFQQKNNRLLEITREFSVNAGVTTPVSTYMLTNSELLSLINDMPITNDQKKLMSNNVQIVRQQSYSIMSIIKEEVLAYVVQLPLYGVIDTPCWKLHTSPLCTTNTKEGSNICLTRTDRGWYCDNAGSVSFFPQAETCKVQSNRVFCDTMNSLTLPSEVNLCNIDIFNPKYDCKIMTSKTDVSSSVITSLGAIVSCYGKTKCTASNKNRGIIKTFSNGCDYVSNKGVDTVSVGNTLYYVNKQEGKSLYVKGEPIINFYDPLVFPSDEFDASISQVNEKINQSLAFIRKSDELLHNVNAGKSTTNIMITTIIIVIVVILLSLIAVGLLLYCKARSTPVTLSKDQLSGINNIAFSS

SEQ ID NO: 8550 - protein, 574 aa, Artificial Sequence
  derived and/or modified protein sequence (wt) from HRSV__BBB35201.1__F0
MELPILKTNAITTILAAVTLCFASSQNITEEFYQSTCSAVSKGYLSALRTGWYTSVITIELSNIKENKCNGTDAKVKLIKQELDKYKNAVTELQLLMQSTPAANNRARRELPRFMNYTLNNTKNTNVTVSKKRKRRFLSFLLGVGSAIASGIAVSKVLHLEGEVNKIKSALLSTNKAVVSLSNGVSVLTSKVLDLKNYIDKQLLPIVNKQSCSISNIETVIEFQQKNNRLLEITREFSVNAGVTTPVSTYMLTNSELLSLINDMPITNDQKKLMSNNVQIVRQQSYSIMSIIKEEVLAYVVQLPLYGVIDTPCWKLHTSPLCTTNTKEGSNICLTRTDRGWYCDNAGSVSFFPQAETCKVQSNRVFCDTMNSLTLPSEVNLCNIDIFNPKYDCKIMTSKTDVSSSVITSLGAIVSCYGKTKCTASNKNRGIIKTFSNGCDYVSNKGVDTVSVGNTLYYVNKQEGKSLYVKGEPIINFYDPLVFPSDEFDASISQVNEKINQSLAFIRKSDELLHNVNAGKSTTNIMITTIIIVIIVILLSLIAVGLLLYCKARSTPVTLSKDQLSGINNIAFSN

SEQ ID NO: 8551 - protein, 574 aa, Artificial Sequence
  derived and/or modified protein sequence (wt) from HRSV__BBB35192.1__F0
MELPILKTNAITTIFAAVTLCFASSQNITEEFYQSTCSAVSKGYLSALRTGWYTSVITIELSNIKENKCNGTDAKVKLIKQELDKYKNAVTELQLLMQSTPAANNRARRELPRFMNYTLYNTKNNNVTLSKKRKRRFLGFLLGVGSAIASGIAVSKVLHLEGEVNKIKSALLSTNKAVVSLSNGVSVLTSKVLDLKNYIDKQLLPIVNKQSCSISNIETVIEFQQKNNRLLEITREFSVNAGVTTPVSTYMLTNSELLSLINDMPITNDQKKLMSNNVQIVRQQSYSIMSIIKEEVLAYVVQLPLYGVIDTPCWKLHTSPLCTTNTKEGSNICLTRTDRGWYCDNAGSVSFFPQAETCKVQSNRVFCDTMNSLTLPSEVNLCNIDIFNPKYDCKIMTSKTDVSSSVITSLGAIVSCYGKTKCTASNKNRGIIKTFSNGCDYVSNKGVDTVSVGNTLYYVNKQEGKSLYVKGEPIINFYDPLVFPSDEFDASISQVNEKINQSLAFIRKSDELLHNVNVGKSTTNIMITTIIIVIIVILLLLIAVGLFLYCKARSTPVTLSKDQLSGINNIAFSN

SEQ ID NO: 8552 - protein, 574 aa, Artificial Sequence
  derived and/or modified protein sequence (wt) from HRSV__BBB35193.1__F0
MELPILKTNAITTILAAVTLCFASSQNITEEFYQSTCSAVSKGYLSALRTGWYTSVITIELSNIKENKCNGTDAKVKLIKQELDKYKNAVTELQLLMQSTPAANSRARRELPRFRNYTLNNTKNTNVTLSKKRKRRFLGFLLGVGSAIASGIAVSKVLHLEGEVNKIKSALLSTNKAVVSLSNGVSVLTSKVLDLKNYIDKQLLPIVNKQSCSISNIETVIEFQQKNNRLLEITREFSVNAGVTTPVSTYMLTNSELLSLINDMPITNDQKKLMSNNVQIVRQQSYSIMSIIKEEVLAYVVQLPLYGVIDTPCWKLHTSPLCTTNTKEGSNICLTRTDRGWYCDNAGSVSFFPQAETCKVQSNRVFCDTMNSLTLPSEVNLCNIDIFNPKYDCKIMTSKTDVSSSVITSLGAIVSCYGKTKCTASNKNRGIIKTFSNGCDYVSNKGVDTVSVGNTLYYVNKQEGKSLYVKGEPIINFYDPLVFPSDEFDASISQVNEKINQSLAFIRKSDELLHNVNAGKSTTNIMITTIIIVIIVILLSLIAVGLLLYCKARSTPVTLSKDQLSGINNIAFSN

SEQ ID NO: 8553 - protein, 574 aa, Artificial Sequence
  derived and/or modified protein sequence (wt) from HRSV__BBB35204.1__F0
MDLPILKTNAITTILAAVTLCFASSQNITEEFYQSTCSAVSKGYLSALRTGWYTSVITIELSNIKENKCNGTDAKVKLIKQELDKYKNAVTELQLLMQSTPASNNRARRELPRFMNYTLNNTKNTNVTLSKKRKRRFLGFLLGVGSAIASGIAVSKVLHLEGEVNKIKSALLSTNKAVVSLSNGVSVLTSKVLDLKNYIDKQLLPIVNKQSCSISNIETVIEFQQKNNRLLEITREFSVNAGVTTPVSTYMLTNSELLSLINDMPITNDQKKLMSNNVQIVRQQSYSIMSIIKEEVLAYVVQLPLYGVIDTPCWKLHTSPLCTTNTKEGSNICLTRTDRGWYCDNAGSVSFFPQAETCKVQSNRVFCDTMNSLTLPSEVNLCNIDIFNPKYDCKIMTSKTDVSSSVITSLGAIVSCYGKTKCTASNKNRGIIKTFSNGCDYVSNKGVDTVSVGNTLYYVNKQEGKSLYVKGEPIINFYDPLVFPSDEFDASISQVNEKINQSLAFIRKSDELLHNVNAGKSTTNIMITTIIIVIVVILLSLIAVGLLLYCKARSTPVTLSKGQLSGINNIAFSS

SEQ ID NO: 8554 - protein, 574 aa, Artificial Sequence
  derived and/or modified protein sequence (wt) from HRSV__BBB35199.1__F0
MDLPILKTNAITTILAAVTLCFASSQNITEEFYQSTCSAVSKGYLSALRTGWYTSVITIELSNIKENKCNGTDAKVKLIKQELDKYKNAVTELQLLMQSTPASNNRARRELPRFMNYTLNNTKNTNVTLSKKRKRRFLGFLLGVGSAIASGIAVSKVLHLEGEVNKIKSALLSTNKAVVSLSNGVSVLTSKVLDLKNYIDKQLLPIVNKQSCSISNIETVIEFQQKNNRLLEITREFSVNAGVTTPVSTYMLTNSELLSLINDMPITNDQKKLMSNNVQIVRQQSYSIMSIIKEEVLAYVVQLPLYGVIDTPCWKLHTSPLCTTNTKEGSNICLTRTDRGWYCDNAGSLSFFPQAETCKVQSNRVFCDTMNSLTLPSEVNLCNIDIFNPKYDCKIMTSKTDVSSSVITSLGAIVSCYGKTKCTASNKNRGIIKTFSNGCDYVSNKGVDTVSVGNTLYYVNKQEGKSLYVKGEPIINFYDPLVFPSDEFDASISQVNEKINQSLAFIRKSDELLHNVNAGKSTTNIMITTIIIVIVVILLSLIAVGLLLYCKARSTPVTLSKDQLSGINNIAFSS

SEQ ID NO: 8555 - protein, 574 aa, Artificial Sequence
  derived and/or modified protein sequence (wt) from HRSV__BBB35184.1__F0
MELPILKTNAITTILAAVTLCFASSQNITEEFYQSTCSAVSKGYLSALRTGWYTSVITIELSNIKENKCNGTDAKVKLIKQELDKYKNAVTELQLLMQSTPAANNRARRELPRFMNYTLNNTKNTNVTVSKKRKRRFLGFLLGVGSAIASGIAVSKVLHLEGEVNKIKSALLSTNKAVVSLSNGVSVLTSKVLDLKNYIDKQLLPIVNKQSCSISNIETVIEFQQKNNRLLEITREFSVNAGVTTPVSTYMLTNSELLSLINDMPITNDQKKLMSNNVQIVRQQSYSIMSIIKEEVLAYVVQLPLYGVIDTPCWKLHTSPLCTTNTKEGSNICLTRTDRGWYCDNAGSVSFFPQAETCKVQSNRVFCDTMNSLTLPSEVNLCNIDIFNSKYDCKIMTSKTDVSSSVITSLGAIVSCYGKTKCTASNKNRGIIKTFSNGCDYVSNKGVDTVSVGNTLYYVNKQEGKSLYVKGEPIINFYDPLVFPSDEFDASISQVNEKINQSLAFIRKSDELLHNVNAGKSTTNIMITTIIIVIIVILLSLIAVGLLLYCKARSTPVTLSKDQLSGINNIAFSN

SEQ ID NO: 8556 - protein, 574 aa, Artificial Sequence
  derived and/or modified protein sequence (wt) from HRSV__BBB35126.1__F0
MELPILKTNAITTILAAVTLCFASSQNITEEFYQSTCSAVSKGYLSALRTGWYTSVITIELSNIKENKCNGTDAKVKLIKQELDKYKNAVTELQLLMQSTPAANNRARRELPRFMNYTLNNTKNTNVTVSKKRKRRFLGFLLGVGSAIASGIAVSKVLHLEGEVNKIKSALLSTNKAVVSLSNGVSVLTSKVLDLKNYIDKQLLPIVNKQSCSISNIETVIEFQQKNNRLLEITREFSVNAGVTTPVSTYMLTNSELLSLINDMPITNDQKKLMSNNVQIVRQQSYSIMSIIKEEVLAYVVQLPLYGVIDTPCWKLHTSPLCTTNTKEGSNICLTRTDRGWYCDNAGSVSFFPQAETCKVQLNRVFCDTMNSLTLPSEVNLCNIDIFNPKYDCKIMTSKTDVSSSVITSLGAIVSCYGKTKCTASNKNRGIIKTFSNGCDYVSNKGVDTVSVGNTLYYVNKQEGKSLYVKGEPIINFYDPLVFPSDEFDASISQVNEKINQSLAFIRKSDELLHNVNAGKSTTNIMITTIIIVIIVILLSLIAVGLLLYCKARSTPVTLSKDQLSGINNIAFSN

SEQ ID NO: 8557 - protein, 574 aa, Artificial Sequence
  derived and/or modified protein sequence (wt) from HRSV__BBB35133.1__F0
MELPILKTNAITTILAAVTLCFASSQNITEEFYQSTCSAVSKGYLSALRTGWYTSVITIELSNIKENKCNGTDAKVKLIKQELDKYKNAVTELQLLMQSTPAANNRARRELPRFMNYTLNNTKNNNVTLSKKRKRRFLGFLLGVGSAIASGIAVSKVLHLEGEVNKIKSALLSTNKAVVSLSNGVSVLTSKVLDLKNYIDKQLLPIVNKQSCSISNIETVIEFQQKNNRLLEITREFSVNAGVTTPVSTYMLTNSELLSLINDMPITNDQKKLMSNNVQIVRQQSYSIMSIIKEEVLAYVVQLPLYGVIDTPCWKLHTSPLCTTNTKEGSNICLTRTDRGWYCDNAGSVSFFPQSETCKVQSNRVFCDTMNSLTLPSEVNLCNIDIFNPKYDCKIMTSKTDVSSSVITSLGAIVSCYGKTKCTASNKNRGIIKTFSNGCDYVSNKGVDTVSVGNTLYYVNKQEGKSLYVKGEPIINFYDPLVFPSDEFDASISQVNEKINQSLAFIRKSDELLHNVNVGKSTTNIMITTIIIVIIVILLLLIAVGLFLYCKARSTPVTLSKDQLSGINNIAFSN

SEQ ID NO: 8558 - protein, 574 aa, Artificial Sequence
  derived and/or modified protein sequence (wt) from HRSV__BBB35130.1__F0
MDLPILKTNAITTILAAVTLCFASSQNITEEFYQSTCSAVSKGYLSALRTGWYTSVITIELSNIKENKCNGTDAKVKLIKQELDKYKNAVTELQLLMQSTPAANNRARRELPRFMNYTLNNTKNNNVTLSKKRKRRFLGFLLGVGSAIASGIAVSKVLHLEGEVNKIKSALLSTNKAVVSLSNGVSVLTSKVLDLKNYIDKQLLPIVNKQSCSISNIETVIEFQQKNNRLLEITREFSVNAGVTTPVSTYMLTNSELLSLINDMPITNDQKKLMSNNVQIVRQQSYSIMSIIKEEVLAYVVQLPLYGVIDTPCWKLHTSPLCTTNTKEGSNICLTRTDRGWYCDNAGSVSFFPQAETCKVQSNRVFCDTMNSLTLPSEVNLCNIDIFNPKYDCKIMTSKTDVSSSVITSLGAIVSCYGKTKCTASNKNRGIIKTFSNGCDYVSNKGVDTVSVGNTLYYVNKQEGKSLYVKGEPIINFYDPLVFPSDEFDASISQVNEKINQSLAFIRKSDELLHNVNVGKSTTNIMITTIIIVIIVILLLLIAVGLFLYCKARSTPVTLSKDQLSGINNIAFSN

SEQ ID NO: 8559 - protein, 574 aa, Artificial Sequence
  derived and/or modified protein sequence (wt) from HRSV__BBB35160.1__F0
MELPILKANAITTILAAVTLCFASSQNITEEFYQSTCSAVSKGYLSALRTGWYTSVITIELSNIKENKCNGTDAKVKLIKQELDKYKNAVTELQLLMQSTPAANNRARRELPRFTNYTLNNTKNTNVTLSKKRKRRFLGFLLGVGSAIASGIAVSKVLHLEGEVNKIKSALLSTNKAVVSLSNGVSVLTSKVLDLKNYIDKQLLPIVNKQSCSISNIETVIEFQQKNNRLLEITREFSVNAGVTTPVSTYMLTNSELLSLINDMPITNDQKKLMSNNVQIVRQQSYSIMSIIKEEVLAYVVQLPLYGVIDTPCWKLHTSPLCTTNTKEGSNICLTRTDRGWYCDNAGSVSFFPQAETCKVQSNRVFCDTMNSLTLPSEVNLCNVDIFNPKYDCKIMTSKTDVSSSVITSLGAIVSCYGKTKCTASNKNRGIIKTFSNGCDYVSNKGVDTVSVGNTLYYVNKQEGKNLYVKGEPIINFYDPLVFPSDEFDASISQVNEKINQSLAFIRKSDELLHNVNAGKSTTNIMITTIIIVIIVILLSLIVVGLLLYCKARSTPVTLSKDQLSGINNIAFSS

SEQ ID NO: 8560 - protein, 574 aa, Artificial Sequence
  derived and/or modified protein sequence (wt) from HRSV__BBB35162.1__F0
MDLPILKTNAITAILAAVSLCFASSQNITEEFYQSTCSAVSKGYLSALRTGWYTSVITIELSNIKENKCNGTDAKVKLIKQELDKYKNAVTELQLLMQSTPAANNRARRELPRFMNYTLNNTKNNNVTLSKKRKRRFLGFLLGVGSAIASGIAVSKVLHLEGEVNKIKSALLTTNKAVVSLSNGVSVLTSKVLDLKNYIDKQLLPIVNKQSCSISNIETVIEFQQKNNRLLEITREFSVNAGVTTPVSTYMLTNSELLSLINDMPITNDQKKLMSNNVQIVRQQSYSIMSIIKEEVLAYVVQLPLYGVIDTPCWKLHTSPLCTTNTKEGSNICLTRTDRGWYCDNAGSVSFFPQAETCKVQSNRVFCDTMNSLTLPSEVNLCNIDIFNPKYDCKIMTSKTDVSSSVITSLGAIVSCYGKTKCTASNKNRGIIKTFSNGCDYVSNKGVDTVSVGNTLYYVNKQEGKSLYVKGEPIINFYDPLVFPSDEFDASISQVNEKINQSLTFIRKSDELLHNVNVGKSTTNIMITTIIIVIIVILLLLIAVGLFLYCKARSTPVTLSKDQLSGINNIAFSN

SEQ ID NO: 8561 - protein, 574 aa, Artificial Sequence
  derived and/or modified protein sequence (wt) from HRSV__BBB35181.1__F0
MELPILKTNAITTILAAVTLCFASSQNITEEFYQSTCSAVSKGYLSALRTGWYTSVITIELSNIKENKCNGTDAKVKLIKQELDKYKNAVTELQLLMQSTPAANSRARRELPRFMNYTLNNTKNTNVTLSKKRKRRFLGFLLGVGSAIASGIAVSKVLHLEGEVNKIKSALLSTNKAVVSLSNGVSVLTSKVLDLKNYIDKQLLPIVNKQSCSISNIETVIEFQQKNTRLLEITREFSVNAGVTTPVSTYMLTNSELLSLINDMPITNDQKKLMSNNVQIVRQQSYSIMSIIKEEVLAYVVQLPLYGVIDTPCWKLHTSPLCTTNTKEGSNICLTRTDRGWYCDNAGSVSFFPQAETCKVQSNRVFCDTMNSLTLPSEVNLCNIDIFNPKYDCKIMTSKTDVSSSVITSLGAIVSCYGKTKCTASNKNRGIIKTFSNGCDYVSNKGVDTVSVGNTLYYVNKQEGKSLYVKGEPIINFYDPLVFPSDEFDASISQVNEKINQSLAFIRKSDELLHNVNAGKSITNIMITTIIIVIIVILLSLIAVGLLLYCKARSTPVTLSKDQLSGINNIAFSN

SEQ ID NO: 8562 - protein, 574 aa, Artificial Sequence
  derived and/or modified protein sequence (wt) from HRSV__BBB35165.1__F0
MDLPILKTNAITAIFAAVSLCFASSQNITEEFYQSTCSAVSKGYLSALRTGWYTSVITIELSNIKENKCNGTDAKVKLIKQELDKYKNAVTELQLLMQSTPAANNRARRELPRFMNYTLNNTKNNNVTLSKKRKRRFLGFLLGVGSAIASGIAVSKVLHLEGEVNKIKSALLSTNKAVVSLSNGVSVLTSKVLDLKNYIDKQLLPIVNKQSCSISNIETVIEFQQKNNRLLEITREFSVNAGVTTPVSTYMLTNSELLSLINDMPITNDQKKLMSNNVQIVRQQSYSIMSIIKEEVLAYVVQLPLYGVIDTPCWKLHTSPLCTTNTKEGSNICLTRTDRGWYCDNAGSVSFFPQAETCKVQSNRVFCDTMNSLTLPSEVNLCNIDIFNPKYDCKIMTSKTDVSSSVITSLGAIVSCYGKTKCTASNKNRGIIKTFSNGCDYVSNKGVDTVSVGNTLYYVNKQEGKSLYVKGEPIINFYDPLVFPSDEFDASISQVNEKINQSLAFIRKSDELLHNVNVGKSTTNIMITTIIIVIIVILLLLIAVGLFLYCKARSTPVTLSKDQLSGINNIAFSN

SEQ ID NO: 8563 - protein, 574 aa, Artificial Sequence
  derived and/or modified protein sequence (wt) from HRSV__BBB35121.1__F0
MELPILKTNAITTILAAVTLCFVSSQNITEEFYQSTCSAVSKGYLSALRTGWYTSVITIELSNIKENKCNGTDAKVKLIKQELDKYKNAVTELQLLMQSTPAANNRARRELPRFMNYTLNNTKNTNVTVSKKRKRRFLGFLLGVGSAIASGIAVSKVLHLEGEVNKIKSALLSTNKAVVSLSNGVSVLTSKVLDLKNYIDKQLLPIVNKQSCSISNIETVIEFQQKNNRLLEITREFSVNAGVTTPVSTYMLTNSELLSLINDMPITNDQKKLMSNNVQIVRQQSYSIMSIIKEEVLAYVVQLPLYGVIDTPCWKLHTSPLCTTNTKEGSNICLTRTDRGWYCDNAGSVSFFPQAETCKVQSNRVFCDTMNSLTLPSEVNLCNIDIFNPKYDCKIMTSKTDVSSSVITSLGAIVSCYGKTKCTASNKNRGIIKTFSNGCDYVSNKGVDTVSVGNTLYYVNKQEGKSLYVKGEPIINFYDPLVFPSDEFDASISQVNEKINQSLAFIRKSDELLHNVNAGKSTTNIMITTIIIVIIVILLSLIAVGLLLYCKARSTPVTLSKDQLSGINNIAFSN

SEQ ID NO: 8564 - protein, 574 aa, Artificial Sequence
  derived and/or modified protein sequence (wt) from HRSV__BBB35173.1__F0
MDLPILKTNAITTILAAVSLCFASSQNITEEFYQSTCSAVSKGYLSALRTGWYTSVITIELSNIKENKCNGTDAKVKLIKQELDKYKNAVTELQLLMQSTPAANNRARRELPRFMNYTLNNTKNNNVTLSKKRKRRFLGFLLGVGSAIASGIAVSKVLHLEGEVNKIKSALLSTNKAVVSLSNGVSVLTSKVLDLKNYIDKQLLPIVNKQSCSISNIETVIEFQQKNNRLLEITREFSVNAGVTTPVSTYMLTNSELLSLINDMPITNDQKKLMSNNVQIVRQQSYSIMSIIKEEVLAYVVQLPLYGVIDTPCWKLHTSPLCTTNTKEGSNICLTRTDRGWYCDNAGSVSFFPQAETCKVQSNRVFCDTMNSLTLPSEVNLCNIDIFNPKYDCKIMTSKTDVSSSVITSLGAIVSCYGKTKCTASNKNRGIIKTFSNGCDYVSNKGVDTVSVGNTLYYVNKQEGKSLYVKGEPIINFYDPLVFPSDEFDASISQVNEKINQSLAFIRKSDELLHNVNVGKSTTNIMITTIIIVIIVILLLLIAVGLFLYCKARSTPVKLSKDQLSGINNIAFSN

SEQ ID NO: 8565 - protein, 574 aa, Artificial Sequence
  derived and/or modified protein sequence (wt) from HRSV__BBB35138.1__F0
MELPILKTNAITTILAAVTLCFTSSQNITEEFYQSTCSAVSKGYLSALRTGWYTSVITIELSNIKENKCNGTDAKVKLIKQELDKYKNAVTELQLLMQSTPAANNRARRELPRFMNYTLNNTKNTNVTVSKKRKRRFLGFLLGVGSAIASGIAVSKVLHLEGEVNKIKSALLSTNKAVVSLSNGVSVLTSKVLDLKNYIDKQLLPIVNKQSCSISNIETVIEFQQKNNRLLEITREFSVNAGVTTPVSTYMLTNSELLSLINDMPITNDQKKLMSNNVQIVRQQSYSIMSIIKEEVLAYVVQLPLYGVIDTPCWKLHTSPLCTTNTKEGSNICLTRTDRGWYCDNAGSVSFFPQAETCKVQSNRVFCDTMNSLTLPSEVNLCNIDIFNPKYDCKIMTSKTDVSSSVITSLGAIVSCYGKTKCTASNKNRGIIKTFSNGCDYVSNKGVDTVSVGNTLYYVNKQEGKSLYVKGEPIINFYDPLVFPSDEFDASISQVNEKINQSLAFIRKSDELLHNVNAGKSTTNIMITTIIIVIIVILLSLIAVGLLLYCKARSTPVTLSKDQLSGINNIAFSN

SEQ ID NO: 8566 - protein, 574 aa, Artificial Sequence
  derived and/or modified protein sequence (wt) from HRSV__BBB35176.1__F0
MDLPILKTNAITAILAAVSLCFASSQNITEEFYQSTCSAVSKGYLSALRTGWYTSVITIELSNIKENKCNGTDTKVKLIKQELDKYKNAVTELQLLMQSTPAANNRARRELPRFMNHTLNNTKDNNVTLSKKRKRRFLGFLLGVGSAIASGIAVSKVLHLEGEVNKIKSALLSTNKAVVSLSNGVSVLTSKVLDLKNYIDKQLLPIVNKQSCSISNIETVIEFQQKNNRLLEITREFSVNAGVTTPVSTYMLTNSELLSLINDMPITNDQKKLMSNNVQIVRQQSYSIMSIIKEEVLAYVVQLPLYGVIDTPCWKLHTSPLCTTNTKEGSNICLTRTDRGWYCDNAGSVSFFPQAETCKVQSNRVFCDTMNSLTLPSEVNLCNIDIFNPKYDCKIMTSKTDVSSSVITSLGAIVSCYGKTKCTASNKNRGIIKTFSNGCDYVSNKGVDTVSVGNTLYYVNKQEGKSLYVKGEPIINFYDPLVFPSDEFDASISQVNEKINQSLAFIRKSDELLHNVNVGKSTTNIMITTIIIVIIVILLLLIAVGLFLYCKARSTPVTLSKDQLSGINNIAFSN

SEQ ID NO: 8567 - protein, 574 aa, Artificial Sequence
  derived and/or modified protein sequence (wt) from HRSV__BBB35142.1__F0
MELPILKTNAITTILAAVTLCFASSQNITEEFYQSTCSAVSKGYLSALRTGWYTSVITIELSNIKENKCNGTDAKVKLIKQELDKYKNAVTELQLLMQSTPAANNRARRELPRFMNYTLNNAKNTNVTVSKKRKRRFLGFLLGVGSAIASGIAVSKVLHLEGEVNKIKNALLSTNKAVVSLSNGVSVLTSKVLDLKNYIDKQLLPIVNKQSCSISNIETVIEFQQKNNRLLEITREFSVNAGVTTPVSTYMLTNSELLSLINDMPITNDQKKLMSNNVQIVRQQSYSIMSIIKEEVLAYVVQLPLYGVIDTPCWKLHTSPLCTTNTKEGSNICLTRTDRGWYCDNAGSVSFFPQAETCKVQSNRVFCDTMNSLTLPSEVNLCNIDIFNPKYDCKIMTSKTDVSSSVITSLGAIVSCYGKTKCTASNKNRGIIKTFSNGCDYVSNKGVDTVSVGNTLYYVNKQEGKSLYVKGEPIINFYDPLVFPSDEFDASISQVNEKINQSLAFIRKSDELLHNVNAGKSTTNIMITTIIIVIIVILLSLIAVGLLLYCKARSTPVTLSKDQLSGINNIAFSN

SEQ ID NO: 8568 - protein, 574 aa, Artificial Sequence
  derived and/or modified protein sequence (wt) from HRSV__BBB35136.1__F0
MELPILKTNAITTILAAVTLCFASSQNITEEFYQSTCSAVSKGYLSALRTGWYTSVITIELSNIKENKCNGTDAKVKLIKQELDKYKNAVTELQLLMQSTPAANNRARRELPRFMNYTLNNTKNTNVTVSKKRKRRFLGFLLGVGSAIASGIAVSKVLHLEGEVNKIKNALLSTNKAVVSLSNGVSVLTSKVLDLKNYIDKQLLPIVNKQSCSISNIETVIEFQQKNNRLLEITREFSVNAGVTTPVSTYMLTNSELLSLINDMPITNDQKKLMSNNVQIVRQQSYSIMSIIKEEVLAYVVQLPLYGVIDTPCWKLHTSPLCTTNTKEGSNICLTRTDRGWYCDNAGSVSFFPQAETCKVQSNRVFCDTMNSLTLPSEVNLCNIDIFNPKYDCKIMTSKTDVSSSVITSLGAIVSCYGKTKCTASNKNRGIIKTFSNGCDYVSNKGVDTVSVGNTLYYVNKQEGKSLYVKGEPIINFYDPLVFPSDEFDASISQVNEKINQSLAFIRKSDELLHNVNAGKSTTNIMITTIIIVIIVILLSLIAVGLLLYCKARSTPVTLSKDQLSGINNIAFSN

SEQ ID NO: 8569 - protein, 574 aa, Artificial Sequence
  derived and/or modified protein sequence (wt) from HRSV__BBB35153.1__F0
MDLPILKTNAITAILAAVSLCFASSQNITEEFYQSTCSAVSKGYLSALRTGWYTSVITIELSNIKENKCNGTDAKVKLIKQELDKYKNAVTELQLLMQSTPAANNRARRELPRFMNYTLNNTKNNNVTLSKKRKRRFLGFLLGVGSAIASGIAVSKVLHLEGEVNKIKSALLSTNKAVVSLSNGVSVLTSKVLDLKNYIDKQLLPIVNKQSCSISNIETVIEFQQKNNRLLEITREFSVNAGVTTPVSTYMLTNSELLSLINDMPITNDQKKLMSNNVQIVRQQSYSIMSIIKEEVLAYVVQLPLYGVIDTPCWKLHTSPLCTTNTKEGSNICLTRTDRGWYCDNAGSVSFFPQAETCKVQSNRVFCDTMNSLTLPSEVNLCNIDIFNPKYDCKIMTSKTDVSSSVITSLGAIVSCYGKTKCTASNKNRGITKTFSNGCDYVSNKGVDTVSVGNTLYYVNKQEGKSLYVKGEPIINFYDPLVFPSDEFDASISQVNEKINQSLAFIRKSDELLHNVNVGKSTTNIMITTIIIVIIVILLLLIAVGLFLYCKARSTPVTLSKDQLSGINNIAFSN

SEQ ID NO: 8570 - protein, 574 aa, Artificial Sequence
  derived and/or modified protein sequence (wt) from HRSV__BBB35115.1__F0
MELPILKANAITTILAAVTLCFASSQNITEEFYQSTCSAVSKGYLSALRTGWYTSVITIELSNIKENKCNGTDAKVKLIKQELDKYKNAVTELQLLMQSTPAANNRARRELPRFMNYTLNNTKNTNVTLSKKRKRRFLGFLLGVGSAIASGIAVSKVLHLEGEVNKIKSALLSTNKAVVSLSNGVSVLTSKVLDLKNYIDKQLLPIVNKQSCSISNIETVIEFQQKNNRLLEITREFSVNAGVTTPVSTYMLTNSELLSLINDMPITNDQKKLMSNNVQIVRQQSYSIMSIIKEEVLAYVVQLPLYGVIDTPCWKLHTSPLCTTNTKEGSNICLTRTDRGWYCDNAGSVSFFPQAETCKVQSNRVFCDTMNSLTLPSEVNLCNVDIFNPKYDCKIMTSKTDVSSSVITSLGAIVSCYGKTKCTASNKNRGIIKTFSNGCDYVSNKGVDTVSVGNTLYYVNKQEGKNLYVKGEPIINFYDPLVFPSDEFDASISQVNEKINQSLAFIRKSDELLHNVNAGKSTTNIMITTIIIVIIVILLSLIAVGLLLYCKARSTPVTLSKDQLSGINNIAFSS

SEQ ID NO: 8571 - protein, 574 aa, Artificial Sequence
  derived and/or modified protein sequence (wt) from HRSV__BBB35150.1__F0
MDLPILKTNAITTILATVSLCFASSQNITEEFYQSTCSAVSKGYLSALRTGWYTSVITIELSNIKENKCNGTDAKVKLIKQELDKYKNAVTELQLLMQSTPAANNRARRELPRFMNYTLNNTKNNNVTLSKKRKRRFLGFLLGVGSAIASGIAVSKVLHLEGEVNKIKSALLSTNKAVVSLSNGVSVLTSKVLDLKNYIDKQLLPIVNKQSCSISNIETVIEFQQKNNRLLEITREFSVNAGVTTPVSTYMLTNSELLSLINDMPITNDQKKLMSNNVQIVRQQSYSIMSIIKEEVLAYVVQLPLYGVIDTPCWKLHTSPLCTTNTKEGSNICLTRTDRGWYCDNAGSVSFFPQAETCKVQSNRVFCDTMNSLTLPSEVNLCNIDIFNPKYDCKIMTSKTDVSSSVITSLGAIVSCYGKTKCTASNKNRGIIKTFSNGCDYVSNKGVDTVSVGNTLYYVNKQEGKSLYVKGEPIINFYDPLVFPSDEFDASISQVNEKINQSLAFIRKSDELLHNVNVGKSTTNIMITTIIIVIIVILLLLIAVGLFLYCKARSTPVTLSKDQLSGINNIAFSN

SEQ ID NO: 8572 - protein, 574 aa, Artificial Sequence
  derived and/or modified protein sequence (wt) from HRSV__BBB35097.1__F0
MDLPILKTNAITTILAAVTLCFASSQNITEEFYQSTCSAVSKGYLSALRTGWYTSVITIELSNIKENKCNGTDAKVKLIKQELDKYKNAVTELQLLMQSTPAANNRARRELPRFMNYTLNNTKNTNVTLSKKRKRRFLGFLLGVGSAIASGIAVSKVLHLEGEVNKIKSALLSTNKAVVSLSNGVSVLTSKVLDLKNYIDKQLLPIVNKQSCSISNIETVIEFQQKNNRLLEITREFSVNAGVTTPVSTYMLTNSELLSLINDMPITNDQKKLMSNNVQIVRQQSYSIMSIIKEEVLAYVVQLPLYGVIDTPCWKLHTSPLCTTNTKEGSNICLTRTDRGWYCDNAGSVSFFPQAETCKVQSNRVFCDTMNSLTLPSEVNLCNIDIFNPKYDCKIMTSKTDVSSSVITSLGAIVSCYGKTKCTASNKNRGIIKTFSNGCDYVSNKGVDTVSVGNTLYYVNKQEGKSLYVKGEPIINFYDPLVFPSDEFDASISQVNEKINQSLAFIRKSDELLHNVNAGKSTTNIMITTIIIVIIVILLSLIAVGLLLYCKARSTPVTLSKDQLSGINNIAFSS

SEQ ID NO: 8573 - protein, 574 aa, Artificial Sequence
  derived and/or modified protein sequence (wt) from HRSV__BBB35109.1__F0
MELPILKTNAITTILAAVTLCFASSQNITEEFYQSTCSAVSKGYLSALRTGWYTSVITIELSNIKENKCNGTDAKVKLIKQELDKYKNAVTELQLLMQSTPAANNRARRELPRFMNYTLNNTKNTNVTLSKKRKRRFLGFLLGVGSAIASGIAVSKVLHLEGEVNKIKSALLSTNKAVVSLSNGVSVLTSKVLDLKNYIDKQLLPIVNKQSCSISNIETVIEFQQKNNRLLEITREFSVNAGVTTPVSTYMLTNSELLSLINDMPITNDQKKLMSNNVQIVRQQSYSIMSIIKEEVLAYVVQLPLYGVIDTPCWKLHTSPLCTTNTKEGSNICLTRTDRGWYCDNAGSVSFFPQAETCKVQSNRVFCDTMNSLTLPSEVNLCNIDIFNPKYDCKIMTSKTDVSSSVITSLGAIVSCYGKTKCTASNKNRGIIKTFSNGCDYVSNKGVDTVSVGNTLYYVNKQEGKSLYVKGEPIINFYDPLVFPSDEFDASISQVNEKINQSLAFIRKSDELLHNVNAGKSTTNIMITTIIIVIIVILLSLIAVGMLLYCKARSTPVTLSKDQLSGINNIAFSS

SEQ ID NO: 8574 - protein, 574 aa, Artificial Sequence
  derived and/or modified protein sequence (wt) from HRSV__BBB35094.1__F0
MELPILKTNAITTILAAVTLCFASSQNITEEFYQSTCSAVSKGYLSALRTGWYTSVITIELSNIKENKCNGTDAKVKLIKQELDKYKNAVTELQLLMQSTPAANNRARRELPRFMNYTLNNTKNTNVTLSKKRKRRFLGFLLGVGSAIASGIAVSKVLHLEGEVNKIKSALLSTNKAVVSLSNGVSVLTSKVLDLKNYIDKQLLPIVNKQSCSISNIETVIEFQQKNNRLLEITREFSVNAGVTTPVSTYMLTNSELLSLINDMPITNDQKKLMSNNVQIVRQQSYSIMSIIKEEVLAYVVQLPLYGVIDTPCWKLHTSPLCTTNTKEGSNICLTRTDRGWYCDNAGSVSFFPQAETCKVQLNRVFCDTMNSLTLPSEVNLCNIDIFNPKYDCKIMTSKTDVSSSVITSLGAIVSCYGKTKCTASNKNRGIIKTFSNGCDYVSNKGVDTVSVGNTLYYVNKQEGKSLYVKGEPIINFYDPLVFPSDEFDASISQVNEKINQSLAFIRKSDELLHNVNAGKSTTNIMITTIIIVIIVILLSLIAVGLLLYCKARSTPVTLSKDQLSGINNIAFSN

SEQ ID NO: 8575 - protein, 574 aa, Artificial Sequence
  derived and/or modified protein sequence (wt) from HRSV__BBB35183.1__F0
MELPILKTNAITTILAAVTLCFASSQNITEEFYQSTCSAVSKGYLSALRTGWYTSVITIELSNIKENKCNGTDAKVKLIKQELDKYKNAVTELQLLMQSTPAANSRARRELPRFMNYTLNNTKNTNVTLSKKRKRRFLGFLLGVGSAIASGIAVSKVLHLEGEVNKIKSALLSTNKAVVSLSNGVSVLTSKVLDLKNYIDKQLLPIVNKQSCSISNIETVIEFQQKNTRLLEITREFSVNAGVTTPVSTYMLTNSELLSLINDMPITNDQKKLMSNNVQIVRQQSYSIMSIIKEEVLAYVVQLPLYGVIDTPCWKLHTSPLCTTNTKEGSNICLTRTDRGWYCDNAGSVSFFPQAETCKVQSNRVFCDTMNSLTLPSEVNLCNIDIFNPKYDCKVMTSKTDVSSSVITSLGAIVSCYGKTKCTASNKNRGIIKTFSNGCDYVSNKGVDTVSVGNTLYYVNKQEGKSLYVKGEPIINFYDPLVFPSDEFDASISQVNEKINQSLAFIRKSDELLHNVNAGKSTTNIMITTIIIVIIVILLSLIAVGLLLYCKARSTPVTLSKDQLSGINNIAFSN

SEQ ID NO: 8576 - protein, 574 aa, Artificial Sequence
  derived and/or modified protein sequence (wt) from HRSV__BBB35104.1__F0
MELPILKTNAITTILAAVTLCFASSQNITEEFYQSTCSAVSKGYLSALRTGWYTSVITIELSNIKENKCNGTDAKVKLIKQELDKYKNAVTELQLLMQSTPAANNRARRELPRFMNYTLNNTKNTNVTLSKKRKRRFLGFLLGVGSAIASGIAVSKVLHLEGEVNKIKNALLSTNKAVVSLSNGVSVLTSKVLDLKNYIDKQLLPIVNKQSCSISNIETVIEFQQKNNRLLEITREFSVNAGVTTPVSTYMLTNSELLSLINDMPITNDQKKLMSNNVQIVRQQSYSIMSIIKEEVLAYVVQLPLYGVIDTPCWKLHTSPLCTTNTKEGSNICLTRTDRGWYCDNAGSVSFFPQAETCKVQSNRVFCDTMNSLTLPSEVNLCNIDIFNPKYDCKIMTSKTDVSSSVITSLGAIVSCYGKTKCTASNKNRGIIKTFSNGCDYVSNKGVDTVSVGNTLYYVNKQEGKSLYVKGEPIINFYDPLVFPSDEFDASISQVNEKINQSLAFIRKSDELLHNVNAGKSTTNIMITTIIIVIIVILLSLIAVGMLLYCKARSTPVTLSKDQLSGINNIAFSS

SEQ ID NO: 8577 - protein, 574 aa, Artificial Sequence
  derived and/or modified protein sequence (wt) from HRSV__BBB35099.1__F0
MELPILKTNAITTILAAVTLCFASSQNITEEFYQSTCSAVSKGYLSALRTGWYTSVITIELSNIKENKCNGTDSKVKLIKQELDKYKNAVTELQLLMQSTPAANNRARRELPRFMNYTLNNTKNTNVTLSKKRKRRFLGFLLGVGSAIASGIAVSKVLHLEGEVNKIKSALLSTNKAVVSLSNGVSVLTSKVLDLKNYIDKQLLPIVNKQSCSISNIETVIEFQQKNNRLLEITREFSVNAGVTTPVSTYMLTNSELLSLINDMPITNDQKKLMSNNVQIVRQQSYSIMSIIKEEVLAYVVQLPLYGVIDTPCWKLHTSPLCTTNTKEGSNICLTRTDRGWYCDNAGSVSFFPQAETCKVQSNRVFCDTMNSLTLPSEVNLCNIDIFNPKYDCKIMTSKTDVSSSVITSLGAIVSCYGKTKCTASNKNRGIIKTFSNGCDYVSNKGVDTVSVGNTLYYVNKQEGKSLYVKGEPIINFYDPLVFPSDEFDASISQVNEKINQSLAFIRKSDELLHNVNVGKSTTNIMITTIIIVIIVILLLLIAVGLFLYCKARSTPVTLSKDQLSGINNIAFSN

SEQ ID NO: 8578 - protein, 574 aa, Artificial Sequence
  derived and/or modified protein sequence (wt) from HRSV__BBB35188.1__F0
MDLPILKTNAITAILAAVSLYFASSQNITEEFYQSTCSAVSKGYLSALRTGWYTSVITIELSNIKENKCNGTDAKVKLIKQELDKYKNAVTELQLLMQSTPAANNRARRELPRFMNYTLNNTKNNNVTLSKKRKRRFLGFLLGVGSAIASGIAVSKVLHLEGEVNKIKSALLSTNKAVVSLSNGVSVLTSKVLDLKNYIDKQLLPIVNKQSCSISNIETVIEFQQKNNRLLEITREFSVNAGVTTPVSTYMLTNSELLSLINDMPITNDQKKLMSNNVQIVRQQSYSIMSIIKEEVLAYVVQLPLYGVIDTPCWKLHTSPLCTTNSKEGSNICLTRTDRGWYCDNAGSVSFFPQAETCKVQSNRVFCDTMNSLTLPSEVNLCNIDIFNPKYDCKIMTSKTDVSSSVITSLGAIVSCYGKTKCTASNKNRGIIKTFSNGCDYVSNKGVDTVSVGNTLYYVNKQEGKSLYVKGEPIINFYDPLVFPSDEFDASISQVNEKINQSLAFIRKSDELLHNVNVGKSTTNIMITTIIIVIIVILLLLIAVGLFLYCKARSTPVTLSKDQLSGINNIAFSN

SEQ ID NO: 8579 - protein, 574 aa, Artificial Sequence
  derived and/or modified protein sequence (wt) from HRSV__AKA45871.1__F0
MELPILKTNAITTILAAVTLCFASSQNITEEFYQSTCSAVSKGYLSALRTGWYTSVITIELSNIKENKCNGTDAKVKLIKQELDKYKNAVTELQLLMQSTPAANNRARRELPRFMNYTLNNTKNTNVTLSKKRKRRFLGFLLGVGSAIASGIAVSKVLHLEGEVNKIKSALLSTNKAVVSLSNGVSVLTSKVLDLKNYIDKQLLPIVNKQSCSISNIETVIEFQQKNNRLLEITREFSVNAGVTTPVSTYMLTNSELLSLINDMPITNDQKKLMSNNVQIVRQQSYSIMSIIKEEVLAYVVQLPLYGVIDTPCWKLHTSPLCTTNTKEGSNICLTRTDRGWYCDNAGSVSFFPQAETCKVQSNRVFCDTMNSLTLPSEVNLCNIDIFNPKYDCKIMTSKTDVSSSVITSLGAIVSCYGKTKCTASNKNRGIIKTFSNGCDYVSNKGVDTVSVGNTLYYVNKQEGKSLYVKGEPIINFYDPLVFPSDEFDASISQVNEKINQSLAFIRKSDELLHNVNAGKSTTNIMITTIIIVIIVILLSLIAVGLLLYCKARSTPVTLSKDQLSGINNIAFSS

SEQ ID NO: 8580 - protein, 574 aa, Artificial Sequence
  derived and/or modified protein sequence (wt) from HRSV__ASV65838.1__F0
MELPILKTNAITTILAAVTLCFASSQNITEEFYQSTCSAVSKGYLSALRTGWYTSVITIELSNIKENKCNGTDAKVKLIKQELDKYKNAVTELQLLMQSTQAANSRARRELPRFMNYTLNNTKNTNVTLSKKRKRRFLGFLLGVGSAIASGIAVSKVLHLEGEVNKIKSALLSTNKAVVSLSNGVSVLTSKVLDLKNYIDKQLLPIVNKQSCSISNIETVIEFQQKNNRLLEITREFSVNAGVTTPVSTYMLTNSELLSLINDMPITNDQKKLMSSNVQIVRQQSYSIMSIIKEEVLAYVVQLPLYGVIDTPCWKLHTSPLCTTNTKEGSNICLTRTDRGWYCDNAGSVSFFPQAETCKVQSNRVFCDTMNSLTLPSEVNLCNIDIFNPKYDCKIMTSKTDVSSSVITSLGAIVSCYGKTKCTASNKNRGIIKTFSNGCDYVSNKGVDTVSVGNTLYYVNKQEGKSLYVKGEPIINFYDPLVFPSDEFDASISQVNEKINQSLAFIRKSDELLHNVNAGKSTTNIMITTIIIVIIVILLALIAVGLLLYCKARSTPVTLSKDQLSGINNIAFSN

SEQ ID NO: 8581 - protein, 574 aa, Artificial Sequence
  derived and/or modified protein sequence (wt) from HRSV__AGG39373.1__F0
MELPILKTNAITTILAAVTLCFASSQNITEEFYQSTCSAVSKGYLSALRTGWYTSVITIELSSIKENKCNGTDAKVKLIKQELDKYKNAVTELQLLMQSTPAANNRARRELPRFMNYTLNNTKTTNVTLSRKRKRRFLGFLLGVGSAIASGIAVSKVLHLEGEVNKIKSALLSTNKAVVSLSNGVSVLTSKVLDLKNYIDKQLLPIVNKQSCSISNIETVIEFQQKNNRLLEITREFSVNAGVTTPVSTYMLTNSELLSLINDMPITNDQKKLMSNNVQIVRQQSYSIMSIIKEEVLAYVVQLPLYGVIDTPCWKLHTSPLCTTNTKEGSNICLTRTDRGWYCDNAGSVSFFPQAETCKVQSNRVFCDTMNSLTLPSEVNLCNIDIFNPKYDCKIMTSKTDVSSSVITSLGAIVSCYGKTKCTASNKNRGIIKTFSNGCDYVSNKGVDTVSVGNTLYYVNKQEGKSLYVKGEPIINFYDPLVFPSDEFDASISQVNEKINQSLAFIRKSDELLHNVNAGKSTTNIMITTIIIVIIVILLSLIAVGLLLYCKARSTPVTLSKDQLSGINNIAFSS

SEQ ID NO: 8582 - protein, 574 aa, Artificial Sequence
  derived and/or modified protein sequence (wt) from HRSV__AII22107.1__F0
MELLILKTNAITTILAAVTLCFASSQNITEEFYQSTCSAVSKGYLSALRTGWYTSVITIELSNIKENKCNGTDAKVKLIKQELDKYKNAVTELQLLMQSTPAANSRARRELPRFMNYTLNNTKNTNVTLSKKRKRRFLGFLLGVGSAIASGIAVSKVLHLEGEVNKIKSALLSTNKAVVSLSNGVSVLTSKVLDLKNYIDKQLLPIVNKQSCSISNIETVIEFQQKNNRLLEITREFSVNAGVTTPVSTYMLTNSELLSLINDMPITNDQKKLMSSNVQIVRQQSYSIMSIIKEEVLAYVVQLPLYGVIDTPCWKLHTSPLCTTNTKEGSNICLTRTDRGWYCDNAGSVSFFPQAETCKVQSNRVFCDTMNSLTLPSEVNLCNIDIFNPKYDCKIMTSKTDVSSSVITSLGAIVSCYGKTKCTASNKNRGIIKTFSNGCDYVSNKGVDTVSVGNTLYYVNKQEGKSLYVKGEPIINFYDPLVFPSDEFDASISQVNEKINQSLAFIRKSDELLHNVNAGKSTTNIMITTIIIVIIVILLALIAVGLLLYCKARSTPVTLSKDQLSGINNIAFSN

SEQ ID NO: 8583 - protein, 574 aa, Artificial Sequence
  derived and/or modified protein sequence (wt) from HRSV__AGG39400.1__F0
MELPILKTNAITTILAAVTLCFASSQNITEEFYQSTCSAVSKGYLSALRTGWYTSVITIELSNIKENKCNGTDAKVKLIKQELDKYKNAVTELQLLMQSTPAANNRARRELPRFMNYTLNNTKNTNVTLSKKRKRRFLGFLLGVGSAIASGIAVSKVLHLEGEVNKIKSALLSTNKAVVSLSNGVSVLTSKVLDLKNYIDKQLLPIVNKQSCSISNIETVIEFQQKNNRLLEITREFSVNAGVTTPVSTYMLTNSELLSLINDMPITNDQKKLMSNNVQIVRQQSYSIMSIIKEEVLAYVVQLPLYGVIDTPCWKLHTSPLCTTNTKEGSNICLTRTDRGWYCDNAGSVSFFPQAETCKVQSNRVFCDTMNSLTLPSEVNLCNIDIFNPKYDCKIMTSKTDVSSSVITSLGAIVSCYGKTKCTASNKNRGIIKTFSNGCDYVSNKGVDTVSVGNTLYYVNKQEGKSLYVKGEPIINFYDPLVFPSDEFDASISQVNEKINQSLAFIRKSDELLHNVNVGKSTTNIMITTIIIVIIVILLLLIAVGLFLYCKARSTPVTLSKDQLSGINNIAFSN

SEQ ID NO: 8584 - protein, 574 aa, Artificial Sequence
  derived and/or modified protein sequence (wt) from HRSV__AHY21375.1__F0
MELPILKTNAITTILAAVTLCFASSQNITEEFYQSTCSAVSKGYLSALRTGWYTSVITIELSNIKENKCNGTDAKVKLIKQELDKYKNAVTELQLLMQSTPAANNRARRELPRFMNYTLNNTKNTNVTLSKKRKRRFLGFLLGVGSAIASGIAVSKVLHLEGEVNKIKSALLSTNKAVVSLSNGVSVLTSKVLDLKNYIDKQLLPIVNKQSCSISNIETVIEFQQKNNRLLEITREFSVNAGVTTPVSTYMLTNSELLSLINDMPITNDQKKLMSNNVQIVRQQSYSIMSIIKEEVLAYVVQLPLYGVIDTPCWKLHTSPLCTTNTKEGSNICLTRTDRGWYCDNAGSVSFFPQAETCKVQSNRVFCDTMNSLTLPSEVNLCNIDIFNPKYDCKIMTSKTDVSSSVITSLGAIVSCYGKTKCTASNKNRGIIKTFSNGCDYVSNKGVDTVSVGNTLYYVNKQEGKSLYVKGEPIINFYDPLVFPSDEFDASISQVNEKINQSLAFIRKSDELLHNVNAGKSTTNIMITTIIIVIIVILLSLIAVGLLLYCKARSTPVTLSKDQLSGINNIAFSN

SEQ ID NO: 8585 - protein, 574 aa, Artificial Sequence
  derived and/or modified protein sequence (wt) from HRSV__AGG39457.1__F0
MELPILKTNAITTILAAVTLCFASSQNITEEFYQSTCSAVSKGYLSALRTGWYTSVITIELSNIKENKCNGTDAKVKLIKQELDKYKNAVTELQLLMQSTPAANNRARRELPRFMNYTLNNTKNNNVTLSKKRKRRFLGFLLGVGSAIASGIAVSKVLHLEGEVNKIKSALLSTNKAVVSLSNGVSVLTSKVLDLKNYIDKQLLPIVNKQSCSISNIETVIEFQQKNNRLLEITREFSVNAGVTTPVSTYMLTNSELLSLINDMPITNDQKKLMSNNVQIVRQQSYSIMSIIKEEVLAYVVQLPLYGVIDTPCWKLHTSPLCTTNTKEGSNICLTRTDRGWYCDNAGSVSFFPQAETCKVQSNRVFCDTMNSLTLPSEVNLCNIDIFNPKYDCKIMTSKTDVSSSVITSLGAIVSCYGKTKCTASNKNRGIIKTFSNGCDYVSNKGVDTVSVGNTLYYVNKQEGKSLYVKGEPIINFYDPLVFPSDEFDASISQVNEKINQSLAFIRKSDELLHNVNVGKSTTNIMITTIIIVIIVILLLLIAVGLFLYCKARSTPVTLSKDQLSGINNIAFSN

SEQ ID NO: 8586 - protein, 574 aa, Artificial Sequence
  derived and/or modified protein sequence (wt) from HRSV__ARR29240.1__F0
MELLIHRSSAIFLTLAINALYLTSSQNITEEFYQSTCSAVSRGYLSALRTGWYTSVITIELSNIKETKCNGTDTKVKLIKQELDKYKNAVTELQLLMQNTPAANNRARREAPQYMNYIINTTKNLNVSISKKRKRRFLGFLLGVGSAIASGIAVSKVLHLEGEVNKIKNALLSTNKAVVSLSNGVSVLTSKVLDLKNYINNQLLPIVNQQSCRISNIETVIEFQQKNSRLLEITREFSVNAGVTTPLSTYMLTNSELLSLINDMPITNDQKKLMSSNVQIVRQQSYSIMSIIKEEVLAYVVQLPIYGVIDTPCWKLHTSPLCTTNIKEGSNICLTRTDRGWYCDNAGSVSFFPQADTCKVQSNRVFCDTMNSLTLPSEVSLCNTDIFNSKYDCKIMTSKTDISSSVITSLGAIVSCYGKTKCTASNKNRGIIKTFSNGCDYVSNKGVDTVSVGNTLYYVNKLEGKNLYVKGEPIINYYDPLVFPSDEFDASISQVNEKINQSLAFIRRSDELLHNVNTGKSTTNIMITAIIIVIIVVLLSLIAIGLLLYCKAKNTPVTLSKDQLSGINNIAFSK

SEQ ID NO: 8587 - protein, 574 aa, Artificial Sequence
  derived and/or modified protein sequence (wt) from HRSV__ARR29251.1__F0
MELPILKTNAITTILAAVTLCFASSQNITEEFYQSTCSAVSKGYLSALRTGWYTSVITIELSNIKENKCNGTDAKVKLIKQELDKYKNAVTELQLLMQSTPAANSRARRELPRFVNYTLNNTKNTNVTLSKKRKRRFLGFLLGVGSAIASGIAVSKVLHLEGEVNKIKSALLSTNKAVVSLSNGVSVLTSKVLDLKNYIDKQLLPIVNKQSCSISNIETVIEFQQKNNRLLEITREFSVNAGVTTPVSTYMLTNSELLSLINDMPITNDQKKLMSSNVQIVRQQSYSIMSIIKEEVLAYVVQLPLYGVIDTPCWKLHTSPLCTTNTKEGSNICLTRTDRGWYCDNAGSVSFFPQAETCKVQSNRVFCDTMNSLTLPSEVNLCNIDIFNPKYDCKIMTSKTDVSSSVITSLGAIVSCYGKTKCTASNKNRGIIKTFSNGCDYVSNKGVDTVSVGNTLYYVNKQEGKSLYVKGEPIINFYDPLVFPSDEFDASISQVNEKINQSLAFIRKSDELLHNVNAGKSTTNIMITTIIIVIIVILLALIAVGLLLYCKARSTPVTLSKDQLSGINNIAFSN

SEQ ID NO: 8588 - protein, 574 aa, Artificial Sequence
  derived and/or modified protein sequence (wt) from HRSV__ARR29189.1__F0
MELPILKTNAITTILAAVTLCFASSQNITEEFYQSTCSAVSKGYLSALRTGWYTSVITIELSNIKENKCNGTDAKVKLIKQELDKYKNAVTELQLLMQSTPAANSRARRELPRFMNYTLDNTKNTNVTLSKKRKRRFLGFLLGVGSAIASGIAVSKVLHLEGEVNKIKSALLSTNKAVVSLSNGVSVLTSKVLDLKNYIDKQLLPIVNKQSCSISNIETVIEFQQKNNRLLEITREFSVNAGVTTPVSTYMLTNSELLSLINDMPITNDQKKLMSSNVQIVRQQSYSIMSIIKEEVLAYVVQLPLYGVIDTPCWKLHTSPLCTTNTKEGSNICLTRTDRGWYCDNAGSVSFFPQAETCKVQSNRVFCDTMNSLTLPSEVNLCNIDIFNPKYDCKIMTSKTDVSSSVITSLGAIVSCYGKTKCTASNKNRGIIKTFSNGCDYVSNKGVDTVSVGNTLYYVNKQEGKSLYVKGEPIINFYDPLVFPSDEFDASISQVNEKINQSLAFIRKSDELLHNVNAGKSTTNIMITTIIIVIIVILLALIAVGLLLYCKARSTPVTLSKDQLSGINNIAFSN

SEQ ID NO: 8589 - protein, 574 aa, Artificial Sequence
  derived and/or modified protein sequence (wt) from HRSV__ARR29207.1__F0
MELLIHRSSAIFLTLAINALYLTSSQNITEEFYQSTCSAVSRGYLSALRTGWYTSVITIELSNIKETKCNGTDTKVKLIKQELDKYKNAVTELQLLMQNTPAVNNRARREAPQYMNYTINTTKNLNVSISKKRKRRFLGFLLGVGSAIASGIAVSKVLHLEGEVNKIKNALQSTNKAVVSLSNGVSVLTSKVLDLKNYINNQLLPIVNEQSCRISNIETVIEFQQKNSRLLEITREFSVNAGVTTPLSTYMLTNSELLSLINDMPITNDQKKLMSSNVQIVRQQSYSIMSIIKEEVLAYVVQLPIYGVIDTPCWKLHTSPLCTTNIKEGSNICLTRTDRGWYCDNAGSVSFFPQADTCKVQSNRVFCDTMNSLTLPSEVSLCNTDIFNSKYDCKIMTSKTDISSSVITSLGAIVSCYGKTKCTASNKNRGIIKTFSNGCDYVSNKGVDTVSVGNTLYYVNKLEGKNLYVKGEPIINYYDPLVFPSDEFDASISQVNEKINQSLAFIRRSDELLHNVNTGKSTTNIMITAIIIVIIVVLLSLIAIGLLLYCKAKNTPVTLSKDQLSGINNIAFSK

SEQ ID NO: 8590 - protein, 574 aa, Artificial Sequence
  derived and/or modified protein sequence (wt) from HRSV__AUH15164.1__F0
MELLIHRSSAIFLTLAINALYLTSSQNITEEFYQSTCSAVSRGYLSALRTGWYTSVITIELSNIKETKCNGTDTKVKLIKQELDKYKNAVTELQLLMQNTPAANNRARREAPQYMNYTINTTKNLNVSISKKRKRRFLGFLLGVGSAIASGIAVSKVLHLEGEVNKIKNALLSTNKAVVSLSNGVSVLTSKVLDLKNYINNQLLPIVNQQSCRISNIETVIEFQQKNSRLLEITREFSVNAGVTTPLSTYMLTNSELLSLINDMPITNDQKKLMSSNVQIVRQQSYSIMSIIKEEVLAYVVQLPIYGVIDTPCWKLHTSPLCTTNIKEGSNICLTRTDRGWYCDNAGSVSFFPQADTCKVQSNRVFCDTMNSLTLPSEVSLCNTDIFNSKYDCKIMTSKTDISSSVITSLGAIVSCYGETKCTASNKNRGIIKTFSNGCDYVSNKGVDTVSVGNTLYYVNKLEGKNLYVKGEPIINYYDPLVFPSDEFDASISQVNEKINQSLAFIRRSDELLHNVNTGKSTTNIMITAIIIVIIVVLLSLIAIGLLLYCKAKNTPVTLSKDQLSGINNIAFSK

SEQ ID NO: 8591 - protein, 574 aa, Artificial Sequence
  derived and/or modified protein sequence (wt) from HRSV__ATV81343.1__F0
MELLIHRSSAIFLTLAINALYLTSSQNITEEFYQSTCSAVSRGYFSALRTGWYTSVITIELSNIKETKCNGTDTKVKLIKQELDKYKNAVTELQLLMQNTPAANNRARREAPQYMNYTINTTKNPNVSISKKRKRRFLGFLLGVGSAIASGIAVSKVLHLEGEVNKIKNALLSTNKAVVSLSNGVSVLTSKVLDLKNYINNQLLPIVNQQSCRISNIETVIEFQQKNSRLLEITREFSVNAGVTTPLSTYMLTNSELLSLINDMPITNDQKKLMSSNVQIVRQQSYSIMSIIKEEVLAYVVQLPIYGVIDTPCWKLHTSPLCTTNIKEGSNICLTRTDRGWYCDNAGSVSFFPQADTCKVQSNRVFCDTMNSLTLPSEVSLCNTDIFNSKYDCKIMTSKTDISSSVITSLGAIVSCYGKTKCTASNKNRGIIKTFSNGCDYVSNKGVDTVSVGNTLYYVNKLEGKNLYVKGEPIINYYDPLVFPSDEFDASISQVNEKINQSLAFIRRSDELLHNVNTGKSTTNIMITAIIIVIIVVLLSLIAIGLLLYCKAKNTPVTLSKDQLSGINNIAFSK

SEQ ID NO: 8592 - protein, 574 aa, Artificial Sequence
  derived and/or modified protein sequence (wt) from HRSV__AUC68654.1__F0
MELPILKTNAITTILAAVTLCFASSQNITEEFYQSTCSAVSKGYLSALRTGWYTSVITIELSNIKENKCNGTDAKVKLIKQELDKYKNAVTELQLLMQSTPAANNRARRELPRFMNYTLNNAKNTNVTLSKKRKRRFLGFLLGVGSAIASGIAVSKVLHLEGEVNKIKSALLSTNKAVVSLSNGVSVLTSKVLDLKNYIDKQLLPIVNKQSCSISNIETVIEFQQKNNRLLEITREFSVNAGVTTPVSTYMLTNSELLSLINDMPITNDQKKLMSNNVQIVRQQSYSIMSIIKEEVLAYVVQLPLYGVIDTPCWKLHTSPLCTTNTKEGSNICLTRTDRGWYCDNAGSVSFFPQAETCKVQSNRVFCDTMNSLTLPSEVNLCNIDIFNPKYDCKIMTSKTDVSSSVITSLGAIVSCYGKTKCTASNKNRGIIKTFSNGCDYVSNKGVDTVSVGNTLYYVNKQEGKSLYVKGEPIINFYDPLVFPSDEFDASISQVNEKINQSLAFIRKSDELLHNVNAGKSTTNIMITTIIIVIIVILLLLIAVGLFLYCKARSTPVTLSKDQLSGINNIAFSN

SEQ ID NO: 8593 - protein, 574 aa, Artificial Sequence
  derived and/or modified protein sequence (wt) from HRSV__AUC68577.1__F0
MELMIHKSSAIFLTLAINALYLTSSQNITEEFYQSTCSAVSRGYFSALRTGWYTSVITIELSNIKETKCNGTDTKVKLIKQELDKYKNAVTELQLLMQNTPAVNNRARREAPQYMNYTVNTTKNLNVSISKKRKRRFLGFLLGVGSAIASGIAVSKVLHLEGEVNKIKNALLSTNKAVVSLSNGVSVLTSKVLDLKNYINNQLLPIVNQQSCRISNIETVIEFQQKNSRLLEITREFSVNAGVTTPLSTYMLTNSELLSLINDMPITNDQKKLMSSNVQIVRQQSYSIMSIIKEEVLAYVVQLPIYGVIDTPCWKLHTSPLCTTNIKEGSNICLTRTDRGWYCDNAGSVSFFPQADTCKVQSNRVFCDTMNSLTLPSEVSLCNTDIFNSKYDCKIMTSKTDISSSVITSLGAIVSCYGKTKCTASNKNRGIIKTFSNGCDYVSNKGVDTVSVGNTLYYVNKLEGKNLYVKGDPIINYYDPLVFPSDEFDASISQVNEKINQSLAFIRRSDELLHNVNTGKSTTNIMITTIIIVIIVVLLSLIAIGLLLYCKAKNTPVTLSKDQLSGINNIAFSK

SEQ ID NO: 8594 - protein, 574 aa, Artificial Sequence
  derived and/or modified protein sequence (wt) from HRSV__AUC68566.1__F0
MELPIIKANAITTILIAVTFCFASSQNITEEFYQSTCSAVSKGYLSALRTGWYTSVITIELSNIKENKCNGTDAKVKLIKQELDKYKNAVTELQLLMQSTPAANNRARRELPRFMNYTLNNAKKTNVTLSKKRKRRFLGFLLGVGSAIASGIAVSKVLHLEGEVNKIKSALLSTNKAVVSLSNGVSVLTSKVLDLKNYIDKQLLPIVNKQSCSISNIETVIEFQQKNNRLLEITREFSVNAGVTTPVSTYMLTNSELLSLINDMPITNDQKKLMSNNVQIVRQQSYSIMSIIKEEVLAYVVQLPLYGVIDTPCWKLHTSPLCTTNTKEGSNICLTRTDRGWYCDNAGSVSFFPQADTCKVQSNRVFCDTMNSLTLPSEVNLCNIDIFNPKYDCKIMTSKTDVSSSVITSLGAIVSCYGKTKCTASNKNRGIIKTFSNGCDYVSNKGVDTVSVGNTLYYVNKQEGKSLYVKGEPIINFYDPLVFPSDEFDASISQVNEKINQSLAFIRKSNELLHNVNAGKSTTNIMITTIIIVIIVILLSLIAVGLLLYCKARSTPVTLSKDQLSGINNIAFSN

SEQ ID NO: 8595 - protein, 574 aa, Artificial Sequence
  derived and/or modified protein sequence (wt) from HRSV__AUC68555.1__F0
MELPILKTNAITTILAAATLCFASSQNITEEFYQSTCSAVSKGYLSALRTGWYTSVITIELSNIKENKCNGTDAKVKLIKQELDKYKNAVTELQLLMQSTPAANNRARRELPRFMNYTLNNTKNTNVTLSKKRKRRFLGFLLGVGSAIASGIAVSKVLHLEGEVNKIKSALLSTNKAVVSLSNGVSVLTSKVLDLKNYIDKQLLPIVNKQSCSISNIETVIEFQQKNNRLLEITREFSVNAGVTTPVSTYMLTNSELLSLINDMPITNDQKKLMSNNVQIVRQQSYSIMSIIKEEVLAYVVQLPLYGVIDTPCWKLHTSPLCTTNTKEGSNICLTRTDRGWYCDNAGSVSFFPQAETCKVQSNRVFCDTMNSLTLPSEVNLCNIDIFNPKYDCKIMTSKTDVSSSVITSLGAIVSCYGKTKCTASNKNRGIIKTFSNGCDYVSNKGVDTVSVGNTLYYVNKQEGKSLYVKGEPIINFYDPLVFPSDEFDASISQVNEKINQSLAFIRKSDELLHNVNAGKSTTNIMITTIIIVIIVILLSLIAVGLLLYCKARSTPVTLSKDQLSGINNIAFSN

SEQ ID NO: 8596 - protein, 574 aa, Artificial Sequence
  derived and/or modified protein sequence (wt) from HRSV__AUC68478.1__F0
MELLIHRSSAIFLTLAINALYLTSSQNITEEFYQSTCSAVSRGYFSALRTGWYTSVITIELSNIKETKCNGTDTKAKLIKQELDKYKNAVTELQLLMQNTPAANNRARREAPQYMNYTVNTTKNLNVSISKKRKRRFLGFLLGVGSAIASGIAVSKVLHLEGEVNKIKNALLSTNKAVVSLSNGVSVLTSKVLDLKNYINNQLLPIVNQQSCRISNIETVIEFQQKNSRLLEITREFSVNAGVTTPLSTYMLTNSELLSLINDMPITNDQKKLMSSNVQIVRQQSYSIMSIIKEEVLAYVVQLPIYGVIDTPCWKLHTSPLCTTNIKEGSNICLTRTDRGWYCDNAGSVSFFPQADTCKVQSNRVFCDTMNSLTLPSEVSLCNTDIFNSKYDCKIMTSKTDISSSVITSLGAIVSCYGKTKCTASNKNRGIIKTFSNGCDYVSNKGVDTVSVGNTLYYVNKLEGKNLYVKGEPIINYYDPLVFPSDEFDASISQVNEKINQSLAFIRRSDELLHNVNTGKSTTNIMITTIIIVIIVVLLSLIAIGLLLYCKAKNTPVTLSKDQLSGINNIAFSK

SEQ ID NO: 8597 - protein, 574 aa, Artificial Sequence
  derived and/or modified protein sequence (wt) from HRSV__AUC68445.1__F0
MELPILKTNAITTILAAVTLCFASSQNITEEFYQSTCSAVSKGYLSALRTGWYTSVITIELSNIKENKCNGTDAKVKLIKQELDKYKNAVTELQLLMQSTPAANNRARRELPRFMSYTLNNTKNTNVTLSKKRKRRFLGFLLGVGSAIASGIAVSKVLHLEGEVNKIKSALLSTNKAVVSLSNGVSVLTSKVLDLKNYIDKQLLPIVNKQSCSISNIETVIEFQQKNNRLLEITREFSVNAGVTTPVSTYMLTNSELLSLINDMPITNDQKKLMSNNVQIVRQQSYSIMSIIKEEVLAYVVQLPLYGVIDTPCWKLHTSPLCTTNTKEGSNICLTRTDRGWYCDNAGSVSFFPQAETCKVQSNRVFCDTMNSLTLPSEVNLCNIDIFNPKYDCKIMTSKTDVSSSVITSLGAIVSCYGKTKCTASNKNRGIIKTFSNGCDYVSNKGVDTVSVGNTLYYVNKQEGKSLYVKGEPIINFYDPLVFPSDEFDASISQVNEKINQSLAFIRKSDELLHNVNAGKSTTNIMITTIIIVIIVILLSLIVVGLLLYCKARSTPVTLSKDQLSGINNIAFSN

SEQ ID NO: 8598 - protein, 574 aa, Artificial Sequence
  derived and/or modified protein sequence (wt) from HRSV__AUC68500.1__F0
MELMIHKSSAIFLTLAINALYLTSSQNITEEFYQSTCSAVSRGYFSALRTGWYTSVITIELSNIKETKCNGTDTKVKLIKQELDKYKNAVTELQLLMQNTPAVNNRARREAPQYMNYTINTTKNLNVSISKKRKRRFLGFLLGVGSAIASGIAVSKVLHLEGEVNKIKNALLSTNKAVVSLSNGVSVLTSKVLDLKNYINNQLLPIVNQQSCRISNIETVIEFQQKNSRLLEITREFSVNAGVTTPLSTYMLTNSELLSLINDMPITNDQKKLMSSNVQIVRQQSYSIMSIIKEEVLAYVVQLPIYGVIDTPCWKLHTSPLCTTNIKEGSNICLTRTDRGWYCDNAGSVSFFPQADTCKVQSNRVFCDTMNSLTLPSEVSLCNTDIFNSKYDCKIMTSKTDISSSVITSLGAIVSCYGKTKCTASNKNRGIIKTFSNGCDYVSNKGVDTVSVGNTLYYVNKLEGKNLYVKGEPIINYYDPLVFPSDEFDASISQVNEKINQSLAFIRRSDELLHNVNTGKSTTNIMITTIIIVIIVVLLSLIAIGLLLYCKAKNTPVTLSKDQLSGINNIAFSK

SEQ ID NO: 8599 - protein, 574 aa, Artificial Sequence
  derived and/or modified protein sequence (wt) from HRSV__AUC68522.1__F0
MELPILKTNAITTILAAVTFCFASSQNITEEFYQSTCSAVSKGYLSALRTGWYTSVITIELSNIKENKCNGTDAKVKLIKQELDKYKNAVTELQLLMQSTPAANNRARRELPRFMNYTLNNTKNTNVTLSKKRKRRFLGFLLGVGSAIASGIAVSKVLHLEGEVNKIKSALLSTNKAVVSLSNGVSVLTSKVLDLKNYIDKQLLPIVNKQSCSISNIETVIEFQQKNNRLLEITREFSVNAGVTTPVSTYMLTNSELLSLINDMPITNDQKKLMSNNVQIVRQQSYSIMSIIKEEVLAYVVQLPLYGVIDTHCWKLHTSPLCTTNTKEGSNICLTRTDRGWYCDNAGSVSFFPQAETCKVQSNRVFCDTMNSLTLPSEVNLCNIDIFNPKYDCKIMTSKTDVSSSVITSLGAIVSCYGKTKCTASNKNRGIIKTFSNGCDYVSNKGVDTVSVGNTLYYVNKQEGKSLYVKGEPIINFYDPLVFPSDEFDASISQVNEKINQSLAFIRKSDELLHNVNAGKSTTNIMITTIIIVIIVILLSLIAVGLLLYCKARSTPITLSKDQLSGINNIAFSN

SEQ ID NO: 8600 - protein, 574 aa, Artificial Sequence
  derived and/or modified protein sequence (wt) from HRSV__AUC68291.1__F0
MELPILKTNAITTILAAVTLCFASSQNITEEFYQSTCSAVSKGYLSALRTGWYTSVITIELSNIKENKCNGTDAKVKLIKQELDKYKNAVTELQLLMQSTPAANNRARRELPRFMNYTLNNTKNTNVTLSKKRKRRFLGFLLGVGSAIASGIAVSKVLHLEGEVNKIKSALLSTNKAVVSLSNGVSVLTSKVLDLKNYIDKQLLPIVNKQSCSISNIETVIEFQQKNNRLLEITREFSVNAGVTTPVSTYMLTNSELLSLINDMPITNDQKKLMSNNVQIVRQQSYSIMSIIKEEVLAYVVQLPLYGVIDTPCWKLHTSPLCTTNTKEGSNICLTRTDRGWYCDNAGSVSFFPQAETCKVQSNRVFCDTMNSLTLPSEVNLCNIDIFNPKYDCKIMTSKTDVSSSVITSLGAIVSCYGKTKCTASNKNRGIIKTFSNGCDYVSNKGVDTVSVGNTLYYVNKQEGKSLYVKGEPIINFYDPLVFPSDEFDASISQVNEKINQSLAFIRKSDELLHNVNVGKSTTNIMITTITIVITVILLLLIAVGLFLYCKARSTPVTLSKDQLSGINNIAFSN

SEQ ID NO: 8601 - protein, 574 aa, Artificial Sequence
  derived and/or modified protein sequence (wt) from HRSV__AUC68149.1__F0
MELPILKTNAITTILAAVTLCFASSQNITEEFYQSTCSAVSKGYFSALRTGWYTSVITIELSNIKENKCNGTDAKVKLIKQELDKYKNAVTELQLLMQSTPAANNRARRELPRFMNYTLNNTKNTNVTLSKKRKRRFLGFLLGVGSAIASGIAVSKVLHLEGEVNKIKSALLSTNKAVVSLSNGVSVLTSKVLDLKNYIDKQLLPIVNKQSCSISNIETVIEFQQKNNRLLEITREFSVNAGVTTPVSTYMLTNSELLSLINDMPITNDQKKLMSNNVQIVRQQSYSIMSIIKEEVLAYVVQLPLYGVIDTPCWKLHTSPLCTTNTKEGSNICLTRTDRGWYCDNAGSVSFFPQAETCKVQSNRVFCDTMNSLTLPSEVNLCNIDIFNPKYDCKIMTSKTDVSSSVITSLGAIVSCYGKTKCTASNKNRGIIKTFSNGCDYVSNKGVDTVSVGNTLYYVNKQEGKSLYVKGEPIINFYDPLVFPSDEFDASISQVNEKINQSLAFIRKSDELLHNVNAGKSTTNIMITTIIIVIIVILLSLIAVGLLLYCKARSTPVTLSKDQLSGINNIAFSN

SEQ ID NO: 8602 - protein, 574 aa, Artificial Sequence
  derived and/or modified protein sequence (wt) from HRSV__AUC68094.1__F0
MELPILKTNAITTILAAVTLCFASSQNITEEFYQATCSAVSKGYLSALRTGWYTSVITIELSNIKENKCNGTDAKVKLIKQELDKYKNAVTELQLLMQSTPAANNRARRELPRFMNYTLNNTKNTNVTLSKKRKRRFLGFLLGVGSAIASGIAVSKVPHLEGEVNKIKSALLSTNKAVVSLSNGVSVLTSKVLDLKNYIDKQLLPIVNKQSCSISNIETVIEFQQKNNRLLEITREFSVNAGVTTPVSTYMLTNSELLSLINDMPITNDQKKLMSNNVQIVRQQSYSIMSIIKEEVLAYVVQLPLYGVIDTPCWKLHTSPLCTTNTKEGSNICLTRTDRGWYCDNAGSVSFFPQAETCKVQSNRVFCDTMNSLTLPSEVNLCNIDIFNPKYDCKIMTSKTDVSSSVITSLGAIVSCYGKTKCTASNKNRGIIKTFSNGCDYVSNKGVDTVSVGNTLYYVNKQEGKSLYVKGEPIINFYDPLVFPSDEFDASISQVNEKINQSLAFIRKSDELLHNVNAGKSTTNIMITTIIIVIIVILLSLIAVGLLLYCKARSTPVTLSKDQLSGINNIAFSN

SEQ ID NO: 8603 - protein, 574 aa, Artificial Sequence
  derived and/or modified protein sequence (wt) from HRSV__AMA67097.1__F0
MELLIHRSSAVFLTLAINALYLTSSQNITEEFYQSTCSAVSRGYLSALRTGWYTSVITIELSNIKETKCNGTDTKVKLIKQELDKYKNAVTELQLLMQNTPAANNRARREAPQYMNYTINTTKNLNVSISKKRKRRFLGFLLGVGSAIASGIAVSKVLHLEGEVNKIKNALLSTNKAVVSLSNGVSVLTSKVLDLKNYINNQLLPIVNQQSCRISNIETVIEFQQKNSRLLEITREFSVNAGVTTPLSTYMLTNSELLSLINDMPITNDQKKLMSSNVQIVRQQSYSIMSIIKEEVLAYVVQLPIYGVIDTPCWKLHTSPLCTTNIKEGSNICLTRTDRGWYCDNAGSVSFFPQADTCKVQSNRVFCDTMNSLTLPSEVSLCNTDIFNSKYDCKIMTSKTDISSSVITSLGAIVSCYGKTKCTASNKNRGIIKTFSNGCDYVSNKGVDTVSVGNTLYYVNKLEGKNLYVKGEPIINYYDPLVFPSDEFDASISQVNEKINQSLAFIRRSDELLHNVNAGKSTTNIMITAIIIVIIVVLLSLIAIGLLLYCRAKNTPVTLSKDQLSGINNIAFSK

SEQ ID NO: 8604 - protein, 574 aa, Artificial Sequence
  derived and/or modified protein sequence (wt) from HRSV__AMA66866.1__F0
MELPILKTNAITTILATVTLCFASSQNITEEFYQSTCSAVSKGYLSALRTGWYTSVITIELSNIKENKCNGTDAKVKLIKQELDKYKNAVTELQLLMQSTPAANNRARRELPRFMNYTLNNTKNTNVTLSKKRKRRFLGFLLGVGSAIASGIAVSKVLHLEGEVNKIKSALLSTNKAVVSLSNGVSVLTSKVLDLKNYIDKQLLPIVNKQSCSISNIETVIEFQQKNNRLLEITREFSVNAGVTTPVSTYMLTNSELLSLINDMPITNDQKKLMSNNVQIVRQQSYSIMSIIKEEVLAYVVQLPLYGVIDTPCWKLHTSPLCTTNTKEGSNICLTRTDRGWYCDNAGSVSFFPQAETCKVQSNRVFCDTMNSLTLPSEVNLCNIDIFNPKYDCKIMTSKTDVSSSVITSLGAIVSCYGKTKCTASNKNRGIIKTFSNGCDYVSNKGVDTVSVGNTLYYVNKQEGKSLYVKGEPIINFYDPLVFPSDEFDASISQVNEKINQSLAFIRKSDELLHNVNAGKSTTNIMITTIIIVIIVILLSLIAVGLLLYCKARSTPVTLSKDQLSGINNIAFSN

SEQ ID NO: 8605 - protein, 574 aa, Artificial Sequence
  derived and/or modified protein sequence (wt) from HRSV__AMA66580.1__F0
MELPILKANAITTILIAVTFCFASSQNITEEFYQSTCSAVSKGYLSALRTGWYTSVITIELSNIKENKCNGTDAKVKLIKQELDKYKNAVTELQLLMQSTPAANNRARRELPRFMNYTLNNAKKTNVTLSKKRKRRFLGFLLGVGSAIASGIAVSKVLHLEGEVNKIKSALLSTNKAVVSLSNGVSVLTSKVLDLKNYIDKQLLPIVNKQSCSISNIETVIEFQQKNNRLLEITREFSVNAGVTTPVSTYMLTNSELLSLINDMPITNDQKKLMSNNVQIVRQQSYSIMSIIKEEVLAYVVQLPLYGVIDTPCWKLHTSPLCTTNTKEGSNICLTRTDRGWYCDNAGSVSFFPQAETCKVQSNRVFCDTMNSLTLPSEVNLCNVDIFNPKYDCKIMTSKTDVSSSVITSLGAIVSCYGKTKCTASNKNRGIIKTFSNGCDYVSNKGVDTVSVGNTLYYVNKQEGKSLYVKGEPIINFYDPLVFPSDEFDASISQVNEKINQSLAFIRKSDELLHNVNAGKSTTNIMITTIIIVIIVILLSLIAVGLLLYCKARSTPVTLSKDQLSGINNIAFSN

SEQ ID NO: 8606 - protein, 574 aa, Artificial Sequence
  derived and/or modified protein sequence (wt) from HRSV__AIZ95750.1__F0
MELLIHRSSAIFLTIAINALYLTSSQNITEEFYQSTCSAVSRGYFSALRTGWYTSVITIELSNIKETKCNGTDTKVKLIKQELDKYKNAVTELQLLMQNTPAANNRARREAPQYMNYTINTTKNLNVSISKKRKRRFLGFLLGVGSAIASGIAVSKVLHLEGEVNKIKNALLSTNKAVVSLSNGVSVLTSKVLDLKNYINNQLLPIVNQQSCRISNIETVIEFQQKNSRLLEITREFSVNAGVTTPLSTYMLTNSELLSLINDMPITNDQKKLMSSNVQIVRQQSYSIMSIIKEEVLAYVVQLPIYGVIDTPCWKLHTSPLCTTNIKEGSNICLTRTDRGWYCDNAGSVSFFPQADTCKVQSNRVFCDTMNSLTLPSEVSLCNTDIFNSKYDCKIMTSKTDISSSVITSLGAIVSCYGKTKCTASNKNRGIIKTFSNGCDYVSNKGVDTVSVGNTLYYVNKLEGKNLYVKGEPIINYYDPLVFPSDEFDASISQVNEKINQSLAFIRRSDELLHNVNTGKSTTNIMITAIIIVIIVVLLSLIAIGLLLYCKAKNTPVTLSKDQLSGINNIAFSK

SEQ ID NO: 8607 - protein, 574 aa, Artificial Sequence
  derived and/or modified protein sequence (wt) from HRSV__AIZ95541.1__F0
MELPILKTNAITTILAAVTLCFASSQNITEEFYQSTCSAVSKGYLSALRTGWYTSVITIELSNIKENKCNGTDAKVKLIKQELDKYKNAVTELQLLMQSTPAANNRARRELPRFMNYTLNNTKNTNVTLSKKRKRRFLGFLLGVGSAIASGIAVSKVLHLEGEVNKIKSALLSTNKAVVSLSNGVSVLTSKVLDLKNYIDKQLLPIVNKQSCSISNIETVIEFQQKNNRLLEITREFSVNAGVTTPVSTYMLTNSELLSLINDMPITNDQKKLMSNNVQIVRQQSYSIMSIIKEEVLAYVVQLPLYGVIDTPCWKLHTSPLCTTNTKEGSNICLTRTDRGWYCDNAGSVSFFPQAETCKVQSNRVFCDTMNSLTLPSEVNLCNIDIFNPKYDCKIMTSKTDVSSSVITSLGAIVSCYGKTKCTASNKNRGIIKTFSNGCDYVSNKGVDTVSVGNTLYYVNKQEGKSLYVKGEPIINFYDPLVFPSDEFDASISQVNEKINQSLAFIRKSDELLHNVNAGKSTTNIMITTIIIVIIVILLLLIAVGLFLYCKARSTPVTLSKDQLSGINNIAFSN

SEQ ID NO: 8608 - protein, 574 aa, Artificial Sequence
  derived and/or modified protein sequence (wt) from HRSV__AIZ95519.1__F0
MELPILKTNAITTIFAAVTLCFASSQNITEEFYQSTCSAVSKGYLSALRTGWYTSVITIELSNIKENKCNGTDAKVKLIKQELDKYKNAVTELQLLMQSTPAANNRARRELPRFMNYTLNNTKNTNVTLSKKRKRRFLGFLLGVGSAIASGIAVSKVLHLEGEVNKIKSALLSTNKAVVSLSNGVSVLTSKVLDLKNYIDKQLLPIVNKQSCSISNIETVIEFQQKNNRLLEITREFSVNAGVTTPVSTYMLTNSELLSLINDMPITNDQKKLMSNNVQIVRQQSYSIMSIIKEEVLAYVVQLPLYGVIDTPCWKLHTSPLCTTNTKEGSNICLTRTDRGWYCDNAGSVSFFPQAETCKVQSNRVFCDTMNSLTLPSEVNLCNIDIFNPKYDCKIMTSKTDVSSSVITSLGAIVSCYGKTKCTASNKNRGIIKTFSNGCDYVSNKGVDTVSVGNTLYYVNKQEGKSLYVKGEPIINFYDPLVFPSDEFDASISQVNEKINQSLAFIRKSDELLHNVNAGKSTTNIMITTIIIVIIVILLSLIAVGLLLYCKARSTPVTLSKDQLSGINNIAFSS

SEQ ID NO: 8609 - protein, 574 aa, Artificial Sequence
  derived and/or modified protein sequence (wt) from HRSV__AHY21419.1__F0
MELPILKTNAITTILAAVTLCFASSQNITEEFYQATCSAVSKGYLSALRTGWYTSVITIELSNIKENKCNGTDAKVKLIKQELDKYKNAVTELQLLMQSTPAANNRARRELPRFMNYTLNNTKNTNVTLSKKRKRRFLGFLLGVGSAIASGIAVSKVLHLEGEVNKIKSALLSTNKAVVSLSNGVSVLTSKVLDLKNYIDKQLLPIVNKQSCSISNIETVIEFQQKNNRLLEITREFSVNAGVTTPVSTYMLTNSELLSLINDMPITNDQKKLMSNNVQIVRQQSYSIMSIIKEEVLAYVVQLPLYGVIDTPCWKLHTSPLCTTNTKEGSNICLTRTDRGWYCDNAGSVSFFPQAETCKVQSNRVFCDTMNSLTLPSEVNLCNIDIFNPKYDCKIMTSKTDVSSSVITSLGAIVSCYGKTKCTASNKNRGIIKTFSNGCDYVSNKGVDTVSVGNTLYYVNKQEGKSLYVKGEPIINFYDPLVFPSDEFDASISQVNEKINQSLAFIRKSDELLHNVNAGKSTTNIMITTIIIVIIVILLSLIAVGLLLYCKARSTPVTLSKDQLSGINNIAFSN

SEQ ID NO: 8610 - protein, 574 aa, Artificial Sequence
  derived and/or modified protein sequence (wt) from HRSV__AHY21331.1__F0
MELLIHRSSAIFLTLAINALYLTSSQNITEEFYQSTCSAVSRGYFSALRTGWYTSVITIELSNIKETKCNGTDTKVKLIKQELDKYKNAVTELQLLMQNTPAVNNRARREAPQHMNYTINTTKNLNVSISKKRKRRFLGFLLGVGSAIASGIAVSKVLHLEGEVNKIKNALLSTNKAVVSLSNGVSVLTSKVLDLKNYINNQLLPIVNKQSCRISNIETVIEFQQKNSRLLEITREFSVNAGVTTPLSTYMLTNSELLSLINDMPITNDQKKLMSSNVQIVRQQSYSIMSIIKEEVLAYVVQLPIYGVIDTHCWKLHTSPLCTTNIKEGSNICLTRTDRGWYCDNAGSVSFFPQADTCKVQSNRVFCDTMNSLTLPSEVSLCNTDIFNSKYDCKIMTSKTDISSSVITSLGAIVSCYGKTKCTASNKNRGIIKTFSNGCDYVSNKGVDTVSVGNTLYYVNKLEGKNLYVKGEPIINYYDPLVFPSDEFDASISQVNEKINQSLAFIRRSDELLHNVNTGKSTTNIMITTIIIVIIVVLLSLIAIGLLLYCKAKNTPVTLSKDQLSGINNIAFSK

SEQ ID NO: 8611 - protein, 574 aa, Artificial Sequence
  derived and/or modified protein sequence (wt) from HRSV__AHY21165.1__F0
MELMIHKSSAIFLTLAINALYLTSSQNITEEFYQSTCSAVSRGYFSALRTGWYTSVITIELSNIKETKCNGTDTKVKLIKQELDKYKNAVTELQLLMQNTPAVNNRARREAPQYMNYTINTTKNLNVSISKKRKRRFLGFLLGVGSAIASGIAVSKVLHLEGEVNKIKNALLSTNKAVVSLSNGVSVLTSKVLDLKNYINNQLLPIVNQQSCRISNIETVIEFQQKNSRLLEITREFSVNAGVTTPLSTYMLTNSELLSLINDMPITNDQKKLMSSNVQIVRQQSYSIMSIIKEEVLAYVVQLPIYGVIDTPCWKLHTSPLCTTNIKEGSNICLTRTDRGWYCDNAGSVSFFPQADTCKVQSNRVFCDTMNSLTLPSEVSLCNTDIFNSKYDCKIMTSKTDISSSVITSLGAIVSCYGKTKCTASNKNRGIIKTFSNGCDYVSNKGVDTVSVGNTLYYVNKLEGKNLYVKGDPIINYYDPLVFPSDEFDASISQVNEKINQSLAFIRRSDELLHNVNTGKSTTNIMITTIIIVIIVVLLSLIAIGLLLYCKAKNTPVTLSKDQLSGINNIAFSK

SEQ ID NO: 8612 - protein, 574 aa, Artificial Sequence
  derived and/or modified protein sequence (wt) from HRSV__AHY21143.1__F0
MELPIIKANAITTILIAVTFCFASSQNITEEFYQSTCSAVSKGYLSALRTGWYTSVITIELSNIKENKCNGTDAKVKLIKQELDKYKNAVTELQLLMQSTPAANNRARRELPRFMNYTLNNAKKTNVTLSKKRKRRFLGFLLGVGSAIASGIAVSKVLHLEGEVNKIKSALLSTNKAVVSLSNGVSVLTSKVLDLKNYIDKQLLPIVNKQSCSISNIETVIEFQQKNNRLLEITREFSVNAGVTTPVSTYMLTNSELLSLINDMPITNDQKKLMSNNVQIVRQQSYSIMSIIKEEVLAYVVQLPLYGVIDTPCWKLHTSPLCTTNTKEGSNICLTRTDRGWYCDNAGSVSFFPQADTCKVQSNRVFCDTMNSLTLPSEVNLCNIDIFNPKYDCKIMTSKTDVSSSVITSLGAIVSCYGKTKCTASNKNRGIIKTFSNGCDYVSNKGVDTVSVGNTLYYVNKQEGKSLYVKGEPIINFYDPLVFPSDEFDASISQVNEKINQSLAFIRKSDELLHNVNAGKSTTNIMITTIIIVIIVILLSLIAVGLLLYCKARSTPVTLSKDQLSGINNIAFSN

SEQ ID NO: 8613 - protein, 574 aa, Artificial Sequence
  derived and/or modified protein sequence (wt) from HRSV__AHY21132.1__F0
MELLIHRSSAIFLTLAINALYLTSSQNITEEFYQSTCSAVSRGYFSALRTGWYTSVITIELSNIKETKCNGTDTKVKLIKQELDKYKNAVTELQLLMQNTPAANNRARREAPQYMNYTINTTKNLNVSISKKRKRRFLGFLLGVGSAIASGIAVSKVLHLEGEVNKIKNALLSTNKAVVSLSNGVSVLTSKVLDLKNYINNQLLPIVNQQSCRISNIETVIEFQQKNSRLLEITREFSVNAGVTTPLSTYMLTNSELLSLINDMPITNDQKKLMSSNVQIVRQQSYSIMSIIKEEVLAYVVQLPIYGVIDTPCWKLHTSPLCTTNIKEGSNICLTRTDRGWYCDNAGSVSFFPQADTCKVQSNRVFCDTMNSLTLPSEVSLCNTDIFNSKYDCKIMTSKTDISSSVITSLGAIVSCYGKTKCTASNKNRGIIKTFSNGCDYVSNKGVDTVSVGNTLYYVNKLEGKNLYVKGEPIINYYDPLVFPSDEFDASISQVNEKINQSLAFIRRSDELLHNVNTGKSTTNIMITTIIIVIIVVLLSLIAIGLLLYCKAKNTPVTLSKDQLSGINNIAFSK

SEQ ID NO: 8614 - protein, 574 aa, Artificial Sequence
  derived and/or modified protein sequence (wt) from HRSV__AGG39478.1__F0
MELLIHRSSAIFLTLAINALYLTSSQNITEEFYQSTCSAVSRGYFSALRTGWYTSVITIELSNIKETKCNGTDTKVKLIKQELDKYKNAVTELQLLMQNTPAANNRARREAPQYMNYTINTTKNLNVSISKKRKRRFLGFLLGVGSAIASGIAVSKVLHLEGEVNKIKNALLSTNKAVVSLSNGVSVLTSKVLDLKNYINNQLLPIVNQQSCRISNIETVIEFQQKNSRLLEITREFSVNAGVTTPLSTYMLTNSELLSLINDMPITNDQKKLMSSNVQIVRQQSYSIMSIIKEEVLAYVVQLPIYGVIDTPCWKLHTSPLCTTNIKEGSNICLTRTDRGWYCDNAGSVSFFPQADTCKVQSNRVFCDTMNSLTLPSEVSLCNTDIFNSKYDCKIMTSKTDISSSVITSLGAIVSCYGKTKCTASNKNRGIIKTFSNGCDYVSNKGVDTVSVGNTLYYVNKLEGKNLYVKGEPIINYYDPLVFPSDEFDASISQVNEKINQSLAFIRRSDELLHNVNAGKSTTNIMITAIIIVIIVVLLSLIAIGLLLYCKAKNTPVTLSKDQLSGINNIAFSK

SEQ ID NO: 8615 - protein, 574 aa, Artificial Sequence
  derived and/or modified protein sequence (wt) from HRSV__ATV93506.1__F0
MELPILKTNAITTILAAVTLCFASSQNITEEFYQSTCSAVSKGYLSALRTGWYTSVITIELSNIKENKCNGTDAKVKLIKQELDKYKNAVTELQLLMQSTPAANSRARRELPRFMNYTLNNTKNTNATLSKKRKRRFLGFLLGVGSAIASGIAVSKVLHLEGEVNKIKSALLSTNKAVVSLSNGVSVLTSKVLDLKNYIDKQLLPIVNKQSCSISNIETVMEFQQKNNRLLEITREFSVNAGVTTPVSTYMLTNSELLSLINDMPITNDQKKLMSSNVQIVRQQSYSIMSIIKEEVLAYVVQLPLYGVIDTPCWKLHTSPLCTTNTKEGSNICLTRTDRGWYCDNAGSVSFFPQAETCKVQSNRVFCDTMNSLTLPSEVNLCNIDIFNPKYDCKIMTSKTDVSSSVITSLGAIVSCYGKTKCTASNKNRGIIKTFSNGCDYVSNKGVDTVSVGNTLYYVNKQEGKSLYVKGEPIINFYDPLVFPSDEFDASISQVNEKINQSLAFIRKSDELLHNVNAGKSTTNIMITTIIIVIIVILLALIAVGLLLYCKARSTPVTLSKDQLSGINNIAFSN

SEQ ID NO: 8616 - protein, 574 aa, Artificial Sequence
  derived and/or modified protein sequence (wt) from HRSV__ATV93509.1__F0
MELPILKTNAITTILAAVILCFASSQNITEEFYQSTCSAVSKGYLSALRTGWYTSVITIELSNIKENKCNGTDAKVKLIKQELDKYKNAVTELQLLMQSTPAANSRARRELPRFMNYTLNNAKNTNVTLSKKRKRRFLGFLLGVGSAIASGIAVSKVLHLEGEVNKIKSALLSTNKAVVSLSNGVSVLTSKVLDLKNYIDKQLLPIVNKQSCSISNIETVIEFQQKNNRLLEITREFSVNAGVTTPVSTYMLTNSELLSLINDMPITNDQKKLMSSNVQIVRQQSYSIMSIIKEEVLAYVVQLPLYGVIDTPCWKLHTSPLCTTNTKEGSNICLTRTDRGWYCDNAGSVSFFPQAETCKVQSNRVFCDTMNSLTLPSEVNLCNIDIFNPKYDCKIMTSKTDVSSSVITSLGAIVSCYGKTKCTASNKNRGIIKTFSNGCDYVSNKGVDTVSVGNTLYYVNKQEGKSLYVKGEPIINFYDPLVFPSDEFDASISQVNEKINQSLAFIRKSDELLHNVNAGKSTTNIMITTIIIVIIVILLALIAVGLLLYCKARSTPVTLSKDQLSGINNIAFSN

SEQ ID NO: 8617 - protein, 574 aa, Artificial Sequence
  derived and/or modified protein sequence (wt) from HRSV__AIZ95717.1__F0
MELPTIKANAITTILIAVTFCFASSQNITEEFYQSTCSAVSKGYLSALRTGWYTSVITIELSNIKENKCNGTDAKVKLIKQELDKYKNAVTELQLLMQSTPAANNRARRELPRVMNYTLNNAKKTNVTLSKKRKRRFLGFLLGVGSAIASGIAVSKVLHLEGEVNKIKSALLSTNKAVVSLSNGVSVLTSKVLDLKNYIDKQLLPIVNKQSCSISNIETVIEFQQKNNRLLEITREFSVNAGVTTPVSTYMLTNSELLSLINDMPITNDQKKLMSNNVQIVRQQSYSIMSIIKEEVLAYVVQLPLYGVIDTPCWKLHTSPLCTTNTKEGSNICLTRTDRGWYCDNAGSVSFFPQADTCKVQSNRVFCDTMNSLTLPSEVNLCNIDIFNPKYDCKIMTSKTDVSSSVITSLGAIVSCYGKTKCTASNKNRGIIKTFSNGCDYVSNKGVDTVSVGNTLYYVNKQEGKSLYVKGEPIINFYDPLVFPSDEFDASISQVNEKINQSLAFIRKSDELLHNVNAGKSTTNIMITTIIIVIIVILLSLIAVGLLLYCKARSTPVTLSKDQLSGINNIAFSN

SEQ ID NO: 8618 - protein, 574 aa, Artificial Sequence
  derived and/or modified protein sequence (wt) from HRSV__ATV81354.1__F0
MDLPILKTNAITTILATVTLCFASSQNITEEFYQSTCSAVSKGYLSALRTGWYTSVITIELSNIKENKCNGTDAKVKLIKQELDKYKNAVTELQLLMQSTPASNNRARRELPRFMNYTLNNTKNTNITLSKKRKRRFLGFLLGVGSAIASGIAVSKVLHLEGEVNKIKSALLSTNKAVVSLSNGVSVLTSKVLDLKNYIDKQLLPIVNKQSCSISNIETVIEFQQKNNRLLEITREFSVNAGVTTPVSTYMLTNSELLSLINDMPITNDQKKLMSNNVQIVRQQSYSIMSIIKEEVLAYVVQLPLYGVIDTPCWKLHTSPLCTTNTKEGSNICLTRTDRGWYCDNAGSVSFFPQAETCKVQSNRVFCDTMNSLTLPSEVNLCNIDIFNPKYDCKIMTSKTDVSSSVITSLGAIVSCYGKTKCTASNKNRGIIKTFSNGCDYVSNKGVDTVSVGNTLYYVNKQEGKSLYVKGEPIINFYDPLVFPSDEFDASISQVNEKINQSLAFIRKSDELLHNVNAGKSTTNIMITTIIIVIVVILLSLIAVGLLLYCKARSTPVTLSKDQLSGINNIAFSS

SEQ ID NO: 8619 - protein, 574 aa, Artificial Sequence
  derived and/or modified protein sequence (wt) from HRSV__ART28317.1__F0
MELPILKTNAITTIFAAVTLCFASSQNITEEFYQSTCSAVSKGYLSALRTGWYTSVITIELSNIKENKCNGTDTKVKLIKQELDKYKNAVTELQLLMQSTPAANNRARRELPRFMNYTLNNTKNNNVTLSKKRKRRFLGFLLGVGSAIASGIAVSKVLHLEGEVNKIKSALLSTNKAVVSLSNGVSVLTSKVLDLKNYIDKQLLPIVNKQSCSISNIGTVIEFQQKNNRLLEITREFSVNAGVTTPVSTYMLTNSELLSLINDMPITNDQKKLMSNNVQIVRQQSYSIMSIIKEEVLAYVVQLPLYGVIDTPCWKLHTSPLCTTNTKEGSNICLTRTDRGWYCDNAGSVSFFPKAETCKVQSNRVFCDTMNSLTLPSEVNLCNIDIFNPKYDCKIMTSKTDVSSSVITSLGAIVSCYGKTKCTASNKNRGIIKTFSNGCDYVSNKGVDTVSVGNTLYYVNKQEGKSLYVKGEPIINFYDPLVFPSDEFDASISQVNEKINQSLAFIRKSDELLHNVNVGKSTTNIMITTIIIVIIVILLLLIAVGLFLYCKARSTPITLSKDQLSGINNIAFSN

SEQ ID NO: 8620 - protein, 574 aa, Artificial Sequence
  derived and/or modified protein sequence (wt) from HRSV__BBA57901.1__F0
MELLIHRSSAIFLTLAINALYLTSSQNITEEFYQSTCSAVSRGYLSALRTGWYTSVITIELSNIKETKCNGTDTKVKLIKQELDKYKNAVTELQLLMQNTPAVNNRARREAPQYMNYTINTTKNLNVSISKKRKRRFLGFLLGVGSAIASGIAVSKVLHLEGEVNKIKNALQLTNKAVVSLSNGVSVLTSRVLDLKNYINNQLLPMVNRQSCRISNIETVIEFQQKNSRLLEITREFSVNAGVTTPLSTYMLTNSELLSLINDMPITNDQKKLMSSNVQIVRQQSYSIMSIIKEEVLAYVVQLPIYGVIDTPCWKLHTSPLCTTNIKEGSNICLTRTDRGWYCDNAGSVSFFPQADTCKVQSNRVFCDTMNSLTLPSEVSLCNTDIFNSKYDCKIMTSKTDISSSVITSLGAIVSCYGKTKCTASNKNRGIIKTFSNGCDYVSNKGVDTVSVGNTLYYVNKLEGKNLYVKGEPIINYYDPLVFPSDEFDASISQVNEKINQSLAFIRRSDELLHNVNTGKSTTNIMITAIIIVIIVVLLSLIAIGLLLYCKAKNTPVTLSKDQLSGINNIAFSK

SEQ ID NO: 8621 - protein, 574 aa, Artificial Sequence
  derived and/or modified protein sequence (wt) from HRSV__ASZ70099.1__F0
MELPILKTNAITTILAAVTLCFASSQNITEEFYQSTCSAVSKGYLSALRTGWYTSVITIELSNIKENKCNGTDAKVKLIKQELDKYKNAVTELQLLMQSTPAANSRARRELPRFMNYTLNNNKNTNVTLSKKRKRRFLGFLLGVGSAIASGIAVSKVLHLEGEVNKIKSALLSTNKAVVSLSNGVSVLTSKVLDLKNYIDKQLLPIVNKQSCSISNIETVIEFQQKNNRLLEITREFSVNAGVTTPVSTYMLTNSELLSLINDMPITNDQKKLMSSNVQIVRQQSYSIMSIIKEEVLAYVVQLPLYGVIDTPCWKLHTSPLCTTNTKEGSNICLTRTDRGWYCDNAGSVSFFPQAETCKVQSNRVFCDTMNSLTLPSEVNLCNIDIFNPKYDCKIMTSKTDVSSSVITSLGAIVSCYGKTKCTASNKNRGIIKTFSNGCDYVSNKGVDTVSVGNTLYYVNKQEGKSLYVKGEPIINFYDPLVFPSDEFDASISQVNEKINQSLAFIRKSDELLHNVNAGKSTTNIMITTIIIVIIVILLALIAVGLLLYCKARSTPVTLSKDQLSGINNIAFSN

SEQ ID NO: 8622 - protein, 574 aa, Artificial Sequence
  derived and/or modified protein sequence (wt) from HRSV__ART28361.1__F0
MELPILKTNAITTILAAVTLCFASSQNITEEFYQSTCSAVSKGYLSALRTGWYTSVITIELSNIKENKCNGTDAKVKLIKQELDKYKNAVTELQLLMQSTPAANSRARRELPRFMNYTLNNTKTTNVTLSKKRKRRFLGFLLGVGSAIASGIAVSKVLHLEGEVNKIKSALLSTNKAVVSLSNGVSVLTSKVLDLKNYIDKQLLPIVNKQSCSISNIETVIEFQQKNNRLLEITREFSVNAGVTTPVSTYMLTNSELLSLINDMPITNDQKKLMSSNVQIVRQQSYSIMSIIKEEVLAYVVQLPLYGVIDTPCWKLHTSPLCTTNTKEGSNICLTRTDRGWYCDNAGSVSFFPQAETCKVQSNRVFCDTMNSLTLPSEVNLCNIDIFNPKYDCKIMTSKTDVSSSVITSLGAIVSCYGKTKCTASNKNRGIIKTFSNGCDYVSNKGVDTVSVGNTLYYVNKQEGKSLYVKGEPIINFYDPLVFPSDEFDASISQVNEKINQSLAFIRKSDELLHNVNAGKSTTNIMITTIIIVIIVIVLALIAVGLLLYCKARSTPVTLSKDQLSGINNIAFSN

SEQ ID NO: 8623 - protein, 574 aa, Artificial Sequence
  derived and/or modified protein sequence (wt) from HRSV__AQX36844.1__F0
MELPILKTNAITTILAAVTLCFASSQNITEEFYQSTCSAVSKGYLSALRTGWYTSVITIELSNIKENKCNGTDAKVKLIKQELDKYKNAVTELQLLMQSTPAANSRARRELPRFMNYTLNNTKNTNVTLSKKRKRRFLGFLLGVGSAIASGIAVSKVLHLEGEVNKIKSALLSTNKAVVSLSNGVSVLTSKVLDLKNYIDKQLLPIVNKQSCSISNIETVIEFQQKNNRLLEITREFSVNAGVTTPVSTYMLTNSELLSLINDMPITNDQKKLMSSNVQIVRQQSYSIMSIIKEEVLAYVVQLPLYGVIDTPCWKLHTSPLCTTNTKEGSNICLTRTDRGWYCDNAGSVSFFPQAETCKAQSNRVFNNTITSLTLPSEVNLCNIDIFNPKYDCKIMTSKTDVSSSVITSLGAIVSCYGKTKCTASNKNRGIIKTFSNGCDYVSNKGVDTVSVGNTLYYVNKQEGKSLYVKGEPIINFYDPLVFPSDEFDASISQVNEKINQSLAFIRKSDELLHNVNAGKSTTNIMITTIIIVIIVILLALIAVGLLLYCKARSTPVTLSKDQLSGINNIAFSN

SEQ ID NO: 8624 - protein, 574 aa, Artificial Sequence
  derived and/or modified protein sequence (wt) from HRSV__ASK05520.1__F0
MELLIHRSSAIFLTLAINALYLTSSQNITEEFYQSTCSAVSRGYLSALRTGWYTSVITIELSNIKETKCNGTDTKVKLIKQELDKYKNAVTELQLLMQNTPAVNNRARREAPQHMNYTINTTKNLNVSISKKRKRRFLGFLLGVGSAIASGIAVSKVLHLEGEVNKIKNALQLTNKAVVSLSNGVSVLTSKVLDLKNYINNQLLPIVNQQSCRISNIETVIEFQQKNSRLLEITREFSVNAGVTTPLSTYMLTNSELLSLINDMPITNDQKKLMSSNVQIVRQQSYSIMSIIKEEVLAYVVQLPIYGVIDTPCWKLHTSPLCTTNIKEGSNICLTRTDRGWYCDNAGSVSFFPQADTCKVQSNRVFCDTMNSLTLPSEVSLCNTDIFNSKYDCKIMTSKTDISSSVITSLGAIVSCYGKTKCTASNKNRGIIKTFSNGCDYVSNKGVDTVSVGNTLYYVNKLEGKNLYVKGEPIINYYDPLVFPSDEFDASISQVNEKINQSLAFIRRSDELLHNVNTGKSTTNIMITTIIIVIIVVLLSLIAIGLLLYCKAKNTPVTLSKDQLSGINNIAFSK

SEQ ID NO: 8625 - protein, 574 aa, Artificial Sequence
  derived and/or modified protein sequence (wt) from HRSV__ART28427.1__F0
MELPILKTNAITTILAAVTLCFASSQNITEEFYQSTCSAVSKGYLSALRTGWYTSVITIELSNIKENKCNGTDAKVKLIKQELDKYKNAVTELQLLMQSTPAANSRARRELPRFMNYTLNNTKNTNVTLSKKRKRRFLEFLLGVGSAIASGIAVSKVLHLEGEVNKIKSALLSTNKAVVSLSNGVSVLTSKVLDLKNYIDKQLLPIVNKQSCSISNIETVIEFQQKNNRLLEITREFSVNAGVTTPVSTYMLTNSELLSLINDMPITNDQKKLMSNNVQIVRQQSYSIMSIIKEEVLAYVVQLPLYGVIDTPCWKLHTSPLCTTNTKEGSNICLTRTDRGWYCDNAGSVSFFPQADTCKVQSNRVFCDTMNSLTLPSEVNLCNIDIFNPKYDCKIMTSKTDVSSSVITSLGAIVSCYGKTKCTASNKNRGIIKTFSNGCDYVSNKGVDTVSVGNTLYYVNKQEGKSLYVKGEPIINFYDPLVFPSDEFDASISQVNEKINQSLAFIRKSDELLHNVNAGKSTTNIMITTIIIVIIVILLSLIAVGLLLYCKARSTPVTLSKDQLSGINNIAFSN

SEQ ID NO: 8626 - protein, 574 aa, Artificial Sequence
  derived and/or modified protein sequence (wt) from HRSV__ART28297.1__F0
MELPILKTNAITTILAAVTLCFASSQNITEEFYQSTCSAVSKGYLSALRTGWYTSVITIELSNIKENKCNGTDAKVKLIKQELDKYKNAVTELQLLMQSTPAANSRARRELPRFMNYTLNNTKNTNVTLSKKRKRRFLGFLLGVGSAIASGIAVSKVLHLEGEVNKIKSALLSTNKAVVSLSNGVSVLTSKVLDLKNYIDKQLLPIVNKQSCSISNIETVIEFQQKNNRLLEITREFSVNAGVTTPVSTYMLTNSELLSLINDMPITNDQKKLMSSNVQIVRQQSYSIMSIIKEEVLAYVVQLPLYGVIDTPCWKLHTSPLCTTNTKEGSNICLTRTDRGWYCDNAGSVSFFPQAETCKVQSNRVFCDTMNSLTLPSEVNLCNIDIFNPKYDCKIMTSKTDVSSSVITSLGAIVSCYGKTKCTASNKNRGIIKTFSNGCDYVSNKGVDTVSVGNTLYYVNKQEGKSLYVKGEPIINFYDPLVFPSDEFDASISQVNEKINQSLSFIRKSDELLHNVNVGKSTTNIMITTIIIVIIVILLALIAVGLLLYCKARSTPVTLSKDQLSGINNIAFSN

SEQ ID NO: 8627 - protein, 574 aa, Artificial Sequence
  derived and/or modified protein sequence (wt) from HRSV__ART28328.1__F0
MDSPILKTNAITAILAAVSLCFASSQNITEEFYQSTCSAVSKGYLSALRTGWYTSVITIELSNIKENKCNGTDAKVKLIKQELDKYKNAVTELQLLMQSTPAANNRARRELPRFMNYTLNNTKNNNITLSKKRKRRFLGFLLGVGSAIASGIAVSKVLHLEGEVNKIKSALLSTNKAVVSLSNGVSVLTSKVLDLKNYIDKQLLPIVNKQSCSISNIETVIEFQQKNNRLLEITREFSVNAGVTTPVSTYMLTNSELLSLINDMPITNDQKKLMSNNVQIVRQQSYSIMSIIKEEVLAYVVQLPLYGVIDTPCWKLHTSPLCTTNTKEGSNICLTRTDRGWYCDNAGSVSFFPQAETCKVQSNRVFCDTMNSLTLPSEVNLCNIDIFNPKYDCKIMTSKTDVSSSVITSLGAIVSCYGKTKCTASNKNRGIIKTFSNGCDYVSNKGVDTVSVGNTLYYVNKQEGKSLYVKGEPIINFYDPLVFPSDEFDASISQVNEKINQSLAFIRKSDELLHNVNVGKSTTNIMITTIIIVIIVILLLLIAVGLFLYCKARSTPVTLSKDQLSGINNIAFSN

SEQ ID NO: 8628 - protein, 574 aa, Artificial Sequence
  derived and/or modified protein sequence (wt) from HRSV__ARQ15966.1__F0
MELPILKTNAITTILAAVTLCFASSQNITEEFYQSTCSAVSKGYLSALRTGWYTSVITIELSNIKENKCNGTDAKVKLIKQELDKYKNAVTELQLLMQSTPAANSRARRELPRFMNYTLYNTKNTNVTLSKKRKRRFLGFLLGVGSAIASGIAVSKVLHLEGEVNKIKSALLSTNKAVVSLSNGVSVLTSKVLDLKNYIDKQLLPIVNKQSCSISNIETVIEFQQKNNRLLEITREFSVNAGVTTPVSTYMLTNSELLSLINDMPITNDQKKLMSSNVQIVRQQSYSIMSIIKEEVLAYVVQLPLYGVIDTPCWKLHTSPLCTTNTKEGSNICLTRTDRGWYCDNAGSVSFFPQAETCKVQSNRVFCDTMNSLTLPSEVNLCNIDIFNPKYDCKIMTSKTDVSSSVITSLGAIVSCYGKTKCTASNKNRGIIKTFSNGCDYVSNKGVDTVSVGNTLYYVNKQEGKSLYVKGEPIINFYDPLVFPSDEFDASISQVNEKINQSLAFIRKSDELLHNVNAGKSTTNIMITTIIIVIIVILLALIAVGLLLYCKARSTPVTLSKDQLSGINNIAFSN

SEQ ID NO: 8629 - protein, 574 aa, Artificial Sequence
  derived and/or modified protein sequence (wt) from HRSV__ARN61507.1__F0
MELPILKTNAITTILAAVTLCFASSQNITEEFYQSTCSAVSKGYLSALRTGWYTSVITIELSNIKENKCNGTDAKVKLIKQELDKYKNAVTELQLLMQSTPAANSRARRELPRFMNYTLNNTKNTNVTLSKKRKRRFLGFLLGVGSAIASGIAVSKVLHLEGEVNKIKSALLSTNKAVVSLSNGVSVLTSKVLDLKNYIDKQLLPIVNKQSCSISNIETVIEFQQKNNRLLEITREFSVNAGVTTPVSTYMLTNSELLSLINDMPITNDQKKLMSSNVQIVRQQSYSIMSIIKEEVLAYVVQLPLYGVIDTPCWKLHTSPLCTTNTKEGSNICLTRTDRGWYCDNAGSVSFFPQAETCKVQSNRVFCDTMNSLTLPSEVNLCNIDIFNPKYDCKIMTSKTDVSSSVITSLGAIVSCYGKTKCTASNKNRGIIKTFSNGCDYVSNKGVDTVSVGNTLYYVNKQEGKGLYVKGEPIINFYDPLVFPSDEFDASISQVDEKINQSLAFLRKSDELLHNVNAGKSTTNIMITTIIIVIIVILLALIAVGLLLYCKARSTPVTLSKDQLSGINNIAFSN

SEQ ID NO: 8630 - protein, 574 aa, Artificial Sequence
  derived and/or modified protein sequence (wt) from HRSV__ARA15413.1__F0
MELLIHRSSAIFLTLAINALYLTSSQNITEEFYQSTCSAVSRGYLSALRTGWYTSVITIELSNIKETKCNGTDTKVKLIKQELDKYKNAVTELQLLMQNTPAVNNRARREAPQYMNYTINTTKNLNVSISKKRKRRFLGFLLGVGSAIASGIAVSKVLHLEGEVNKIKSALQLTNKAVVSLSNGVSVLTSKVLDLKNYINNQLLPIVNQQSCRISNIETVIEFQQKNSRLLEITREFSVNAGVTTPLSTYMLTNSELLSLINDMPITNDQKKLMSSNVQIVRQQSYSIMSIIKEEVLAYVVQLPIYGVIDTPCWKLHTSPLCTTNIKEGSNICLTRTDRGWYCDNAGSVSFFPQADTCKVQSNRVFCDTMNSLTLPSEVSLCNTDIFNSKYDCKIMTSKTDISSSVITSLGAIVSCYGKTKCTASNKNRGIIKTFSNGCDYVSNKGVDTVSVGNTLYYVNKLEGKNLYVKGEPIINYYDPLVFPSDEFDASISQVNEKINQSLAFIRRSDELLHNVNTGKSTTNIMITAIIIVIIVVLLSLIAIGLLLYCKAKKTPVTLSKDQLSGINNIAFSK

SEQ ID NO: 8631 - protein, 574 aa, Artificial Sequence
  derived and/or modified protein sequence (wt) from HRSV__AGG39394.1__F0
MELPILKANAITTILAAVTFCFASSQNITEEFYQSTCSAVSKGYLSALRTGWYTSVITIELSNIKENKCNGTDAKVKLIKQELDKYKNAVTELQLLMQSTSAANNRARRELPRFMNYTLNNTKKTNVTLSKKRKRRFLGFLLGVGSAIASGIAVSKVLHLEGEVNKIKSALLSTNKAVVSLSNGVSVLTSKVLDLKNYIDKQLLPIVNKQSCRISNIETVIEFQQKNNRLLEITREFSVNAGVTTPVSTYMLTNSELLSLINDMPITNDQKKLMSNNVQIVRQQSYSIMSIIKEEVLAYVVQLPLYGVIDTPCWKLHTSPLCTTNTKEGSNICLTRTDRGWYCDNAGSVSFFPQAETCKVQSNRVFCDTMNSLTLPSEVNLCNVDIFNPKYDCKIMTSKTDVSSSVITSLGAIVSCYGKTKCTASNKNRGIIKTFSNGCDYVSNKGVDTVSVGNTLYYVNKQEGKSLYVKGEPIINFYDPLVFPSDEFDASISQVNEKINQSLAFIRKSDELLHHVNAGKSTTNIMITTIIIVIIVILLSLIAVGLLLYCKARSTPVTLSKDQLSGINNIAFSN

SEQ ID NO: 8632 - protein, 574 aa, Artificial Sequence
  derived and/or modified protein sequence (wt) from HRSV__APW78845.1__F0
MELLIHRPSAIFLTLAINALYLTSSQNITEEFYQSTCSAVSRGYLSALRTGWYTSVITIELSNIKETKCNGTDTKVKLIKQELDKYKNAVTELQLLMQNTPAVNNRARREAPQYMNYTINTTKNPNVSISKKRKRRFLGFLLGVGSAIASGIAVSKVLHLEGEVNKIKNALQSTNKAVVSLSNGVSVLTSKVLDLKNYINNQLLPIVNQQSCRISNIETVIEFQQKNSRLLEITREFSVNAGVTTPLSTYMLTNSELLSLINDMPITNDQKKLMSSNVQIVRQQSYSIMSIIKEEVLAYVVQLPIYGVIDTPCWKLHTSPLCTTNIKEGSNICLTRTDRGWYCDNAGSVSFFPQADTCKVQSNRVFCDTMNSLTLPSEVSLCNTDIFNSKYDCKIMTSKTDISSSVITSLGAIVSCYGKTKCTASNKNRGIIKTFSNGCDYVSNKGVDTVSVGNTLYYVNKLEGKNLYVKGEPIINYYDPLVFPSDEFDASISQVNEKINQSLAFIRRSDELLHNVNTGKSTTNIMITAIIIVIIVVLLSLIAIGLLLYCKAKNTPVTLSKDQLSGINNIAFSK

SEQ ID NO: 8633 - protein, 574 aa, Artificial Sequence
  derived and/or modified protein sequence (wt) from HRSV__APW78867.1__F0
MELLIHRSSAIFLTLAINALYLTSSQNITEEFYQSTCSAVSRGYLSALRTGWYTSVITIELSNIKETKCNGTDTKVKLIKQELDKYRNAVTELQLLMQNTPAANNRARREAPQYMNYTINTTKNLNVSISKKRKRRFLGFLLGVGSAIASGIAVSKVLHLEGEVNKIKNALLSTNKAVVSLSNGVSVLTSKVLDLKNYINNQLLPIVNQQSCRISNIETVIEFQQKNSRLLEITREFSVNAGVTTPLSTYMLTNSELLSLINDMPITNDQKKLMSSNAQIVRQQSYSIMSIIKEEVLAYVVQLPIYGVIDTPCWKLHTSPLCTTNIKEGSNICLTRTDRGWYCDNAGSVSFFPQADTCKVQSNRVFCDTMNSLTLPSEVSLCNTDIFNSKYDCKIMTSKTDISSSVITSLGAIVSCYGKTKCTASNKNRGIIKTFSNGCDYVSNKGVDTVSVGNTLYYVNKLEGKNLYVKGEPIINYYDPLVFPSDEFDASISQVNEKINQSLAFIRRSDELLHNVNTGKSTTNIMITAIIIVIIVVLLSLIAIGLLLYCKAKNTPVTLSKDQLSGINNIAFSK

SEQ ID NO: 8634 - protein, 574 aa, Artificial Sequence
  derived and/or modified protein sequence (wt) from HRSV__APW78900.1__F0
MELLIHRSSAIFLTLAINALYLTSSQNITEEFYQSTCSAVSRGYLSALRTGWYTSVITIELSNIKETKCNGTDTKVKLIKQELDKYKNAVTELQLLMQNTPAVNNRARREAPQYMNCTINTTKNLNVSISKKRKRRFLGFLLGVGSAIASGIAVSKVLHLEGEVNKIKNALQLTNKAVVSLSNGVSVLTSKVLDLKNYINNQLLPIVNQQSCRISNIETVIEFQQKNSRLLEITREFSVNAGVTTPLSTYMLTNSELLSLINDMPITNDQKKLMSSNVQIVRQQSYSIMSIIKEEVLAYVVQLPIYGVIDTPCWKLHTSPLCTTNIKEGSNICLTRTDRGWYCDNAGSVSFFPQADTCKVQSNRVFCDTMNSLTLPSEVSLCNTDIFNSKYDCKIMTSKTDISSSVITSLGAIVSCYGKTKCTASNKNRGIIKTFSNGCDYVSNKGVDTVSVGNTLYYVNKLEGKNLYVKGEPIINYYDPLVFPSDEFDASISQVNEKINQSLAFIRRSDELLHNVNTGKSTTNIMITAIIIVIIVVLLSLIAIGLLLYCKAKNTPVTLSKDQLSGINNIAFSK

SEQ ID NO: 8635 - protein, 574 aa, Artificial Sequence
  derived and/or modified protein sequence (wt) from HRSV__APW78878.1__F0
MELLIHRSSAIFLTLAINALYLTSSQNITEEFYQSTCSAVSRGYLSALRTGWYTSVITIELSNIKETKCNGTDTKVKLIKQELDKYKNAVTELQLLMQNTQAANNRARREAPQYMNYTINTTKNLNVSISKKRKRRFLGFLLGVGSAIASGIAVSKVLHLEGEVNKIKNALLSTNKAVVSLSNGVSVLTSKVLDLKNYINNQLLPIVNQQSCRISNIETVIEFQQKNSRLLEITREFSVNAGVTTPLSTYMLTNSELLSLINDMPITNDQKKLMSSNVQIVRQQSYSIMSIIKEEVLAYVVQLPIYGVIDTPCWKLHTSPLCTTNIKEGSNICLTRTDRGWYCDNAGSVSFFPQADTCKVQSNRVFCDTMNSLTLPSEVSLCNTDIFNSKYDCKIMTSKTDISSSVITSLGAIVSCYGKTKCTASNKNRGIIKTFSNGCDYVSNKGVDTVSVGNTLYYVNKLEGKNLYVKGEPIINYYDPLVFPSDEFDASISQVNEKINQSLAFIRRSDELLHNVNTGKSTTNIMITAIIIVIIVVLLSLIAIGLLLYCKAKNTPVTLSKDQLSGINNIAFSK

SEQ ID NO: 8636 - protein, 574 aa, Artificial Sequence
  derived and/or modified protein sequence (wt) from HRSV__APW78779.1__F0
MELLIYRSSAIFLTLAINALYLTSSQNITEEFYQSTCSAVSKGYLSALRTGWYTSVITIELSNIKETKCNGTDTKVKLIKQELDKYKNAVTELQLLMQNTPAANNRARREAPQYMNYTINTTKNLNVSISKKRKRRFLGFLLGVGSAIASGIAVSKVLHLEGEVNKIKNALLSTNKAVVSLSNGVSVLTSKVLDLKNYINNQLLPIVNQQSCRISNIETVIEFQQKNSRLLEITREFSVNAGVTTPLSTYMLTNSELLSLINDMPITNDQKKLMSSNVQIVRQQSYSIMSIIKEEVLAYVVQLPIYGVIDTPCWKLHTSPLCTTNIKEGSNICLTRTDRGWYCDNAGSVSFFPQADTCKVQSNRVFCDTMNSLTLPSEVSLCNTDIFNSKYDCKIMTSKTDISSSVITSLGAIVSCYGKTKCTASNKNRGIIKTFSNGCDYVSNKGVDTVSVGNTLYYVNKLEGKNLYVKGEPIINYYDPLVFPSDEFDASISQVNEKINQSLAFIRRSDELLHNVNTGKSTTNIMITAIIIVIIVVLLSLIAIGLLLYCKAKNTPVTLSKDQLSGINNIAFSK

SEQ ID NO: 8637 - protein, 574 aa, Artificial Sequence
  derived and/or modified protein sequence (wt) from HRSV__APW78702.1__F0
MELLIHRSSAIFLTLAINALYLTSSQNITEEFYQSTCSAVSRGYLSALRSGWYTSVITIELSNIKETKCNGTDTKVKLIKQELDKYKNAVTELQLLMQNTPAVNNRARREAPQYMNYTINTTKNLNVSISKKRKRRFLGFLLGVGSAIASGIAVSKVLHLEGEVNKIKNALQSTNKAVVSLSNGVSVLTSKVLDLKNYINNQLLPIVNQQSCRISNIETVIEFQQKNSRLLEITREFSVNAGVTTPLSTYMLTNSELLSLINDMPITNDQKKLMSSNVQIVRQQSYSIMSIIKEEVLAYVVQLPIYGVIDTPCWKLHTSPLCTTNIKEGSNICLTRTDRGWYCDNAGSVSFFPQADTCKVQSNRVFCDTMNSLTLPSEVSLCNTDIFNSKYDCKIMTSKTDISSSVITSLGAIVSCYGKTKCTASNKNRGIIKTFSNGCDYVSNKGVDTVSVGNTLYYVNKLEGKNLYVKGEPIINYYDPLVFPSDEFDASISQVNEKINQSLAFIRRSDELLHNVNTGKSTTNIMITAIIIVIIVVLLLLIAIGLLLYCKAKNTPVTLSKDQLSGINNIAFSK

SEQ ID NO: 8638 - protein, 574 aa, Artificial Sequence
  derived and/or modified protein sequence (wt) from HRSV__APW78713.1__F0
MELLIHRSSAIFLTLAIKALYLTSSQNITEEFYQSTCSAVSRGYLSALRTGWYTSVITIELSNIKETKCNGTDTKVKLIKQELDKYKNAVTELQLLMQNTPAVNNRARREAPQYMNYTINTTKNLNVSISKKRKRRFLGFLLGVGSAIASGIAVSKVLHLEGEVNKIKNALQSTNKAVVSLSNGVSVLTSKVLDLKNYINNQLLPIVNQQSCRISNIETVIEFQQKNSRLLEITREFSVNAGVTTPLSTYMLTNSELLSLINDMPITNDQKKLMSSNVQIVRQQSYSIMSIIKEEVLAYVVQLPIYGVIDTPCWKLHTSPLCTTNIKEGSNICLTRTDRGWYCDNAGSVSFFPQADTCKVQSNRVFCDTMNSLTLPSEVSLCNTDIFNSKYDCKIMTSKTDISSSVITSLGAIVSCYGKTKCTASNKNRGIIKTFSNGCDYVSNKGVDTVSVGNTLYYVNKLEGKNLYVKGEPIINYYDPLVFPSDEFDASISQVNEKINQSLAFIRRSDELLHNVNTGKSTTNIMITAIIIVIIVVLLSLIAIGLLLYCKAKNTPVTLSKDQLSGINNIAFSK

SEQ ID NO: 8639 - protein, 574 aa, Artificial Sequence
  derived and/or modified protein sequence (wt) from HRSV__APW78680.1__F0
MELLIHRSSAIFLTLAINALYLTSSQNITEEFYQSTCSAVSRGYFSALRTGWYTSVITIELSNIKETKCNGTDTKVKLIKQELDKYKNAVTELQLLMQNTPAANNRARREAPQYMNYTINTTKNLNASISKKRKRRFLGFLLGVGSAIASGIAVSKVLHLEGEVNKIKNALLSTNKAVVSLSNGVSVLTSKVLDLKNYINNQLLPIVNQQSCRISNIETVIEFQQKNSRLLEITREFSVNAGVTTPLSTYMLTNSELLSLINDMPITNDQKKLMSSNVQIVRQQSYSIMSIIKEEVLAYVVQLPIYGVIDTPCWKLHTSPLCTTNIKEGSNICLTRTDRGWYCDNAGSVSFFPQADTCKVQSNRVFCDTMNSLTLPSEVSLCNTDIFNSKYDCKIMTSKTDISSSVITSLGAIVSCYGKTKCTASNKNRGIIKTFSNGCDYVSNKGVDTVSVGNTLYYVNKLEGKNLYVKGEPIINYYDPLVFPSDEFDASISQVNEKINQSLAFIRRSDELLHNVNTGKSTTNIMITAIIIVIIVVLLSLIAIGLLLYCKAKNTPVTLSKDQLSGINNIAFSK

SEQ ID NO: 8640 - protein, 574 aa, Artificial Sequence
  derived and/or modified protein sequence (wt) from HRSV__APW78658.1__F0
MELLIHRSSAIFLTLAINALYLTSSQNITEEFYQSTCSAVSRGYWSALRTGWYTSVITIELSNIKETKCNGTDTKVKLIKQELDKYKNAVTELQLLMQNTPAVNNRARREAPQYMDYTINTTKNLNVSISKKRKRRFLGFLLGVGSAIASGIAVSKVLHLEGEVNKIKNALQLTNKAVVSLSNGVSVLTSKVLDLKNYINNQLLPIVNQQSCRISNIETVIEFQQKNSRLLEITREFSVNAGVTTPLSTYMLTNSELLSLINDMPITNDQKKLMSSNVQIVRQQSYSIMSIIKEEVLAYVVQLPIYGVIDTPCWKLHTSPLCTTNIKEGSNICLTRTDRGWYCDNAGSVSFFPQADTCKVQSNRVFCDTMNSLTLPSEVSLCNTDIFNSKYDCKIMTSKTDISSSVITSLGAIVSCYGKTKCTASNKNRGIIKTFSNGCDYVSNKGVDTVSVGNTLYYVNKLEGKNLYVKGEPIINYYDPLVFPSDEFDASISQVNEKINQSLAFIRRSDELLHNVNTGKSTTNIMITAIIIVIIVVLLSLIAIGLLLYCKAKNTPVTLSKDQLSGINNIAFSK

SEQ ID NO: 8641 - protein, 574 aa, Artificial Sequence
  derived and/or modified protein sequence (wt) from HRSV__APW78647.1__F0
MELLIHRSSAIFLTLAINALYLTSSQNITEEFYQSTCSAVSRGYFSALRTGWYTSVITIELSNIKETKCNGTDTKVKLIKQELDKYKNAVTELQLLMQNTPAANNRARREAPQYMNYTINTTKNPNASISKKRKRRFLGFLLGVGSAIASGIAVSKVLHLEGEVNKIKNALLSTNKAVVSLSNGVSVLTNKVLDLKNYINNQLLPIVNQQSCRISNIETVIEFQQKNSRLLEITREFSVNAGVTTPLSTYMLTNSELLSLINDMPITNDQKKLMSSNVQIVRQQSYSIMSIIKEEVLAYVVQLPIYGVIDTPCWKLHTSPLCTTNIKEGSNICLTRTDRGWYCDNAGSVSFFPQADTCKVQSNRVFCDTMNSLTLPSEVSLCNTDIFNSKYDCKIMTSKTDISSSVITSLGAIVSCYGKTKCTASNKNRGIIKTFSNGCDYVSNKGVDTVSVGNTLYYVNKLEGKNLYVKGEPIINYYDPLVFPSDEFDASISQVNEKINQSLAFIRRSDELLHNVNTGKSTTNIMITAIIIVIIVVLLSLIAIGLLLYCKAKNTPVTLSKDQLSGINNIAFSK

SEQ ID NO: 8642 - protein, 574 aa, Artificial Sequence
  derived and/or modified protein sequence (wt) from HRSV__APW78636.1__F0
MELLIHRSSAIFLTFAINTLYLTSSQNITEEFYQSTCSAVSRGYLSALRTGWYTSVITIELSNIKETKCNGTDTKVKLIKQELDKYKNAVTELQLLMQNTPAANNRARREAPQYMNYTINTTKNLNVSISKKRKRRFLGFLLGVGSAIASGIAVSKVLHLEGEVNKIKNALLSTNKAVVSLSNGVSVLTSKVLDLKNYINNQLLPIVNQQSCRISNIETVIEFQQKNSRLLEITREFSVNAGVTTPLSTYMLTNSELLSLINDMPITNDQKKLMSSNVQIVRQQSYSIMSIIKEEVLAYVVQLPIYGVIDTPCWKLHTSPLCTTNIKEGSNICLTRTDRGWYCDNAGSVSFFPQADTCKVQSNRVFCDTMNSLTLPSEVSLCNTDIFNSKYDCKIMTSKTDISSSVITSLGAIVSCYGKTKCTASNKNRGIIKTFSNGCDYVSNKGVDTVSVGNTLYYVNKLEGKNLYVKGEPIINYYDPLVFPSDEFDASISQVNEKINQSLAFIRRSDELLHNVNTGKSTTNIMITAIIIVIIVVLLSLIAIGLLLYCKAKNTPVTLSKDQLSGINNIAFSK

SEQ ID NO: 8643 - protein, 574 aa, Artificial Sequence
  derived and/or modified protein sequence (wt) from HRSV__AOS48870.1__F0
MELLIHRSSAIFLTLAINALYLTSSQNITEEFYQSTCSAVSRGYLSALRTGWYTSVITIELSNIKETKCNGTDTKVKLIKQELDKYKNAVTELQLLMQNTPAVNNRARREAPQYMNYTINTTKSLNVSISKKRKRRFLGFLLGVGSAIASGIAVSKVLHLEGEVNKIKNALQSTNKAVVSLSNGVSVLTSKVLDLKNYINNQLLPIVNKQSCRISNIETVIEFQQKNSRLLEITREFSVNAGVTTPLSTYMLTNSELLSLINDMPITNDQKKLMSSNVQIVRQQSYSIMSIIKEEVLAYVVQLPIYGVIDTPCWKLHTSPLCTTNIKEGSNICLTRTDRGWYCDNAGSVSFFPQADTCKVQSNRVFCDTMNSLTLPSEVSLCNTDIFNSKYDCKIMTSKTDISSSVITSLGAIVSCYGKTKCTASNKNRGIIKTFSNGCDYVSNKGVDTVSVGNTLYYVNKLEGKNLYVKGEPIINYYDPLVFPSDEFDASISQVNEKINQSLAFIRRSDELLHNVNTGKSTTNIMITAIIIVIIVVLLSLIAIGLLLYCKAKNTPVTLSKDQLSGINNIAFSK

SEQ ID NO: 8644 - protein, 574 aa, Artificial Sequence
  derived and/or modified protein sequence (wt) from HRSV__APW78614.1__F0
MELLIHRSSAIFLTLAINALYLTSSQNITEEFYQSTCSAVSRGYLSALRTGWYTSVITIELSNIKETKCNGTDTKVKLIKQELDKYKNAVTELQLLMQNTPAVNNRARREAPQYMNYTINTTKNLNVSISKKRKRRFLGFLLGVGSAIASGIAVSKVLLLEGEVNKIKNALQSTNKAVVSLSNGVSVLTSKVLDLKNYINNQLLPIVNQQSCRISNIETVIEFQQKNSRLLEITREFSVNAGVTTPLSTYMLTNSELLSLINDMPITNDQKKLMSSNVQIVRQQSYSIMSIIKEEVLAYVVQLPIYGVIDTPCWKLHTSPLCTTNIKEGSNICLTRTDRGWYCDNAGSVSFFPQADTCKVQSNRVFCDTMNSLTLPSEVSLCNTDIFNSKYDCKIMTSKTDISSSVITSLGAIVSCYGKTKCTASNKNRGIIKTFSNGCDYVSNKGVDTVSVGNTLYYVNKLEGKNLYVKGEPIINYYDPLVFPSDEFDASISQVNEKINQSLAFIRRSDELLHNVNTGKSTTNIMITAIIIVIIVVLLSLIAIGLLLYCKAKNTPVTLSKDQLSGINNIAFSK

SEQ ID NO: 8645 - protein, 574 aa, Artificial Sequence
  derived and/or modified protein sequence (wt) from HRSV__AMT78905.1__F0
MELLIHRSSAIFLTLAINTLYLTSSQNITEEFYQSTCSAVSRGYFSALRTGWYTSVITIELSNIKETKCNGTDTKVKLIKQELDKYKNAVTELQLLMQNTPAANNRARREAPQYMNYTINTTKNLNVSISKKRKRRFLGFLLGVGSAIASGIAVSKVLHLEGEVNKIKNALLSTNKAVVSLSNGVSVLTSKVLDLKNYINNQLLPIVNQQSCRISNIETVIEFQQKNSRLLEITREFSVNAGVTTPLSTYMLTNSELLSLINDMPITNDQKKLMSSNVQIVRQQSYSIMSIIKEEVLAYVVQLPIYGVIDTPCWKLHTSPLCTTNIKEGSNICLTRTDRGWYCDNAGSVSFFPQADTCKVQSNRVFCDTMNSLTLPSEVSLCNTDIFNSKYDCKIMTSKTDISSSVITSLGAIVSCYGKTKCTASNKNRGIIKTFSNGCDYVSNKGVDTVSVGNTLYYVNKLEGKNLYVKGEPIINYYDPLVFPSDEFDASISQVNEKINQSLAFIRRSDELLHNVNTGKSTTNIMITAIIIVIIVVLLSLIAIGLLLYCKAKNTPVTLSKDQLSGINNIAFSK

SEQ ID NO: 8646 - protein, 574 aa, Artificial Sequence
  derived and/or modified protein sequence (wt) from HRSV__AMT77402.1__F0
MELLIHRSSAIFLTLAINALYLTSSQNITEEFYQSTCSAVSRGYLSALRTGWYTSVITIELSNIKETKCNGTDTKVKLIKQELDKYKNAVTELQLLMQNTPAANNRARREAPQYMNYTINTTKNLNVSISKKRKRRFLGFLLGVGSAIASGIAVSKVLHLEGEVNKIKNALLSTNKAVVSLSNGVSVLTSKVLDLKNYINNQLLPIVNQQSCRISNIETVIEFQQKNSRLLEITREFSVNAGVTTPLSTYMLTNSELLSLINDMPITNDQKKLMSNNVQIVRQQSYSIMSIIKEEVLAYVVQLPIYGVIDTPCWKLHTSPLCTTNIKEGSNICLTRTDRGWYCDNAGSVSFFPQADTCKVQSNRVFCDTMNSLTLPSEVSLCNTDIFNSKYDCKIMTSKTDISSSVITSLGAIVSCYGKTKCTASNKNRGIIKTFSNGCDYVSNKGVDTVSVGNTLYYVNKLEGKNLYVKGEPIINYYDPLVFPSDEFDASISQVNEKINQSLAFIRRSDELLHNVNTGKSTTNIMITAIIIVIIVVLLSLIAIGLLLYCKAKNTPVTLSKDQLSGINNIAFSK

SEQ ID NO: 8647 - protein, 574 aa, Artificial Sequence
  derived and/or modified protein sequence (wt) from HRSV__APW29972.1__F0
MELLILKANAITTILTAVTFCFASGQNITEEFYQSTCSAVSKGYLSALRTGWYTSVITIELSNIKKNKCNGTDAKVKLIKQELDKYKNAVTELQLLMQSTQATNNRARRELPRFMNYTLNNAKKTNVTLSKKRKRRFLGFLLGVGSAIASGVAVSKVLHLEGEVNKIKSALLSTNKAVVSLSNGVSVLTSKVLDLKNYIDKQLLPIVNKQSCSISNIETVIEFQQKNNRLLEITREFSVNAGVTTPVSTYMLTNSELLSLINDMPITNDQKKLMSNNVQIVRQQSYSIMSIIKEEVLAYVVQLPLYGVIDTPCWKLHTSPLCTTNTKEGSNICLTRTDRGWYCDNAGSVSFFPQAETCKVQSNRVFCDTMNSLTLPSEVNLCNVDIFNPKYDCKIMTSKTDVSSSVITSLGAIVSCYGKTKCTASNKNRGIIKTFSNGCDYVSNKGVDTVSVGNTLYYVNKQEGKSLYVKGEPIINFYDPLVFPSDEFDASISQVNEKINQSLAFIRKSDELLHNVNAGKSTTNIMITTIIIVIIVILLSLIAVGLLLYCKARSTPFTLSKDQLSGINNIAFSN

SEQ ID NO: 8648 - protein, 574 aa, Artificial Sequence
  derived and/or modified protein sequence (wt) from HRSV__AOZ15479.1__F0
MELPILKTNAITTILAAVTLCFASSQNITEEFYQSTCSAVSKGYLSALRTGWYTSVITIELSNIKENKCNGTDAKVKLIKQELDKYKNAVTELQLLMQSTSAANSRARRELPRFMNYTLNNTKNTNVTLSKKRKRRFLGFLLGVGSAIASGIAVSKVLHLEGEVNKIKSALLSTNKAVVSLSNGVSVLTSKVLDLKNYIDKQLLPIVNKQSCSISNIETVIEFQQKNNRLLEITREFSVNAGVTTPVSTYMLTNSELLSLINDMPITNDQKKLMSSNVQIVRQQSYSIMSIIKEEVLAYVVQLPLYGVIDTPCWKLHTSPLCTTNTKEGSNICLTRTDRGWYCDNAGSVSFFPQAETCKVQSNRVFCDTMNSLTLPSEVNLCNIDIFNPKYDCKIMTSKTDVSSSVITSLGAIVSCYGKTKCTASNKNRGIIKTFSNGCDYVSNKGVDTVSVGNTLYYVNKQEGKSLYVKGEPIINFYDPLVFPSDEFDASISQVNEKINQSLAFIRKSDELLHNVNAGKSTTNIMITTIIIVIIVILLASIAVGLLLYCKARSTPVTLSKDQLSGINNIAFSN

SEQ ID NO: 8649 - protein, 574 aa, Artificial Sequence
  derived and/or modified protein sequence (wt) from HRSV__AGN28484.1__F0
MELLIHRSSAIFLTFAINALYLTSSQNITEEFYQSTCSAVSRGYLSALRTGWYTSVITIELSNIKETKCNGTDTKVKLIKQELDKYKNAVTELQLLMQNTPAANNRARREAPQYMNYTINTTKNLNVSISKKRKRRFLGFLLGVGSAIASGIAVSKVLHLEGEVNKIKNALLSTNKAVVSLSNGVSVLTSKVLDLKNYINNQLLPIVNQQSCRISNIETVIEFQQKNSRLLEITREFSVNAGVTTPLSTYMLTNSELLSLINDMPITNDQKKLMSSNVQIVRQQSYSIMSIIKEEVLAYVVQLPIYGVIDTPCWKLHTSPLCTTNIKEGSNICLTRTDRGWYCDNAGSVSFFPQADTCKVQSNRVFCDTMNSLTLPSEVSLCNTDIFNSKYDCKIMTSKTDISSSVITSLGAIVSCYGKTKCTASNKNRGIIKTFSNGCDYVSNKGVDTVSVGNTLYYVNKLEGKNLYVKGEPIINYYDPLVFPSDEFDASISQVNEKINQSLAFIRRSDELLHNVNTGKSTTNIMITAIIIVIIVVLLSLIAIGLLLYCKAKNTPVTLSKDQLSGINNIAFSK

SEQ ID NO: 8650 - protein, 574 aa, Artificial Sequence
  derived and/or modified protein sequence (wt) from HRSV__AHX57240.1__F0
MELPILKTNAITTILAAVTLCFASSQNITEEFYQSTCSAVSKGYLSALRTGWYTSVITIELSNIKENKCNGTDAKVKLIKQELDKYKNAVTELQLLMQSTPAANSRARRELPRFMNYTLNNTKNTNVTLSKKRKRRFLGFLLGVGSAIASGIAVSKVLHLEGEVNKIKSALLSTNKAVVSLSNGVSVLTSKVLDLKNYIDKQLLPIVNKQSCSISNIETVIEFQQKNNRLLEITREFSVNAGVTTPVSTYMLTNGELLSLINDMPITNDQKKLMSSNVQIVRQQSYSIMSIIKEEVLAYVVQLPLYGVIDTPCWKLHTSPLCTTNTKEGSNICLTRTDRGWYCDNAGSVSFFPQAETCKVQSNRVFCDTMNSLTLPSEVNLCNIDIFNPKYDCKIMTSKTDVSSSVITSLGAIVSCYGKTKCTASNKNRGIIKTFSNGCDYVSNKGVDTVSVGNTLYYVNKQEGKSLYVKGEPIINFYDPLVFPSDEFDASISQVNEKINQSLAFIRKSDELLYNVNAGKSTTNIMITTIIIVIIVILLALIAIGLLLYCKARSTPVTLSKDQLSGINNIAFSN

SEQ ID NO: 8651 - protein, 574 aa, Artificial Sequence
  derived and/or modified protein sequence (wt) from HRSV__AHX57031.1__F0
MELPILKTNAITTILAAVTLCFASSQNITEEFYQSTCSAVSKGYLSALRTGWYTSVITIELSNIKENKCNGTDAKVKLIKQELDKYKNAITELQLLMQSTPAANSRARRELPRFMNYTLNNTKNTNVTLSKKRKRRFLGFLLGVGSAIASGIAVSKVLHLEGEVNKIKSALLSTNKAVVSLSNGVSVLTSKVLDLKNYIDKQLLPIVNKQSCSISNIETVIEFQQKNNRLLEITREFSVNAGVTTPVSTYMLTNSELLSLINDMPITNDQKKLMSSNVQIVRQQSYSIMSIIKEEVLAYVVQLPLYGVIDTPCWKLHTSPLCTTNTKEGSNICLTRTDRGWYCDNAGSVSFFPQAETCKVQSNRVFCDTMNSLTLPSEVNLCNIDIFNPKYDCKIMTSKTDVSSSVITSLGAIVSCYGKTKCTASNKNRGIIKTFSNGCDYVSNKGVDTVSVGNTLYYVNKQEGKSLYVKGEPIINFYDPLVFPSDEFDASISQVNEKINQSLAFIRKSDELLHNVNAGKSTTNIMITTIIIVIIVILLALIAVGLLLYCKARSTPVTLSKDQLSGINNIAFSN

SEQ ID NO: 8652 - protein, 574 aa, Artificial Sequence
  derived and/or modified protein sequence (wt) from HRSV__AOS48980.1__F0
MELLIHRSSAIFLTLAINALYLTSSQNITEEFYQSTCSAVSRGYLSALRTGWYTSVITIELSNIKETKCNGTDTKVKLIKQELDKYKNAVTELQLLMQNTPAVNNRARREAPQYMNYTINTTKNLNVSISKKRKRRFLGFLLGVGSAIASGIAVSKVLHLEGEVNKIKNALQSTNKAVVSLSNGVSVLTSKVLDLKNYINNQLLPIVNQQSCRISNIETVIEFQQKNSRLLEITREFSINAGVTTPLSTYMLTNSELLSLINDMPITNDQKKLMSSNVQIVRQQSYSIMSIIKEEVLAYVVQLPIYGVIDTPCWKLHTSPLCTTNIKEGSNICLTRTDRGWYCDNAGSVSFFPQADTCKVQSNRVFCDTMNSLTLPSEVSLCNTDIFNSKYDCKIMTSKTDISSSVITSLGAIVSCYGKTKCTASNKNRGIIKTFSNGCDYVSNKGVDTVSVGNTLYYVNKLEGKNLYVKGEPIINYYDPLVFPSDEFDASISQVNEKINQSLAFIRRSDELLHNVNTGKSTTNIMITAIIIVIIVVLLSLIAIGLLLYCKAKNTPVTLSKDQLSGINNIAFSK

SEQ ID NO: 8653 - protein, 574 aa, Artificial Sequence
  derived and/or modified protein sequence (wt) from HRSV__AOS48848.1__F0
MELLIHRSSAIFLTLAINALYLTSSQNITEEFYQSTCSAVSRGYLSALRTGWYTSVITIELSNIKETKCNGTDTKVKLIKQELDKYKNAVTELQLLMQNTPAANNRARREAPQYMNYTINTTKNLNVSISKKRKRRFLGFLLGVGSAIASGIAVSKVLHLEGEVNKIKNALLSTNKAVVSLSNGVSVLTSKVLDLKNYINNQLLPIVNQQSCRISNIETVIEFQQKNSRLLEITREFSVNAGVTTPLSTYMLTNSELLSLINDMPITNDQKKLMSSNVQIVRQQSYSIMSIIKEEVLAYVVQLPIYGVIDTPCWKLHTSPLCTTNIKEGSNICLTRTDRGWYCDNAGSVSFFPQADTCKVQSNRVFCDTMNSLTLPSEVSLCNTDIFNSKYDCKIMTSKTDISSSVITSLGAIVSCYGKTKCTASNKNRGIIKTFSNGCDYVSNKGVDTVSVGNTLYYVNKLEGKNLYVKGEPIINYYDPLVFPSDEFDASISQVNEKINQSLAFIRRSDELLHNVNTGKSTTNIMITAIIIVIIVVLLSLIAIGLLLYYKAKNTPVTLSKDQLSGINNIAFSK

SEQ ID NO: 8654 - protein, 574 aa, Artificial Sequence
  derived and/or modified protein sequence (wt) from HRSV__AOS48815.1__F0
MELPILKTNAIITILAAVTLCFASSQNITEEFYQSTCSAVSKGYLSALRTGWYTSVITIELSNIKENKCNGTDAKVKLIKQELDKYKNAVTELQLLMQSTPAANNRARRELPRFMNYTLNNTKNTNVTLSKKRKRRFLGFLLGVGSAIASGIAVSKVLHLEGEVNKIKSALLSTNKAVVSLSNGVSVLTSKVLDLKNYIDKQLLPIVNKQSCSISNIETVIEFQQKNNRLLEITREFSVNAGVTTPVSTYMLTNSELLSLINDMPITNDQKKLMSSNVQIVRQQSYSIMSIIKEEVLAYVVQLPLYGVIDTPCWKLHTSPLCTTNTKEGSNICLTRTDRGWYCDNAGSVSFFPQAETCKVQSNRVFCDTMNSLTLPSEVNLCNIDIFNPKYDCKIMTSKTDVSSSVITSLGAIVSCYGKTKCTASNKNRGIIKTFSNGCDYVSNKGVDTVSVGNTLYYVNKQEGKSLYVKGEPIINFYDPLVFPSDEFDASISQVNEKINQSLAFIRKSDELLHNVNAGKSTTNIMITTIIIVIIVILLALIAVGLLLYCKARSTPVTLSKDQLSGINNIAFSN

SEQ ID NO: 8655 - protein, 574 aa, Artificial Sequence
  derived and/or modified protein sequence (wt) from HRSV__AOS48738.1__F0
MELLIHRSSAIFLNLAINALYLTSSQNITEEFYQSTCSAVSRGYLSALRTGWYTSVITIELSNIKETKCNGTDTKVKLIKQELDKYKNAVTELQLLMQNTPAVNNRARREAPQYMNYTINTTKNLNVSISKKRKRRFLGFLLGVGSAIASGIAVSKVLHLEGEVNKIKNALQLTNKAVVSLSNGVSVLTSKVLDLKNYINNQLLPIVNQQSCRISNIETVIEFQQKNSRLLEITREFSVNAGVTTPLSTYMLTNSELLSLINDMPITNDQKKLMSSNVQIVRQQSYSIMSIIKEEVLAYVVQLPIYGVIDTPCWKLHTSPLCTTNIKEGSNICLTRTDRGWYCDNAGSVSFFPQADTCKVQSNRVFCDTMNSLTLPSEVSLCNTDIFNSKYDCKIMTSKTDISSSVITSLGAIVSCYGKTKCTASNKNRGIIKTFSNGCDYVSNKGVDTVSVGNTLYYVNKLEGKNLYVKGEPIINYYDPLVFPSDEFDASISQVNEKINQSLAFIRRSDELLHNVNTGKSTTNIMITAIIIVIIVVLLSLIAIGLLLYCKAKNTPVTLSKDQLSGINNIAFSK

SEQ ID NO: 8656 - protein, 574 aa, Artificial Sequence
  derived and/or modified protein sequence (wt) from HRSV__AOS49068.1__F0
MELLIHRSSAIFLTLAINTLYLTSSQNITEEFYQSTCSAVSRGYFSALRTGWYTSVITIELSNIKETKCNGTDTKVKLIKQELDKYKNAVTELQLLMQNTPAANNRARREAPQYMNYTINTTKNLNVSISKKRKRRFLGFLLGVGSAIASGIAVSKVLHLEGEVNKIKNALLSTNKAVVSLSNGVSVLTSKVLDLKNYINNQLLPIVNQQSCRISNIETVIEFQQKNSRLLEITREFSVNAGVTTPLSTYMLTNSELLSLINDMPITNDQKKLMSSNVQIVRQQSYSIMSIIKEEVLAYVVQLPIYGVIDTPCWKLHTSPLCTTNIKEGSNICLTRTDRGWYCDNAGSVSFFPQADTCKVQSNRVFCDTMNSLTLPSEVSLCNTDIFNSKYDCKIMTSKTDISSSVITSLGAIVSCYGKTKCTASNKNRGIIKTFSNGCDYVSNKGVDTVSVGNTLYYVNKLEGKNLYVKGEPIINYYDPLVFPSDEFDASISQVNEKINQSLAFIRRSDELLHNVNTGKSTTNIMIIAIIIVIIVVLLSLIAIGLLLYCKAKNTPVTLSKDQLSGINNIAFSK

SEQ ID NO: 8657 - protein, 574 aa, Artificial Sequence
  derived and/or modified protein sequence (wt) from HRSV__AOS48727.1__F0
MELPILKTNAITTILAAVTLCFASSQNITEEFYQSTCSAVSKGYLSALRTGWYTSVITIELSNIKENKCNGTDAKVKLIKQELDKYKNAVTELQLLMQSTPAANSRARRELPRFMNYTLNNTKNTNVTLSKKRKRRFLGFLLGVGSAIASGIAVSKVLHLEGEVNKIKSALLSTNKAVVSLSNGVSVLTSKVLDLKNYIDKQLLPIVNKQSCSISNIETVIEFQQKNNRLLEITREFSVNAGVTTPVSTYMLTNSELLSLINDMPITNDQKKLMSSNVQIVRQQSYSIMSIIKEEVLAYVVQLPLYGVIDTPCWKLHTSPLCTTNTKEGSNICLTRTDRGWYCDNAGSVSFFPQAETCKVQSNRVFCDTMNSLTLPNEVNLCNIDIFNPKYDCKIMTSKTDVSSSVITSLGAIVSCYGKTKCTASNKNRGIIKTFSNGCDYVSNKGVDTVSVGNTLYYVNKQEGKSLYVKGEPIINFYDPLVFPSDEFDASISQVNEKINQSLAFIRKSDELLHNVNAGKSTTNIMITTIIIVIIVILLALIAVGLLIYCKARSTPVTLSKDQLSGINNIAFSN

SEQ ID NO: 8658 - protein, 574 aa, Artificial Sequence
  derived and/or modified protein sequence (wt) from HRSV__AOS48716.1__F0
MDLPILKTNAITAILAAVSLCFASSQNITEEFYQSTCSAVSKGYLSALRTGWYTSVITIELSNIKENKCNGTDAKVKLIKQELDKYKNAVTELQLLMQSTPAANNRARRELPRFMNYTLNNTKNNNITLSKKRKRRFLGFLLGVGSAIASGIAVSKVLHLEGEVNKIKSALLSTNKAVVSLSNGVSVLTSKVLDLKNYIDKQLLPIVNKQSCSISNIETVIEFQQKNNRLLEITREFSVNAGVTTPVSTYMLTNSELLSLINDMPITNDQKKLMSNNVQIVRQQSYSIMSIIKEEVLAYVVQLPLYGVIDTPCWKLHTSPLCTTNTKEGSNICLTRTDRGWYCDNAGSVSFFPQSETCKVQSNRVFCDTMNSLTLPSEVNLCNIDIFNPKYDCKIMTSKTDVSSSVITSLGAIVSCYGKTKCTASNKNRGIIKTFSNGCDYVSNKGVDTVSVGNTLYYVNKQEGKSLYVKGEPIINFYDPLVFPSDEFDASISQVNEKINQSLAFIRKSDELLHNVNVGKSTTNIMITTIIIVIIVILLLLIAVGLFLYCKARSTPVTLSKDQLSGINNIAFSN

SEQ ID NO: 8659 - protein, 574 aa, Artificial Sequence
  derived and/or modified protein sequence (wt) from HRSV__AOS48683.1__F0
MELLIHRSSAIFLTLTINALYLTSSQNITEEFYQSTCSAVSRGYLSALRTGWYTSVITIELSNIKETKCNGTDTKVKLIKQELDKYKNAVTELQLLMQNTPAVNNRARREAPQYMNYTINTTKNPNVSISKKRKRRFLGFLLGVGSAIASGIAVSKVLHLEGEVNKIKNALLSTNKAVVSLSNGVSVLTSKVLDLKNYINNQLLPIVNQQSCRISNIETVIEFQQKNSRLLEITREFSVNAGVTTPLSTYMLTNSELLSLINDMPITNDQKKLMSSNVQIVRQQSYSIMSIIKEEVLAYVVQLPIYGVIDTPCWKLHTSPLCTTNIKEGSNICLTRTDRGWYCDNAGSVSFFPQADTCKVQSNRVFCDTMNSLTLPSEVSLCNTDIFNSKYDCKIMTSKTDISSSVITSLGAIVSCYGKTKCTASNKNRGIIKTFSNGCDYVSNKGVDTVSVGNTLYYVNKLEGKNLYVKGEPIINYYDPLVFPSDEFDASISQVNEKINQSLAFIRRSDELLHNVNTGKSTTNIMITAIIIVIIVVLLSLIAIGLLLYCKAKNTPVTLSKDQLSGINNIAFSK

SEQ ID NO: 8660 - protein, 574 aa, Artificial Sequence
  derived and/or modified protein sequence (wt) from HRSV__AOS48551.1__F0
MELPILKTNAITTILTAVTLCFASSQNITEEFYQSTCSAVSKGYLSALRTGWYTSVITIELSNIKENKCNGTDAKVKLIKQELDKYKNAVTELQLLMQSTPAANNRARRELPRFMNYTLNNTKNTNVTLSKKRKRRFLGFLLGVGSAIASGIAVSKVLHLEGEVNKIKSALLSTNKAVVSLSNGVSVLTSKVLDLKNYIDKQLLPIVNKQSCSISNIETVIEFQQKNNRLLEITREFSVNAGVTTPVSTYMLTNSELLSLINDMPITNDQKKLMSSNVQIVRQQSYSIMSIIKEEVLAYVVQLPLYGVIDTPCWKLHTSPLCTTNTKEGSNICLTRTDRGWYCDNAGSVSFFPQAETCKVQSNRVFCDTMNSLTLPSEVNLCNIDIFNPKYDCKIMTSKTDVSSSVITSLGAIVSCYGKTKCTASNKNRGIIKTFSNGCDYVSNKGVDTVSVGNTLYYVNKQEGKSLYVKGEPIINFYDPLVFPSDEFDASISQVNEKINQSLAFIRKSDELLHNVNAGKSTTNIMITTIIIVIIVILLALIAVGLLLYCKARSTPVTLSKDQLSGINNIAFSN

SEQ ID NO: 8661 - protein, 574 aa, Artificial Sequence
  derived and/or modified protein sequence (wt) from HRSV__AOS48485.1__F0
MELLIHRSSAIFLTLAINALYLTSSQNITEEFYQSTCSAVSRGYLSALRTGWYTSVITIELSNIKETKCNGTDTKVKLIKQELDKYKNAVTELQLLMQNTPAVNNRARREAPQYMNYTINTTKNLNVSISKKRKRRFLGFLLGVGSAIASGIAVSKVLHLEGEVNKIKNALHSTNKAVVSLSNGVSVLTSKVLDLKNYINNQLLPIVNQQSCRISNIETVIEFQQKNSRLLEITREFSVNAGVTTPLSTYMLTNSELLSLINDMPITNDQKKLMSSNVQIVRQQSYSIMSIIKEEVLAYVVQLPIYGVIDTPCWKLHTSPLCTTNIKEGSNICLTRTDRGWYCDNAGSVSFFPQADTCKVQSNRVFCDTMNSLTLPSEVSLCNTDIFNSEYDCKIMTSKTDISSSVITSLGAIVSCYGKTKCTASNKNRGIIKTFSNGCDYVSNKGVDTVSVGNTLYYVNKLEGKNLYVKGEPIINYYDPLVFPSDEFDASISQVNEKINQSLAFIRRSDELLHNVNTGKSTTNIMITAIIIVIIVVLLSLIAIGLLLYCKAKNTPVTLSKDQLSGINNIAFSK

SEQ ID NO: 8662 - protein, 574 aa, Artificial Sequence
  derived and/or modified protein sequence (wt) from HRSV__AOS48518.1__F0
MELPILKTNAITTILAAVTLCFASSQNITEEFYQSTCSAVSKGYLSALRTGWYTSVITIELSNIKENKCNGTDAKVKLIKQELDKYKNAVTELQLLMQSTPAANSRARRELPRFINYTLNNTKTTNVTLSKKRKRRFLGFLLGVGSAIASGIAVSKVLHLEGEVNKIKSALLSTNKAVVSLSNGVSVLTSKVLDLKNYIDKQLLPIVNKQSCSISNIETVIEFQQKNNRLLEITREFSVNAGVTTPVSTYMLTNSELLSLINDMPITNDQKKLMSSNVQIVRQQSYSIMSIIKEEVLAYVVQLPLYGVIDTPCWKLHTSPLCTTNTKEGSNICLTRTDRGWYCDNAGSVSFFPQAETCKVQSNRVFCDTMNSLTLPSEVNLCNIDIFNPKYDCKIMTSKTDVSSSVITSLGAIVSCYGKTKCTASNKNRGIIKTFSNGCDYVSNKGVDTVSVGNTLYYVNKQEGKSLYVKGEPIINFYDPLVFPSDEFDASISQVNEKINQSLAFIRKSDELLHNVNAGKSTTNIMITTIIIVIIVILLALIAVGLLLYCKARSTPVTLSKDQLSGINNIAFSN

SEQ ID NO: 8663 - protein, 574 aa, Artificial Sequence
  derived and/or modified protein sequence (wt) from HRSV__AOS48463.1__F0
MELPILKTNAITIILAAVTLCFASSQNITEEFYQSTCSAVSKGYLSALRTGWYTSVITIELSNIKENKCNGTDAKVKLIKQELDKYKNAVTELQLLMQSTPAANSRARRELPRFMNYTLNNTKNTNVTLSKKRKRRFLGFLLGVGSAIASGIAVSKVLHLEGEVNKIKSALLSTNKAVVSLSNGVSVLTSKVLDLKNYIDKQLLPIVNKQSCSISNIETVIEFQQKNNRLLEITREFSVNAGVTTPVSTYMLTNSELLSLINDMPITNDQKKLMSSNVQIVRQQSYSIMSIIKEEVLAYVVQLPLYGVIDTPCWKLHTSPLCTTNTKEGSNICLTRTDRGWYCDNAGSVSFFPQAETCKVQSNRVFCDTMNSLTLPSEVNLCNIDIFNPKYDCKIMTSKTDVSSSVITSLGAIVSCYGKTKCTASNKNRGIIKTFSNGCDYVSNKGVDTVSVGNTLYYVNKQEGKSLYVKGEPIINFYDPLVFPSDEFDASISQVNEKINQSLAFIRKSDELLHNVNAGKSTTNIMITTIIIVIIVILLALIAVGLLLYCKARSTPVTLSKDQLSGINNIAFSN

SEQ ID NO: 8664 - protein, 574 aa, Artificial Sequence
  derived and/or modified protein sequence (wt) from HRSV__AOS48441.1__F0
MELLIHRSSAIFLTLAINTLYLTSSQNITEEFYQSTCSAVSRGYFSALRTGWYTSVITIELSNIKETKCNGTDTKVKLIKQELDKYKNAVIELQLLMQNTPAANNRARREAPQYMNYTINTTKNLNVSISKKRKRRFLGFLLGVGSAIASGIAVSKVLHLEGEVNKIKNALLSTNKAVVSLSNGVSVLTSKVLDLKNYINNQLLPIVNQQSCRISNIETVIEFQQKNSRLLEITREFSVNAGVTTPLSTYMLTNSELLSLINDMPITNDQKKLMSSNVQIVRQQSYSIMSIIKGEVLAYVVQLPIYGVIDTPCWKLHTSPLCTTNIKEGSNICLTRTDRGWYCDNAGSVSFFPQADTCKVQSNRVFCDTMNSLTLPSEVSLCNTDIFNSKYDCKIMTSKTDISSSVITSLGAIVSCYGKTKCTASNKNRGIIKTFSNGCDYVSNKGVDTVSVGNTLYYVNKLEGKNLYVKGEPIINYYDPLVFPSDEFDASISQVNEKINQSLAFIRRSDELLHNVNTGKSTTNIMITAIIIVIIVVLLSLIAIGLLLYCKAKNTPVTLSKDQLSGINNIAFSK

SEQ ID NO: 8665 - protein, 574 aa, Artificial Sequence
  derived and/or modified protein sequence (wt) from HRSV__AOS48397.1__F0
MELPILKTNAITTILAAVTLCFASSQNITEEFYQSTCSAVSKGYLSALRTGWYTSVITIELSNIKENKCNGTDAKVKLIKQELDKYKNAVTELQLLMQSTPAANSRARRELPRFMNYTLNNTKNTNVTLSKKRKRRFLGFLLGVGSAIASGIAVSKVLHLEGEVNKIKSALLSTNKAVVSLSNGVSVLTSKVLDLKNYIDKQLLPIVNKQSCSISNIETVIEFQQKNNRLLEITREFSVNAGVTTPVSTYMLTNSELLSLINDMPITNDQKKLMSSNVQIVRQQSYSIMSIIKEEVLAYVVQLPLYGVIDTPCWKLHTSPLCTTNTKDGSNICLTRTDRGWYCDNAGSVSFFPQAETCKVQSNRVFCDTMNSLTLPSEVNLCNIDIFNPKYDCKIMTSKTDVSSSVITSLGAIVSCYGKTKCTASNKNRGIIKTFSNGCDYVSNKGVDTVSVGNTLYYVNKQEGKSLYVKGEPIINFYDPLVFPSDEFDASISQVNEKINQSLAFIRKSDELLHNVNAGKSTTNIMITTIIIVIIVILLALIAVGLLLYCKARSTPVTLSKDQLSGINNIAFSN

SEQ ID NO: 8666 - protein, 574 aa, Artificial Sequence
  derived and/or modified protein sequence (wt) from HRSV__AOS48375.1__F0
MELPILKTNAITTILAAVTLCFASSQNITEEFYQSTCSAVSKGYLSALRTGWYTSVITIELSNIKENKCNGTDAKVKLIKQELDKYKNAVTELQLLMQSTPAANSRARRELPRFINYTLNNTKTTNVTLSKKRKRRFLGFLLGVGSAIASGIAVSKVLHLEGEVNKIKSALLSTNKAVVSLSNGVSVLTSKVLDLKNYIDKQLLPIVNKQSCSISNIETVIEFQQKNNRLLEITREFSVNAGVTTPVSTYMLTNSELLSLINDMPITNDQKKLMSSNVQIVRQQSYSIMSIIKEEVLAYVVQLPLYGVIDTPCWKLHTSPLCTTNTKEGSNICLTRTDRGWYCDNAGSVSFFPQAETCKVQSNRVFCDTMNSLTLPSEVNLCNIDIFNPKYDCKIMTSKTDVSSSVITSLGAIVSCYGKTKCTASNKNRGIIKTFSNGCDYVSNKGVDTVSVGNTLYYVNKLEGKSLYVKGEPIINFYDPLVFPSDEFDASISQVNEKINQSLAFIRKSDELLHNVNAGKSTTNIMITTIIIVIIVILLALIAVGLLLYCKARSTPVTLSKDQLSGINNIAFSN

SEQ ID NO: 8667 - protein, 574 aa, Artificial Sequence
  derived and/or modified protein sequence (wt) from HRSV__AOS48353.1__F0
MELLIHRSSAIFLTFAINALYLTSSQNITEEFYQSTCSAVSRGYFSALRTGWYTSVITIELSNIKETKCNGTDTKVKLIKQELDKYKNAVTELQLLMQNTPAANNRARREAPQYMNYTINTTKNLNVSISKKRKRRFLGFLLGVGSAIASGIAVSKVLHLEGEVNKIKNALLSTNKAVVSLSNGVSVLTSKVLDLKNYINKQLLPIVNQQSCRISNIETVIEFQQKNSRLLEITREFSVNAGVTTPLSTYMLTNSELLSLINDMPITNDQKKLMSSNVQIVRQQSYSIMSIIKEEVLAYVVQLPIYGVIDTPCWKLHTSPLCTTNIKEGSNICLTRTDRGWYCDNAGSVSFFPQADTCKVQSNRVFCDTMNSLTLPSEVSLCNTDIFNSKYDCKIMTSKTDISSSVITSLGAIVSCYGKTKCTASNKNRGIIKTFSNGCDYVSNKGVDTVSVGNTLYYVNKLEGKNLYVKGEPIINYYDPLVFPSDEFDASISQVNEKINQSLAFIRRSDELLHNVNTGKSTTNIMITAIIIVIIVVLLSLIAIGLLLYCKAKNTPVTLSKDQLSGINNIAFSK

SEQ ID NO: 8668 - protein, 574 aa, Artificial Sequence
  derived and/or modified protein sequence (wt) from HRSV__AOS48287.1__F0
MELPILKTNAITTILAAVTLCFASSQNITEEFYQSTCSAVSKGYLSALRTGWYTSVITIELSNIKENKCNGTDAKVKLIKQELDKYKNAVTELQLLMQSTPAANSRARRELPRFMNYTLNNTKNTNVTLSKKRKRRFLGFLLGIGSAIASGIAVSKVLHLEGEVNKIKSALLSTNKAVVSLSNGVSVLTSKVLDLKNYIDKQLLPIVNKQSCSISNIETVIEFQQKNNRLLEITREFSVNAGVTTPVSTYMLTNSELLSLINDMPITNDQKKLMSSNVQIVRQQSYSIMSIIKEEVLAYVVQLPLYGVIDTPCWKLHTSPLCTTNTKEGSNICLTRTDRGWYCDNAGSVSFFPQAETCKVQSNRVFCDTMNSLTLPSEVNLCNIDIFNPKYDCKIMTSKTDVSSSVITSLGAIVSCYGKTKCTASNKNRGIIKTFSNGCDYVSNKGVDTVSVGNTLYYVNKQEGKSLYVKGEPIINFYDPLVFPSDEFDASISQVNEKINQSLAFIRKSDELLHNVNAGKSTTNIIITTIIIVIIVILLALIAVGLLLYCKARSTPVTLSKDQLSGINNIAFSN

SEQ ID NO: 8669 - protein, 574 aa, Artificial Sequence
  derived and/or modified protein sequence (wt) from HRSV__AOS48320.1__F0
MELLIHRSSAIFLTLAINALYLTSSQNITEEFYQSTCSAVSRGYLSALRTGWYTSVITIELSNIKETKCNGTDTKVKLIKQELDKYKNAVTELQLLMQNTPAVNNRARREAPQYINYTINTTKNLNVSISKKRKRRFLGFLLGVGSAIASGIAVSKVLHLEGEVNKIKNALQSTNKAVVSLSNGVSVLTSKVLDLKNYINNQLLPIVNQQSCRISNIETVIEFQQKNSRLLEITREFSVNAGVTTPLSTYMLTNSELLSLINDMPITNDQKKLMSSNVQIVRQQSYSIMSIIKEEVLAYVVQLPIYGVIDTPCWKLHTSPLCTTNIKEGSNICLTRTDRGWYCDNAGSVSFFPQADTCKVQSNRVFCDTMNSLTLPSEVSLCNTDIFNSKYDCKIMTSKTDISSSVITSLGAIVSCYGKTKCTASNKNRGIIKTFSNGCDYVSNKGVDTVSVGNTLYYVNKLEGKNLYVKGEPIINYYDPLVFPSDEFDASISQVNEKINQSLAFIRRSDELLHNVNTGKSTTNIMITAIIIVIIVVLLSLIAIGLLLYCKAKNTPVTLSKDQLSGINNIAFSK

SEQ ID NO: 8670 - protein, 574 aa, Artificial Sequence
  derived and/or modified protein sequence (wt) from HRSV__AOS48265.1__F0
MELLIHRSSAIFLTLAINALYLTSSQNITEEFYQSTCSAVSRGYLSALRTGWYTSVITIELSNIKETKCNGTDTKVKLIKQELDKYKNAVTELQLLMQNTPAVNNRARREAPQYMNYTINTTKNLNVSISKKRKRRFLGFLLGVGSAIASGIAVSKVLHLEGEVNKIKNALQSTNKAVVSLSNGVSVLTSKVLDLKNYINSQLLPIVNKQSCRISNIETVIEFQQKNSRLLEITREFSVNAGVTTPLSTYMLTNSELLSLINDMPITNDQKKLMSSNVQIVRQQSYSIMSIIKEEVLAYVVQLPIYGVIDTPCWKLHTSPLCTTNIKEGSNICLTRTDRGWYCDNAGSVSFFPQADTCKVQSNRVFCDTMNSLTLPSEVSLCNTDIFNSKYDCKIMTSKTDISSSVITSLGAIVSCYGKTKCTASNKNRGIIKTFSNGCDYVSNKGVDTVSVGNTLYYVNKLEGKNLYVKGEPIINYYDPLVFPSDEFDASISQVNEKINQSLAFIRRSDELLHNVNTGKSTTNIMITAIIIVIIVVLLSLIAIGLLLYCKAKNTPVTLSKDQLSGINNIAFSK

SEQ ID NO: 8671 - protein, 574 aa, Artificial Sequence
  derived and/or modified protein sequence (wt) from HRSV__AOS48254.1__F0
MDLPILKTNAITAILAAVSLCFASSQNITEEFYQSTCSAVSKGYLSALRTGWYTSVITIELSNIKENKCNGTDAKVKLIKQELDKYKNAVTELQLLMQSTPAANNRARRELPRFMNYTFNNTKNNNVTLSKKRKRRFLGFLLGVGSAIASGIAVSKVLHLEGEVNKIKSALLSTNKAVVSLSNGVSVLTSKVLDLKNYIDKQLLPIVNKQSCSISNIETVIEFQQKNNRLLEITREFSVNAGVTTPVSTYMLTNSELLSLINDMPITNDQKKLMSNNVQIVRQQSYSIMSIIKEEVLAYVVQLPLYGVIDTPCWKLHTSPLCTTNTKEGSNICLTRTDRGWYCDNAGSVSFFPQAETCKVQSNRVFCDTMNSLTLPSEVNLCNIDIFNPKYDCKIMTSKTDVSSSVITSLGAIVSCYGKTKCTASNKNRGIIKTFSNGCDYVSNKGVDTVSVGNTLYYVNKQEGKSLYVKGEPIINFYDPLVFPSDEFDASISQVNEKINQSLAFIRKSDELLHNVNVGKSTTNIMITTIIIVIIVILLLLIAVGLFLYCKARSTPVTLSKDQLSGINNIAFSN

SEQ ID NO: 8672 - protein, 574 aa, Artificial Sequence
  derived and/or modified protein sequence (wt) from HRSV__AOS48221.1__F0
MELLIRRSSAIFLTLAINTLYLTSSQNITEEFYQSTCSAVSRGYFSALRTGWYTSVITIELSNIKETKCNGTDTKVKLIKQELDKYKNAVTELQLLMQNTPAANNRARREAPQYMNYTINTTKNPNASISKKRKRRFLGFLLGVGSAIASGIAVSKVLHLEGEVNKIKNALLSTNKAVVSLSNGVSVLTSKVLDLKNYINNQLLPIVNQQSCRISNIETVIEFQQKNSRLLEITREFSVNAGVTTPLSTYMLTNSELLSLINDMPITNDQKKLMSSNVQIVRQQSYSIMSIIKEEVLAYVVQLPIYGVIDTPCWKLHTSPLCTTNIKEGSNICLTRTDRGWYCDNAGSVSFFPQADTCKVQSNRVFCDTMNSLTLPSEVSLCNTDIFNSKYDCKIMTSKTDISSSVITSLGAIVSCYGKTKCTASNKNRGIIKTFSNGCDYVSNKGVDTVSVGNTLYYVNKLEGKNLYVKGEPIINYYDPLVFPSDEFDASISQVNEKINQSLAFIHRSDELLHNVNTGKSTTNIMITAIIIVIIVVLLSLIAIGLLLYCKAKNTPVTLSKDQLSGINNIAFSK

SEQ ID NO: 8673 - protein, 574 aa, Artificial Sequence
  derived and/or modified protein sequence (wt) from HRSV__ANZ79638.1__F0
MELPILKTNAITTILAAVTLCFASSQNITEEFYQSTCSAVSKGYLSALRTGWYTSVITIELSNIKENKCNGTDAKVKLIKQELDKYKNAVTELQLLMQSTPAANSRARRELPRFMNYTLNNTKNTNVTLSKKRKRRFLGFLLGVGSAIASGIAVSKVLHLEGEVNKIKSALLSTNKAVVSLSNGVSVLTSKVLDLKNYIDKQLLPIVNKQSCSISNIETVIEFQQKNNRLLEITREFSVNAGVTTPVSTYMLTNSELLSLINDMPITNDQKKLMSSNVQIVRQQSYSIMSIIKEEVLAYVVQLPLYGVIDTPCWKLHTSPLCTTNTKEGSNICLTRTDRGWYCDNAGSVSFFPQAETCKVQSNRVFCDTMNSLTLPSEVNLCNIDIFNPKYDCKIMTSKTDVSSSVITSLGAIVSCYGKTKCTASNKNRGIIKTFSNGCDYVSNKGVDTVSVGNTLYYVNKQEGKSLYVKGEPIINFYDPLVFPSDEFDASISQVNEKINQSLAFIRKSDELLHNVNAGKSTTNIMMTTIIIVIIVILLALIAVGLLLYCKARSTPVTLSKDQLSGINNIAFSN

SEQ ID NO: 8674 - protein, 574 aa, Artificial Sequence
  derived and/or modified protein sequence (wt) from HRSV__ALC74025.1__F0
MELLIHRSSAIFLTLAINALYLTSSQNITEEFYQSTCSAVSRGYLSALRTGWYTSVITIELSNIKETKCNGTDTKVKLIKQELDKYKNAVTELQLLMQNTPAVNNRARREAPQYMNYTINTTKNPNVSISKKRKRRFLGFLLGVGSAIASGIAVSKVLHLEGEVNKIKNALLSTNKAVVSLSNGVSVLTSKVLDLKNYINNQLLPIVNQQSCRISNIETVIEFQQKNSRLLEITREFSVNAGVTTPLSTYMLTNSELLSLINDMPITNDQKKLMSSNVQIVRQQSYSIMSIIKEEVLAYVVQLPIYGVIDTPCWKLHTSPLCTTNIKEGSNICLTRTDRGWYCDNAGSVSFFPQADTCKVQSNRVFCDTMNSLTLPSEVSLCNTDIFNSKYDCKIMTSKTDISSSVITSLGAIVSCYGKTKCTASNKNRGIIKTFSNGCDYVSNKGVDTVSVGNTLYYVNKLEGKNLYVKGEPIINYYDPLVFPSDEFDASISQVNEKINQSLAFIRRSDELLHNVNTGKSTTNIMITAIIIVIIVVLLSLIAIGLLLYCKAKNTPVTLSKDQLSGINNIAFSK

SEQ ID NO: 8675 - protein, 574 aa, Artificial Sequence
  derived and/or modified protein sequence (wt) from HRSV__AJZ69825.1__F0
MELPILKTNAITTILAAVTLCFASSQNITEEFYQSTCSAVSKGYLSALRTGWYTSVITIELSNIKENKCNGTDAKVKLIKQELDKYKNAVTELQLLMQSTPAANSRARRELPRFMNYTLNNTKNTNVTLSKKRKRRFLGFLLGVGSAIASGIAVSKVLHLEGEVNKIKSALLSTNKAVVSLSNGVSVLTSKVLDLKNYIDKQLLPIVNKQSCSISNIETVIEFQQKNNRLLEITREFSVNAGVTTPVSTYMLTNSELLSLINDMPITNDQKKLMSSNVQIVRQQSYSIMSIIKEEVLAYVVQLPLYGVIDTPCWKLHTSPLCTTNTKEGSNICLTRTDRGWYCDNAGSVSFFPQAETCKVQSNRVFCDTMNSLTLPSEVNLCNIDIFNPKYDCKIMTSKTDVSSSVITSLGAIVSCYGKTKCTASNKNRGIIKTFSNGCDYVSNKGVDTVSVGNTLYYVNKQEGKSLYVKGEPIINFYDPLVFPSDEFDASISQVNEKINQSLAFIRKSDELLHNVNAGKSTTNIMITTIIIVIIVILLALIAVGLLLYCKARNTPVTLSKDQLSGINNIAFSN

SEQ ID NO: 8676 - protein, 574 aa, Artificial Sequence
  derived and/or modified protein sequence (wt) from HRSV__AHV81286.1__F0
MELPILKTNAITTIFAAVTLCFASSQNITEEFYQSTCSAVSKGYLSALRTGWYTSVITIELSNIKENKCNGTDAKVKLIKQELDKYKNAVTELQLLMQSTPAANSRARRELPRFMNYTLNNTKNTNVTLSKKRKRRFLGFLLGVGSAIASGIAVSKVLHLEGEVNKIKSALLSTNKAVVSLSNGVSVLTSKVLDLKNYIDKQLLPIVNKQSCSISNIETVIEFQQKNNRLLEITREFSVNAGVTTPVSTYMLTNSELLSLINDMPITNDQKKLMSSNVQIVRQQSYSIMSIIKEEVLAYVVQLPLYGVIDTPCWKLHTSPLCTTNTKEGSNICLTRTDRGWYCDNAGSVSFFPQAETCKVQSNRVFCDTMNSLTLPSEVNLCNIDIFNPKYDCKIMTSKTDVSSSVITSLGAIVSCYGKTKCTASNKNRGIIKTFSNGCDYVSNKGVDTVSVGNTLYYVNKQEGKSLYVKGEPIINFYDPLVFPSDEFDASISQVNEKINQSLAFIRKSDELLHNVNAGKSTTNIMITTIIIVIIVILLALIAVGLLLYCKARSTPVTLSKDQLSGINNIAFSN

SEQ ID NO: 8677 - protein, 574 aa, Artificial Sequence
  derived and/or modified protein sequence (wt) from HRSV__AOD40516.1__F0
MELPILKTNAITTILAAVTLCFASSQNITEEFYQSTCSAVSKGYLSALRTGWYTSVITIELSNIKENKCNGTDAKVKLIKQELDKYKNAVTELQLLMQSTPAANSRARRELPRFMDYTLNNTKNTNVTLSKKRKRRFLGFLLGVGSAIASGIAVSKVLHLEGEVNKIKSALLSTNKAVVSLSNGVSVLTSKVLDLKNYIDKQLLPIVNKQSCSISNIETVIEFQQKNNRLLEITREFSVNAGVTTPVSTYMLTNSELLSLINDMPITNDQKKLMSSNVQIVRQQSYSIMSIIKEEVLAYVVQLPLYGVIDTPCWKLHTSPLCTTNTKEGSNICLTRTDRGWYCDNAGSVSFFPQAETCKVQSNRVFCDTMNSLTLPSEVNLCNIDIFNPKYDCKIMTSKTDVSSSVITSLGAIVSCYGKTKCTASNKNRGIIKTFSNGCDYVSNKGVDTVSVGNTLYYVNKQEGKSLYVKGEPIINFYDPLVFPSDEFDASISQVNEKINQSLAFIRKSDELLHNANAGKSTTNIMITTIIIVIIVILLALIAVGLLLYCKARSTPVTLSKDQLSGINNIAFSN

SEQ ID NO: 8678 - protein, 574 aa, Artificial Sequence
  derived and/or modified protein sequence (wt) from HRSV__AOD40125.1__F0
MELPILKTNAITTILAAVTLCFASSQNITEEFYQSTCSAVSKGYLSALRTGWYTSVITVELSNIKENKCNGTDAKVKLIKQELDKYKNAVTELQLLMQSTPAANSRARRELPRSMDYTLNNTKNTNVTLSKKRKRRFLGFLLGVGSAIASGIAVSKVLHLEGEVNKIKSALLSTNKAVVSLSNGVSVLTSKVLDLKNYIDKQLLPIVNKQSCSISNIETVIEFQQKNNRLLEITREFSVNAGVTTPVSTYMLTNSELLSLINDMPITNDQKKLMSSNVQIVRQQSYSIMSIIKEEVLAYVVQLPLYGVIDTPCWKLHTSPLCTTNTKEGSNICLTRTDRGWYCDNAGSVSFFPQAETCKVQSNRVFCDTMNSLTLPSEVNLCNIDIFNPKYDCKIMTSKTDVSSSVITSLGAIVSCYGKTKCTASNKNRGIIKTFSNGCDYVSNKGVDTVSVGNTLYYVNKQEGKSLYVKGEPIINFYDPLVFPSDEFDASISQVNEKINQSLAFIRKSDELLHNVNAGKSTTNIMITTIIIVIIVILLALIAVGLLLYCKARSTPVTLSKDQLSGINNIAFSN

SEQ ID NO: 8679 - protein, 574 aa, Artificial Sequence
  derived and/or modified protein sequence (wt) from HRSV__AOD40104.1__F0
MELPILKTNAITTILAAVTLCFASSQNITEEFYQSTCSAVSKGYLSALRTGWYTSVITIELSNIKENKCNGTDAKVKLIKQELDKYKNAVTELQLLMQSTPAANSRARRELPRFMDYTLNNTKNTNVTLGKKRKRRFLGFLLGVGSAIASGIAVSKVLHLEGEVNKIKSALLSTNKAVVSLSNGVSVLTSKVLDLKNYIDKQLLPIVNKQSCSISNIETVIEFQQKNNRLLEITREFSVNAGVTTPVSTYMLTNSELLSLINDMPITNDQKKLMSSNVQIVRQQSYSIMSIIKEEVLAYVVQLPLYGVIDTPCWKLHTSPLCTTNTKEGSNICLTRTDRGWYCDNAGSVSFFPQAETCKVQSNRVFCDTMNSLTLPSEVNLCNIDIFNPKYDCKIMTSKTDVSSSVITSLGAIVSCYGKTKCTASNKNRGIIKTFSNGCDYVSNKGVDTVSVGNTLYYVNKQEGKSLYVKGEPIINFYDPLVFPSDEFDASISQVNEKINQSLAFIRKSDELLHNVNAGKSTTNIMITIIIIVIIVILLALIAVGLLLYCKARSTPVTLSKDQLSGINNIAFSN

SEQ ID NO: 8680 - protein, 574 aa, Artificial Sequence
  derived and/or modified protein sequence (wt) from HRSV__AOD40082.1__F0
MELPILKTNAITTILAAVTLCFASSQNITEEFYQSTCSAVSKGYLSALRTGWYTSVITIELSNIKENKCNGTDAKVKLIKQELDKYKNAVTELQLLMQSTPAANSRARRELPRFMDYTLNNTKNTNVTLGKKRKRRFLGFLLGVGSAIASGIAVSKVLHLEGEVNKIKSALLSTNKAVVSLSNGVSVLTSKVLDLKNYIDKQLLPIVNKQSCSISNIETVIEFQQKNNRLLEITREFSVNAGVTTPVSTYMLTNSELLSLINDMPITNDQKKLMSSNVQIVRQQSYSIMSIIKEEVLAYVVQLPLYGVIDTPCWKLHTSPLCTTNTKEGSNICLTRTDRGWYCDNAGSVSFFPQAETCKVQSNRVFCDTMNSLTLPSEVNLCNIDIFNPKYDCKIMTSKTDVSSSVITSLGAIVSCYGKTKCTASNKNRGIIKTFSNGCDYVSNKGVDTVSVGNTLYYVNKQEGKSLYVKGEPIINFYDPLVFPSDEFDASISQVNEKINQSLAFIRKSDELLHNVNAGKSTTNIMITTIIIVIIVILLALIAVGLLLYCKARSTPVTLSKDQLSGINNIAFSN

SEQ ID NO: 8681 - protein, 574 aa, Artificial Sequence
  derived and/or modified protein sequence (wt) from HRSV__AOD39908.1__F0
MELPILKTNAITTILAAVTLCFASSQNITEEFYQSTCSAVSKGYLSALRTGWYTSVITIELSNIKENKCNGTDAKVKLIKQELDKYKNAVTELQLLMQSTPAANSRARRELPRFMDYTLNNTKNTNVTLSKKRKRRFLGFLLGVGSAIASGIAVSKVLHLEGEVNKIKSALLSTNKAVVSLSNGVSVLTSKVLDLKNYIDKQLLPIVNKQSCSISNIETVIEFQQKNNRLLEITREFSVNAGVTTPVSTYMLTNSELLSLINDMPITNDQKKLMSSNVQIVRQQSYSIMSIIKEEVLAYVVQLPLYGVIDTPCWKLHTSPLCTTNTKEGSNICLTRTDRGWYCDNAGSVSFFPQAETCKVQSNRVFCDTMNSLTLPSEVNLCNIDIFNPKYDCKIMTSKTDVSSSVITSLGAIVSCYGKTKCTASNKNRGIIKTFSNGCDYVSNKGVDTVSVGNTLYYVNKQEGKSLYVKGEPIINFYDPLVFPSDEFDASISQVNEKINQSLAFIRKSDELLHNVNAGKSTTNIMITIIIIVIIVILLALIAVGLLLYCKARSTPVTLSKDQLSGINNIAFSN

SEQ ID NO: 8682 - protein, 574 aa, Artificial Sequence
  derived and/or modified protein sequence (wt) from HRSV__AJF44826.1__F0
MELPILKTNAITTILAAVTLCFASSQNITEEFYQSTCSAVSKGYLSALRTGWYTSVITIELSNIKENKCNGTDAKVKLIKQELDKYKNAVTELQLLMQSTPAANSRARRELPRFMDYTPNNTKNTNVTLGKKRKRRFLGFLLGVGSAIASGIAVSKVLHLEGEVNKIKSALLSTNKAVVSLSNGVSVLTSKVLDLKNYIDKQLLPIVNKQSCSISNIETVIEFQQKNNRLLEITREFSVNAGVTTPVSTYMLTNSELLSLINDMPITNDQKKLMSSNVQIVRQQSYSIMSIIKEEVLAYVVQLPLYGVIDTPCWKLHTSPLCTTNTKEGSNICLTRTDRGWYCDNAGSVSFFPQAETCKVQSNRVFCDTMNSLTLPSEVNLCNIDIFNPKYDCKIMTSKTDVSSSVITSLGAIVSCYGKTKCTASNKNRGIIKTFSNGCDYVSNKGVDTVSVGNTLYYVNKQEGKSLYVKGEPIINFYDPLVFPSDEFDASISQVNEKINQSLAFIRKSDELLHNVNAGKSTTNIMITIIIIVIIVILLALIAVGLLLYCKARSTPVTLSKDQLSGINNIAFSN

SEQ ID NO: 8683 - protein, 574 aa, Artificial Sequence
  derived and/or modified protein sequence (wt) from HRSV__AJF44506.1__F0
MELPILKTNAITTILAAVTLCFASSQNITEEFYQSTCSAVSKGYLSALRTGWYTSVITIELSNIKENKCNGTDAKVKLIKQELDKYKNAVTELQLLMQSTPAANSRARRELPRSMDYTLNNTKNTNVTLSKKRKRRFLGFLLGVGSAIASGIAVSKVLHLEGEVNKIKSALLSTNKAVVSLSNGVSVLTSKVLDLKNYIDKQLLPIVNKQSCSISNIETVIEFQQKNNRLLEITREFSVNAGVTTPVSTYMLTNSELLSLINDMPITNDQKKLMSSNVQIVRQQSYSIMSIIKEEVLAYVVQLPLYGVIDTPCWKLHTSPLCTTNTKEGSNICLTRTDRGWYCDNAGSVSFFPQAETCKVQSNRVFCDTMNSLTLPSEVNLCNIDIFNPKYDCKIMTSKTDVSSSVITSLGAIVSCYGKTKCTASNKNRGIIKTFSNGCDYVSNKGVDTVSVGNTLYYVNKQEGKSLYVKGEPIINFYDPLVFPSDEFDASISQVNEKINQSLAFIRKSDELLHNVNAGKSTTNIMITTIIIVIIVILLALIAVGLLLYCKARSTPVTLSKDQLSGINNIAFSN

SEQ ID NO: 8684 - protein, 574 aa, Artificial Sequence
  derived and/or modified protein sequence (wt) from HRSV__AJF44535.1__F0
MELPILKTNAITTILAAVTLCFASSQNITEEFYQSTCSAVSKGYLSALRTGWYTSVITIELSNIKENKCNGTDAKVKLIKQELDKYKNAVTELQLLMQSTPAANSRARRELPRFMDYTLNNTKNTNVTLSKKRKRRFLGFLLGVGSAIASGIAVSKVLHLEGEVNKIKSALLSTNKAVVSLSNGVSVLTSKVLDLKNYIDKQLLPIVNKQSCSISNIETVIEFQQKNNRLLEITREFSVNAGVTTPVSTYMLTNSELLSLINDMPITNDQKKLMSSNVQIVRQQSYSIMSIIKEEVLAYVVQLPLYGVIDTPCWKLHTSPLCTTNTKEGSNICLTRTDRGWYCDNAGSVSFFPQAETCKVQSNRVFCDTMNSLTLPSEVNLCNIDIFNPKYDCKIMTSKTDVSSSVITSLGAIVSCYGKTKCTASNKNRGIIKTFSNGCDYVSNKGVDTVSVGNTLYYVNKQEGKSLYVKGEPIINFYDPLVFPSDEFDASISQVNEKINQSLAFIRKSDELLHNVNAGKSTTNIMITTIIIVIIVILLALIAVGLLLYCKARSTPVTLSKDQLSGINNIAFSN

SEQ ID NO: 8685 - protein, 574 aa, Artificial Sequence
  derived and/or modified protein sequence (wt) from HRSV__ANZ80463.1__F0
MELPILKTNAITTILAAVTLCFASSQNITEEFYQSTCSAVSKGYLSALRTGWYTSVITIELSNIKENKCNGTDAKVKLIKQELDKYKNAVTELQLLMQSTPATNSRARRELPRFMNYTLNDTKNTNVTLSKKRKRRFLGFLLGVGSAIASGIAVSKVLHLEGEVNKIKSALLSTNKAVVSLSNGVSVLTSKVLDLKNYIDKQLLPIVNKQSCSISNIETVIEFQQKNNRLLEITREFSVNAGVTTPVSTYMLTNSELLSLINDMPITNDQKKLMSSNVQIVRQQSYSIMSIIKEEVLAYVVQLPLYGVIDTPCWKLHTSPLCTTNTKEGSNICLTRTDRGWYCDNAGSVSFFPQAETCKVQSNRVFCDTMNSLTLPSEVNLCNIDIFNPKYDCKIMTSKTDVSSSVITSLGAIVSCYGKTKCTASNKNRGIIKTFSNGCDYVSNKGVDTVSVGNTLYYVNKQEGKSLYVKGEPIINFYDPLVFPSDEFDASISQVNEKINQSLAFIRKSDELLHNVNAGKSTTNIMITTIIIVIIVILLALIAVGLLLYCKARSTPVTLSKDQLSGINNIAFSN

SEQ ID NO: 8686 - protein, 574 aa, Artificial Sequence
  derived and/or modified protein sequence (wt) from HRSV__ANZ80408.1__F0
MELLIHRSSAIFLTLAINALYLTSSQNITEEFYQSTCSAVSRGYLSALRTGWYTSVITIELSNIKETKCNGTDTKVKLIKQELDKYKNAVTELQLLMQNTPAANNRARREAPQYMNYTIKTTKNLNVSISKKRKRRFLGFLLGVGSAIASGIAVSKVLHLEGEVNKIKNALLSTNKAVVSLSNGVSVLTSKVLDLKNYINNQLLPIVNQQSCRISNIETVIEFQQKNSRLLEITREFSVNAGVTTPLSTYMLTNSELLSLINDMPITNDQKKLMSSNVQIVRQQSYSIMSIIKEEVLAYVVQLPIYGVIDTPCWKLHTSPLCTTNIKEGSNICLTRTDRGWYCDNAGSVSFFPQADTCKVQSNRVFCDTMNSLTLPSEVSLCNTDIFNSKYDCKIMTSKTDISSSVITSLGAIVSCYGKTKCTASNKNRGIIKTFSNGCDYVSNKGVDTVSVGNTLYYVNKLEGKNLYVKGEPIINYYDPLVFPSDEFDASISQVNEKINQSLAFIRRSDELLHNVNTGKSTTNIIITAIIIVIIVVLLSLIAIGLLLYCKAKNTPVTLSKDQLSGINNIAFSK

SEQ ID NO: 8687 - protein, 574 aa, Artificial Sequence
  derived and/or modified protein sequence (wt) from HRSV__ANZ80397.1__F0
MELLIHRSSAIFLTLAINTLYLTSSQNITEEFYQSTCSAVSRGYFSALRTGWYTSVITIELSNIKETKCNGTDTKVKLIKQELDKYKNAVTELQLLMQNTPAANNRARREAPQYMNHTINTTKNLNVSISKKRKRRFLGFLLGVGSAIASGIAVSKVLHLEGEVNKIKNALLSTNKAVVSLSNGVSVLTSKVLDLKNYINNQLLPIVNQQSCRISNIETVIEFQQKNSRLLEITREFSVNAGVTTPLSTYMLTNSELLSLINDMPITNDQKKLMSSNVQIVRQQSYSIMSIIKEEVLAYVVQLPIYGVIDTPCWKLHTSPLCTTNIKEGSNICLTRTDRGWYCDNAGSVSFFPQADTCKVQSNRVFCDTMNSLTLPSEVSLCNTDIFNSKYDCKIMTSKTDISSSVITSLGAIVSCYGKTKCTASNKNRGIIKTFSNGCDYVSNKGVDTVSVGNTLYYVNKLDGKNLYVKGEPIINYYDPLVFPSDEFDASISQVNEKINQSLAFIRRSDELLHNVNTGKSTTNIMITAIIIVIIVVLLSLIAIGLLLYCKAKNTPVTLSKDQLSGINNIAFSK

SEQ ID NO: 8688 - protein, 574 aa, Artificial Sequence
  derived and/or modified protein sequence (wt) from HRSV__ANZ80386.1__F0
MELLIHRSSAIFLTLAINTLYLTSSQNITEEFYQSTCSAVSRGYLSALRTGWYTSVITIELSNIKETKCNGTDTKVKLIKQELDKYKNAVTELQLLMQNTPAANNRARREAPQYMNYTINTTKNLNASISKKRKRRFLGFLLGVGSAIASGIAVSKVLHLEGEVNKIKNALLSTNKAVVSLSNGVSVLTSKVLDLKNYINNQLLPIVNQQSCRISNIETVIEFQQKNSRLLEITREFSVNAGVTTPLSTYMLTNSELLSLINDMPITNDQKKLMSSNVQIVRQQSYSIMSIIKEEVLAYVVQLPIYGVIDTPCWKLHTSPLCTTNIKEGSNICLTRTDRGWYCDNAGSVSFFPQADTCKVQSNRVFCDTMNSLTLPSEVSLCNTDIFNSKYDCKIMTSKTDISSSVITSLGAIVSCYGKTKCTASNKNRGIIKTFSNGCDYVSNKGVDTVSVGNTLYYVNKLEGKNLYVKGEPIINYYDPLVFPSDEFDASISQVNEKINQSLAFIRRSDELLHNVNTGKSTTNIMITAIIIVIIVVLLSLIAIGLLLYCKAKNTPVTLSKDQLSGINNIAFSK

SEQ ID NO: 8689 - protein, 574 aa, Artificial Sequence
  derived and/or modified protein sequence (wt) from HRSV__ANZ80331.1__F0
MELPILKTNAIITILAAVTLCFASSQNITEEFYQSTCSAVSKGYLSALRTGWYTSVITIELSNIKENKCNGTDAKVKLIKQELDKYKNAVTELQLLMQSTPAANSRARRELPRFMNYTLNNTKNTNVTLSKKRKRRFLGFLLGVGSAIASGIAVSKVLHLEGEVNKIKSALLSTNKAVVSLSNGVSVLTSKVLDLKNYIDKQLLPIVNKQSCSISNIETVIEFQQKNNRLLEITREFSVNAGVTTPVSTYMLTNSELLSLINDMPITNDQKKLMSSNVQIVRQQSYSIMSIIKEEVLAYVVQIPLYGVIDTPCWKLHTSPLCTTNTKEGSNICLTRTDRGWYCDNAGSVSFFPQAETCKVQSNRVFCDTMNSLTLPSEVNLCNIDIFNPKYDCKIMTSKTDVSSSVITSLGAIVSCYGKTKCTASNKNRGIIKTFSNGCDYVSNKGVDTVSVGNTLYYVNKQEGKSLYVKGEPIINFYDPLVFPSDEFDASISQVNEKINQSLAFIRKSDELLHNVNAGKSTTNIMITTIIIVIIVILLALIAVGLLLYCKARSTPVTLSKDQLSGINNIAFSN

SEQ ID NO: 8690 - protein, 574 aa, Artificial Sequence
  derived and/or modified protein sequence (wt) from HRSV__ANZ80320.1__F0
MELPILKTNAITTILAAVTLCFASSQNITEEFYQSTCSAVSKGYLSALRTGWYTSVITIELSNIKENKCNGTDAKVKLIKQELDKYKNAVTELQLLMQSTPAANSRARRELPRFMNYTLNYTKNTNVTLSKKRKRRFLGFLLGIGSAIASGIAVSKVLHLEGEVNKIKSALLSTNKAVVSLSNGVSVLTSKVLDLKNYIDKQLLPIVNKQSCSISNIETVIEFQQKNNRLLEITREFSVNAGVTTPVSTYMLTNSELLSLINDMPITNDQKKLMSSNVQIVRQQSYSIMSIIKEEVLAYVVQLPLYGVIDTPCWKLHTSPLCTTNTKEGSNICLTRTDRGWYCDNAGSVSFFPQAETCKVQSNRVFCDTMNSLTLPSEVNLCNIDIFNPKYDCKIMTSKTDVSSSVITSLGAIVSCYGKTKCTASNKNRGIIKTFSNGCDYVSNKGVDTVSVGNTLYYVNKQEGKSLYVKGEPIINFYDPLVFPSDEFDASISQVNEKINQSLAFIRKSDELLHNVNAGKSTTNIMITTIIIVIIVILLALIAVGLLLYCKARSTPVTLSKDQLSGINNIAFSN

SEQ ID NO: 8691 - protein, 574 aa, Artificial Sequence
  derived and/or modified protein sequence (wt) from HRSV__ANZ80364.1__F0
MELPIFKTNAITTILAVVTLCFASSQNITEEFYQSTCSAVSKGYLSALRTGWYTSVITIELSNIKENKCNGTDAKVKLIKQELDKYKNAVTELQLLMQSTPAANSRARRELPRFMNYTLNNTKNTNVTLSKKRKRRFLGFLLGVGSAIASGIAVSKVLHLEGEVNKIKSALLSTNKAVVSLSNGVSVLTSKVLDLKNYIDKQLLPIVNKQSCSISNIETVIEFQQKNNRLLEITREFSVNAGVTTPVSTYMLTNSELLSLINDMPITNDQKKLMSSNVQIVRQQSYSIMSIIKEEVLAYVVQLPLYGVIDTPCWKLHTSPLCTTNTKEGSNICLTRTDRGWYCDNAGSVSFFPQAETCKVQSNRVFCDTMNSLTLPSEVNLCNIDIFNPKYDCKIMTSKTDVSSSVITSLGAIVSCYGKTKCTASNKNRGIIKTFSNGCDYVSNKGVDTVSVGNTLYYVNKQEGKSLYVKGEPIINFYDPLVFPSDEFDASISQVNEKINQSLAFIRKSDELLHNVNAGKSTTNIMITTIIIVIIVILLALIAVGLLLYCKARSTPVTLSKDQLSGINNIAFSN

SEQ ID NO: 8692 - protein, 574 aa, Artificial Sequence
  derived and/or modified protein sequence (wt) from HRSV__ANZ80276.1__F0
MELLIHRSSAIFLTLAINALYLTSSQNITEEFYQSTCSAVSRGYLSALRTGWYTSVITIELSNIKETKCNGTDTKVKLIKQELDKYKNAVTELQLLMQNTPAANNRARREAPQYVNYTINTTKNLNVSISKKRKRRFLGFLLGVGSAIASGIAVSKVLHLEGEVNKIKNALLSTNKAVVSLSNGVSVLTSKVLDLKNYINNQLLPIVNQQSCRISNIETVIEFQQKNSRLLEITREFSVNAGVTTPLSTYMLTNSELLSLINDMPITNDQKKLMSSNVQIVRQQSYSIMSIIKEEVLAYVVQLPIYGVIDTPCWKLHTSPLCTTNIKEGSNICLTRTDRGWYCDNAGSVSFFPQADTCKVQSNRVFCDTMNSLTLPSEVSLCNTDIFNSKYDCKIMTSKTDISSSVITSLGAIVSCYGKTKCTASNKNRGIIKTFSNGCDYVSNKGVDTVSVGNTLYYVNKLEGKNLYVKGEPIINYYDPLVFPSDEFDASISQVNEKINQSLAFIRRSDELLHNVNTGKSTTNIMITAIIIVIIVVLLSLIAIGLLLYCKAKNTPVTLSKDQLSGINNIAFSK

SEQ ID NO: 8693 - protein, 574 aa, Artificial Sequence
  derived and/or modified protein sequence (wt) from HRSV__ANZ80221.1__F0
MELLIHRSNAIFLTLAINALYLTSSQNITEEFYQSTCSAVSRGYFSALRTGWYTSVITIELSNIKETKCNGTDTKVKLIKQELDKYKNAVTELQLLMQNTPAANNRARREAPQYMNYTINTTKNLNVSISKKRKRRFLGFLLGVGSAIASGIAVSKVLHLEGEVNKIKNALLSTNKAVVSLSNGVSVLTSKVLDLKNYINNQLLPIVNQQSCRISNIETVIEFQQKNSRLLEITREFSVNAGVTTPLSTYMLTNSELLSLINDMPITNDQKKLMSSNVQIVRQQSYSIMSIIKEEVLAYVVQLPIYGVIDTPCWKLHTSPLCTTNIKEGSNICLTRTDRGWYCDNAGSVSFFPQADTCKVQSNRVFCDTMNSLTLPSEVSLCNTDIFNSKYDCKIMTSKTDISSSVITSLGAIVSCYGKTKCTASNKNRGIIKTFSNGCDYVSNKGVDTVSVGNTLYYVNKLEGKNLYVKGEPIINYYDPLVFPSDEFDASISQVNEKINQSLAFIRRSDELLHNVNTGKSTTNIMITAIIIVIIVVLLSLIAIGLLLYCKAKNTPVTLSKDQLSGINNIAFSK

SEQ ID NO: 8694 - protein, 574 aa, Artificial Sequence
  derived and/or modified protein sequence (wt) from HRSV__ANZ80188.1__F0
MELPILKTNAITTILAAVTLCFASSQNITEEFYQSTCSAVSKGYLSALRTGWYTSVITIELSNIKENKCNGTDAKVKLIKQELDKYKNAVTELQLLMQSTPAANSRARRELPRFMNYTFNNTKNTNVTLSKKRKRRFLGFLLGVGSAIASGIAVSKVLHLEGEVNKIKSALLSTNKAVVSLSNGVSVLTSKVLDLKNYIDKQLLPIVNKQSCSISNIETVIEFQQKNNRLLEITREFSVNAGVTTPVSTYMLTNSELLSLINDMPITNDQKKLMSSNVQIVRQQSYSIMSIIKEEVLAYVVQLPLYGVIDTPCWKLHTSPLCTTNTKEGSNICLTRTDRGWYCDNAGSVSFFPQAETCKVQSNRVFCDTMNSLTLPSEVNLCNIDIFNPKYDCKIMTSKTDVSSSVITSLGAIVSCYGKTKCTASNKNRGIIKTFSNGCDYVSNKGVDTVSVGNTLYYVNKQEGKSLYVKGEPIINFYDPLVFPSDEFDASISQVNEKINQSLAFIRKSDELLHNVNAGKSTTNIMITTIIIVIIVILLALIAVGLLLYCKARSTPVTLSKDQLSGINNIAFSN

SEQ ID NO: 8695 - protein, 574 aa, Artificial Sequence
  derived and/or modified protein sequence (wt) from HRSV__ANZ80144.1__F0
MELPILKTNAITTILAAVTLCFASSQNITEEFYQSTCSAVSKGYLSALRTGWYTSVITIELSNIKENKCNGTDAKVKLIKQELDKYKNAITELQLLMQSTPAANSRARRELPRFMNYTLNNTKNTNVTLSKKRKRRFLGFLLGVGSAIASGIAVSKVLHLEGEVNKIKSALLSTNKAVVSLSNGVSVLTSKVLDLKNYIDKQLLPIVNKQSCSISNIETVIEFQQKNNRLLEITREFSVNAGVTTPVSTYMLTNSELLSLINDMPITNDQKKLMSSNVQIVRQQSYSIMSIIKEEVLAYVVQLPLYGVIDTPCWKLHTSPLCTTNTKEGSNICLTRTDRGWYCDNAGSVSFFPQAETCKVQSNRVFCDTMNSLTLPSEVNLCNIDIFNPKYDCKIMTSKTDVSSSVITSLGAIVSCYGKTKCTASNKNRGIIKTFSNGCDYVSNKGVDTVSVGNTLYYVNKQEGKSLYVKGEPIINFYDPLVFPSDEFDASISQVNEKINQSLAFIRKSDELLHNVNAGKSTTNIMMTTIIIVIIVILLALIAVGLLLYCKARSTPVTLSKDQLSGINNIAFSN

SEQ ID NO: 8696 - protein, 574 aa, Artificial Sequence
  derived and/or modified protein sequence (wt) from HRSV__ANZ80133.1__F0
MELLIHRSSAIFLTLAINALYLTSSQNITEEFYQSTCSAVSRGYLSALRTGWYTSVITIELSNIKETKCNGTDTKVKLIKQELDKYKNAVTELQLLMQNTPAVNNRARREAPQYMNYTINTTKNLNVSISKKRKRRFLGFLLGVGSAIASGIAVSKVLHLEGEVNKIKNALLSTNKAVVSLSNGVSVLTSKVLDLKNYINNQLLPIVNRQSCRISNIETVIEFQQKNSRLLEITREFSVNAGVTTPLSTYMLTNSELLSLINDMPITNDQKKLMSSNVQIVRQQSYSIMSIIKEEVLAYVVQLPIYGVIDTPCWKLHTSPLCTTNIKEGSNICLTRTDRGWYCDNAGSVSFFPQADTCKVQSNRVFCDTMNSLTLPSEVSLCNTDIFNSKYDCKIMTSKTDISSSVITSLGAIVSCYGKTKCTASNKNRGIIKTFSNGCDYVSNKGVDTVSVGNTLYYVNKLEGKNLYVKGEPIINYYDPLVFPSDEFDASISQVNEKINQSLAFIRRSDELLHNVNTGKSTTNIMITAIIIVIIVVLLSLIAIGLLLYCKAKNTPVTLSKDQLSGINNIAFSK

SEQ ID NO: 8697 - protein, 574 aa, Artificial Sequence
  derived and/or modified protein sequence (wt) from HRSV__ANZ80111.1__F0
MELPILKTNAITTILAAVTLCFASSQNITEEFYQSTCSAVSKGYLSALRTGWYTSVITIELSNIKENKCNGTDAKVKLIKQELDKYKNAVTELQLLMQSTPAANSRARRELPRFMNYTLNNTKNTNVTLSKKRKRRFLGFLLGVGSAIASGIAVSKVLHLEGEVNKIKSALLSTNKAVVSLSNGVSVLTSKVLDLKNYIDKQLLPIVNKQSCSISNIETVIEFQQKNNRLLEITREFSVNAGVTTPVSTYMLTNSELLSLINDMPITNDQKKLMSSNVQIVRQQSYSIMSIIKEEVLAYVVQLPLYGVIDTPCWKLHTSPLCTTNTKEGSNICLTRTDRGWYCDNAGSVSFFPQAETCKVQSNRVFCDTMNSLTLPSEVNLCNIDIFNPKYDCKIMTSKTDVSSSVITSLGAIVSCYGKTKCTASNKNRGIIKTFSNGCDYVSNKGVDTVSVGNTLYYVNKQEGKSLYVKGEPIINFYDPLVFPSDEFDASISQVNEKINQSLAFIRKSDELLHNVNAGKSTTNIMITTIIIVIIVILLALIAVGLLLYCKAKSTPVTLSKDQLSGINNIAFSN

SEQ ID NO: 8698 - protein, 574 aa, Artificial Sequence
  derived and/or modified protein sequence (wt) from HRSV__ANZ80122.1__F0
MELLIHRSSAIFLTLAINALYLTSSQNITEEFYQSTCSAVSRGYLSALRTGWYTSVITIELSNIKETKCNGTDTKVKLIKQELDKYKNAVTELQLLMQNTPAANNRARREAPQYMNYTINTTINLNISISKKRKRRFLGFLLGVGSAIASGIAVSKVLHLEGEVNKIKNALLSTNKAVVSLSNGVSVLTSKVLDLKNYINNQLLPIVNQQSCRISNIETVIEFQQKNSRLLEITREFSVNAGVTTPLSTYMLTNSELLSLINDMPITNDQKKLMSSNVQIVRQQSYSIMSIIKEEVLAYVVQLPIYGVIDTPCWKLHTSPLCTTNIKEGSNICLTRTDRGWYCDNAGSVSFFPQADTCKVQSNRVFCDTMNSLTLPSEVSLCNTDIFNSKYDCKIMTSKTDISSSVITSLGAIVSCYGKTKCTASNKNRGIIKTFSNGCDYVSNKGVDTVSVGNTLYYVNKLEGKNLYVKGEPIINYYDPLVFPSDEFDASISQVNEKINQSLAFIRRSDELLHNVNTGKSTTNIMITVIIIVIIVVLLSLIAIGLLLYCKAKNTPVTLSKDQLSGINNIAFSK

SEQ ID NO: 8699 - protein, 574 aa, Artificial Sequence
  derived and/or modified protein sequence (wt) from HRSV__ANZ80056.1__F0
MELLIHRSSAIFLTLAINALYLTSSQNITEEFYQSTCSAVSRGYLSALRTGWYTSVITIELSNIKETKCNGTDTKVKLIKQELDKYKNAVTELQLLMQNTPAANNRARREAPQYMNYTINTTKNLNVSISKKRKRRFLGFLLGVGSAIASGIAVSKVLHLEGEVNKIKNALLSTNKAVVSLSNGVSVLTSKVLDLKNYINNQLLPIVNQQSCRISNIETVIEFQQKNSRLLEITREFSVNAGVTTPLSTYMLTNSELLSLINDMPITNDQKKLMSSNVQIVRQQSYSIMSIIKEEVLAYVVQLPIYGVIDTPCWKLHTSPLCTTNIKEGSNICLTRTDRGWYCDNAGSVSFFPQADTCKVQSNRVFCDTMNSLTLPSEVSLCNTDIFNSKYDCKIMTSKTDISSSVITSLGAIVSCYGKTKCTASNKNRGIIKTFFNGCDYVSNKGVDTVSVGNTLYYVNKLEGKNLYVKGEPIINYYDPLVFPSDEFDASISQVNEKINQSLAFIRRSDELLHNVNTGKSTTNIMITVIIIVIIVVLLSLIAIGLLLYCKAKNTPVTLSKDQLSGINNIAFSK

SEQ ID NO: 8700 - protein, 574 aa, Artificial Sequence
  derived and/or modified protein sequence (wt) from HRSV__ANZ80012.1__F0
MELPILKTNAITTILAAVTLCFASSQNITEEFYQSTCSAVSKGYLSALRTGWYTSVITIELSNIKENKCNGTDAKVKLIKQELDKYKNAVTELQLLMQSTPAANSRARRELPRFMNYTLNYTKNTNVTLSKKRKRRFLGFLLGVGSAIASGIAVSKVLHLEGEVNKIKSALLSTNKAVVSLSNGVSVLTSKVLDLKNYIDKQLLPIVNKQSCSISNIETVIEFQQKNNRLLEITREFSVNAGVTTPVSTYMLTNSELLSLINDMPITNDQKKLMSSNVQIVRQQSYSIMSIIKEEVLAYVVQLPLYGVIDTPCWKLHTSPLCTTNTKEGSNICLTRTDRGWYCDNAGSVSFFPQAETCKVQSNRVFCDTMNSLTLPSEVNLCNIDIFNPKYDCKIMTSKTDVSSSVITSLGAIVSCYGKTKCTASNKNRGIIKTFSNGCDYVSNKGVDTVSVGNTLYYVNKQEGKSLYVKGEPIINFYDPLVFPSDEFDASISQVNEKINQSLAFIRKSDELLHNVNAGKSTTNIMITTIIIVIIVILLALIAVGLLLYCKARNTPVTLSKDQLSGINNIAFSN

SEQ ID NO: 8701 - protein, 574 aa, Artificial Sequence
  derived and/or modified protein sequence (wt) from HRSV__ANZ80067.1__F0
MELLIHRSSAIFLTLAINALYLTSSQNITEEFYQSTCSAVSRGYLSALRTGWYTSVITIELSNIKETKCNGTDTKVKLIKQELDKYKNAVTELQLLMQNTPAANNRARREAPQYMNYTINTTGNLNVSIGKRRKRRFLGFLLGVGSAIASGIAVSKVLHLEGEVNKIKNALLSTNKAVVSLSNGVSVLTSKVLDLKNYINNQLLPIVNQQSCRISNIETVIEFQQKNSRLLEITREFSVNAGVTTPLSTYMLTNSELLSLINDMPITNDQKKLMSSNVQIVRQQSYSIMSIIKEEVLAYVVQLPIYGVIDTPCWKLHTSPLCTTNIKEGSNICLTRTDRGWYCDNAGSVSFFPQADTCKVQSNRVFCDTMNSLTLPSEVSLCNTDIFNSKYDCKIMTSKTDISSSVITSLGAIVSCYGKTKCTASNKNRGIIKTFSNGCDYVSNKGVDTVSVGNTLYYVNKLEGKNLYVKGEPIINYYDPLVFPSDEFDASISQVNEKINQSLAFIRRSDELLHNVNTGKSTTNIMITAIIIVIIVVLLSLIAIGLLLYCKAKNTPVTLSKDQLSGINNIAFSK

SEQ ID NO: 8702 - protein, 574 aa, Artificial Sequence
  derived and/or modified protein sequence (wt) from HRSV__ANZ79979.1__F0
MELPILKTNAITTILAAVTLCFASSQNITEEFYQSTCSAVSKGYLSALRTGWYTSVITIELSNIKENKCNGTDAKVKLIKQELDKYKNAVTELQLLMQSTPAANNRARRELPRFMNYTLNNTKKTNVTLSKKRKRRFLGFLLGVGSAIASGIAVSKVLHLEGEVNKIKSALLSTNKAVVSLSNGVSVLTSKVLDLKNYIDKQLLPIVNKQSCSISNIETVIEFQQKNNRLLEITREFSVNAGVTTPVSTYMLTNSELLSLINDMPITNDQKKLMSSNVQIVRQQSYSIMSIIKEEVLAYVVQLPLYGVIDTPCWKLHTSPLCTTNTKEGSNICLTRTDRGWYCDNAGSVSFFPQAETCKVQSNRVFCDTMNSLTLPSEVNLCNIDIFNPKYDCKIMTSKTDISSSVITSLGAIVSCYGKTKCTASNKNRGIIKTFSNGCDYVSNKGVDTVSVGNTLYYVNKQEGKSLYVKGEPIINFYDPLVFPSDEFDASISQVNEKINQSLAFIRKSDELLHNVNAGKSTTNIMITTIIIVIIVILLALIAVGLLLYCKARSTPVTLSKDQLSGINNIAFSN

SEQ ID NO: 8703 - protein, 574 aa, Artificial Sequence
  derived and/or modified protein sequence (wt) from HRSV__ANZ79935.1__F0
MELPILKTNAIITILAAVTLCFASSQNITEEFYQSTCSAVSKGYLSALRTGWYTSVITIELSNIKENKCNGTDAKVKLIKQELDKYKNAVTELQLLMQSTPAANSRARRELPRFMNYTLNNTKNTNVTLSKKRKRRFLGFLLGVGSAIASGIAVSKVLHLEGEVNKIKSALLSTNKAVVSLSNGVSVLTSKVLDLKNYIDKQLLPIVNKQSCSISNIETVIEFQQKNNRLLEITREFSVNAGVTTPVSTYMLTNSELLSLINDMPITNDQKKLMSSNVQIVRQQSYSIMSIIKEEVLAYVVQLPLYGVIDTPCWKLHTSPLCTTNTKEGSNICLTRTDRGWYCDNAGSVSFFPQAETCKVQSNRVFCDTMNSLTLPSEVNLCNIDIFNPKYDCKIMTSKTDVSSSVITSLGAIVSCYGKTKCTASNKNRGIIKTFSNGCDYVSNKGVDTVSVGNTLYYVNKQEGKSLYVKGEPIINFYDPLVFPSDEFDASISQVNEKINQSLAFIRKSDELLHNVNAGKSTTNIMITTIIIVIIVILLALIAVGLLLYCKAKNTPVTLSKDQLSGINNIAFSN

SEQ ID NO: 8704 - protein, 574 aa, Artificial Sequence
  derived and/or modified protein sequence (wt) from HRSV__ANZ79990.1__F0
MELLIHRSSAIFLTLAINALYLTSSQNITEEFYQSTCSAVSRGYLSALRTGWYTSVITIELSNIKETKCNGTDTKVKLIKQELDKYKNAVTELQLLMQNTPAVNNRARREVPQYMNYTINTTKNLNVSISKKRKRRFLGFLLGVGSAIASGIAVSKVLHLEGEVNKIKNALQSTNKAVVSLSNGVSVLTSKVLDLKNYINNQLLPIVNKQSCRISNIETVIEFQQKNSRLLEITREFSVNAGVTTPLSTYMLTNSELLSLINDMPITNDQKKLMSSNVQIVRQQSYSIMSIIKEEVLAYVVQLPIYGVIDTPCWKLHTSPLCTTNIKEGSNICLTRTDRGWYCDNAGSVSFFPQADTCKVQSNRVFCDTMNSLTLPSEVSLCNTDIFNSKYDCKIMTSKTDISSSVITSLGAIVSCYGKTKCTASNKNRGIIKTFSNGCDYVSNKGVDTVSVGNTLYYVNKLEGKNLYVKGEPIINYYDPLVFPSDEFDASISQVNEKINQSLAFIRRSDELLHNVNTGKSTTNIMITAIIIVIIVVLLSLIAIGLLLYCKAKNTPVTLSKDQLSGINNIAFSK

SEQ ID NO: 8705 - protein, 574 aa, Artificial Sequence
  derived and/or modified protein sequence (wt) from HRSV__ANZ79902.1__F0
MELPILKTNAITTILAAVTLCFASSQNITEEFYQSTCSAVSKGYLSALRTGWYTSVITIELSNIKENKCNGTDAKVKLIKQELDKYKNAVTELQLLMQSTPAANSRARRELPRFMNYTLNNAKNTNVTLSKKRKRRFLGFLLGVGSAIASGIAVSKVLHLEGEVNKIKSALLSTNKAVVSLSNGVSVLTSKVLDLKNYIDKQLLPIVNKQSCSISNIETVIEFQQKNNRLLEITREFSVNAGVTTPVSTYMLTNNELLSLINDMPITNDQKKLMSSNVQIVRQQSYSIMSIIKEEVLAYVVQLPLYGVIDTPCWKLHTSPLCTTNTKEGSNICLTRTDRGWYCDNAGSVSFFPQAETCKVQSNRVFCDTMNSLTLPSEVNLCNIDIFNPKYDCKIMTSKTDVSSSVITSLGAIVSCYGKTKCTASNKNRGIIKTFSNGCDYVSNKGVDTVSVGNTLYYVNKQEGKSLYVKGEPIINFYDPLVFPSDEFDASISQVNEKINQSLAFIRKSDELLHNVNAGKSTTNIMITTIIIVIIVILLALIAVGLLLYCKARSTPVTLSKDQLSGINNIAFSN

SEQ ID NO: 8706 - protein, 574 aa, Artificial Sequence
  derived and/or modified protein sequence (wt) from HRSV__ANZ79759.1__F0
MELPILKANAIATVLAAVTLCFASSQNITEEFYQSTCSAVSKGYLSALRTGWYTSVITIELSNIKENKCNGTDAKVKLIKQELDKYKNAVTELQLLMQSTPAANSRARRELPRFMNYKLNNTKNTNVTLSKKRKRRFLGFLLGVGSAIASGIAVSKVLHLEGEVNKIKSALLSTNKAVVSLSNGVSVLTSKVLDLKNYIDKQLLPIVNKQSCSISNIETVIEFQQKNNRLLEITREFSVNAGVTTPVSTYMLTNSELLSLINDMPITNDQKKLMSSNVQIVRQQSYSIMSIIKEEVLAYVVQLPLYGVIDTPCWKLHTSPLCTTNTKEGSNICLTRTDRGWYCDNAGSVSFFPQAETCKVQSNRVFCDTMNSLTLPSEVNLCNIDIFNPKYDCKIMTSKTDVSSSVITSLGAIVSCYGKTKCTASNKNRGIIKTFSNGCDYVSNKGVDTVSVGNTLYYVNKQEGKSLYVKGEPIINFYDPLVFPSDEFDASISQVNEKINQSLAFIRKSDELLHNVNAGKSTTNIMMTTIIIVIIVILLALIAVGLLLYCKARSTPVTLSKDQLSGINNIAFSN

SEQ ID NO: 8707 - protein, 574 aa, Artificial Sequence
  derived and/or modified protein sequence (wt) from HRSV__ANZ79715.1__F0
MELPILKINAITTILAAVTLCFTSSQNITEEFYQSTCSAVSKGYLSALRTGWYTSVITIELSNIKENKCNGTDAKVKLIKQELDKYKNAVTELQLLMQSTPAANSRARRELPRFMNYTLNNTKNTNVTLSKKRKRRFLGFLLGVGSAIASGIAVSKVLHLEGEVNKIKSALLSTNKAVVSLSNGVSVLTSKVLDLKNYIDKQLLPIVNKQSCSISNIETVIEFQQKNNRLLEITREFSVNAGVTTPVSTYMLTNSELLSLINDMPITNDQKKLMSSNVQVVRQQSYSIMSIIKEEVLAYVVQLPLYGVIDTPCWKLHTSPLCTTNTKEGSNICLTRTDRGWYCDNAGSVSFFPQAETCKVQSNRVFCDTMNSLTLPSEVNLCNIDIFNPKYDCKIMTSKTDVSSSVITSLGAIVSCYGKTKCTASNKNRGIIKTFSNGCDYVSNKGVDTVSVGNTLYYVNKQEGKSLYVKGEPIINFYDPLVFPSDEFDASISQVNEKINQSLAFIRKSDELLHNVNAGKSTTNIMITTIIIVIIVILLALIAVGLLLYCKARSTPVTLSKDQLSGINNIAFSN

SEQ ID NO: 8708 - protein, 574 aa, Artificial Sequence
  derived and/or modified protein sequence (wt) from HRSV__ANZ79671.1__F0
MELPILKINAITTILAAVTLCFASSQNITEEFYQSTCSAVSKGYLSALRTGWYTSVITIELSNIKENKCNGTDAKVKLIKQELDKYKNAVTELQLLMQSTPAANSRARRELPRFMNYTLNNTKNTNVTLSKKRKRRFLGFLLGVGSAIASGIAVSKVLHLEGEVNKIKSALLSTNKAVVSLSNGVSVLTSKVLDLKNYIDKQLLPIVNKQSCSISNIETVIEFQQKNNRLLEITREFSVNAGVTTPVSTYMLTNSELLSLINDMPITNDQKKLMSSNVQIVRQQSYSIMSIIKEEVLAYVVQLPLYGVIDTPCWKLHTSPLCTTNTKEGSNICLTRTDRGWYCDNAGSVSFFPQAETCKVQSNRVFCDTMNSLTLPSEVNLCNIDIFNPKYDCKIMTSKTDVSSSVITSLGAIVSCYGKTKCTASNKNRGIIKTFSNGCDYVSNKGVDTVSVGNTLYYVNKQEGKSLYVKGEPIINFYDPLVFPSDEFDASISQVNEKINQSLAFIRKSDELLHNINAGKSTTNIMITTIIIVIIVILLALIAVGLLLYCKARSTPVTLSKDQLSGINNIAFSN

SEQ ID NO: 8709 - protein, 574 aa, Artificial Sequence
  derived and/or modified protein sequence (wt) from HRSV__ANZ79649.1__F0
MELPILKTNAITTILAAVTLCFASSQNITEEFYQSTCSAVSKGYLSALRTGWYTSVITIELSNIKENKCNGTDAKVKLIKQELDKYKNAVTELQLLMQSTPAANSRARRELPRFMNYTLNYTKNTNVTLSKKRKRRFLGFLLGVGSAIASGIAVSKVLHLEGEVNKIKSALLSTNKAVVSLSNGVSVLTSKVLDLKNYIDKQLLPIVNKQSCSISNIETVIEFQQKNNRLLEITREFSVNAGVTTPVSTYMLTNSELLSLINDMPITNDQKKLMSSNVQIVRQQSYSIMSIIKEEVLAYVVQLPLYGVIDTPCWKLHTSPLCTTNTKEGSNICLTRTDRGWYCDNAGSVSFFPQAETCKVQSNRVFCDTMNSLTLPSEVNLCNIDIFNPKYDCKIMTSKTDVSSSVITSLGAIVSCYGKTKCTASNKNRGIIKTFSNGCDYVSNKGVDTVSVGNTLYYVNKQEGKSLYVKGEPIINFYDPLVFPSDEFDASISQVNEKINQSLAFIRKSDELLHNVNAGKSTTNIMITTIIIVIIVILLALIAVGLLLYCKARSTPVTLSKDQLSGINNIAFSN

SEQ ID NO: 8710 - protein, 574 aa, Artificial Sequence
  derived and/or modified protein sequence (wt) from HRSV__AII22031.1__F0
MELPILKTNAITTILAAVTLCFASSQNITEEFYQSTCSAVSKGYLSALRTGWYTSVITIELSNIKENKCNGTDAKVKLIKQELDKYKNAVTELQLLMQSTPAANSRARRELPRFMNYTLNNTKNTNVTLSKKRKRRFLGFLLGVGSAIASGIAVSKVLHLEGEVNKIKSALLSTNKAVVSLSNGVSVLTSKVLDLKNYIDKQLLPIVNKQSCSISNIETVIEFQQKNNRLLEITREFSVNAGVTTPVSTYMLTNSELLSLINDMPITNDQKKLMSSNVQIVRQQSYSIMSIIKEEVLAYVVQLPLYGVIDTPCWKLHTSPLCTTNTKEGSNICLTRTDRGWYCDNAGSVSFFPQAETCKVQSNRVFCDTMNSLTLPSEVNLCNIDIFNPKYDCKIMTSKTDVSSSVITSLGAIVSCYGKTKCTASNKNRGIIKTFSNGCDYVSNKGVDTVSVGNTLYYVNKQEGKSLYVKGEPIINFYDPLVFPSDEFDASISQVNEKINQSLAFIRKSDELLHNVNAGKSTTNIMITTIIIVIIVILLALIAVGLLLYCKAKNTPVTLSKDQLSGINNIAFSN

SEQ ID NO: 8711 - protein, 574 aa, Artificial Sequence
  derived and/or modified protein sequence (wt) from HRSV__AMT79718.1__F0
MELPILKTNAITTILAAVTLCFAFSQNITEEFYQSTCSAVSKGYLSALRTGWYTSVITIELSNIKENKCNGTDAKVKLIKQELDKYKNAVIELQLLMQSTPAANSRARRELPRFMNYTLNNTKNTNVTLSKKRKRRFLGFLLGVGSAIASGIAVSKVLHLEGEVNKIKSALLSTNKAVVSLSNGVSVLTSKVLDLKNYIDKQLLPIVNKQSCSISNIETVIEFQQKNNRLLEITREFSVNAGVTTPVSTYMLTNSELLSLINDMPITNDQKKLMSSNVQIVRQQSYSIMSIIKEEVLAYVVQLPLYGVIDTPCWKLHTSPLCTTNTKEGSNICLTRTDRGWYCDNAGSVSFFPQAETCKVQSNRVFCDTMNSLTLPSEVNLCNIDIFNPKYDCKIMTSKTDVSSSVITSLGAIVSCYGKTKCTASNKNRGIIKTFSNGCDYVSNKGVDTVSVGNTLYYVNKQEGKSLYVKGEPIINFYDPLVFPSDEFDASISQVNEKINQSLAFIRKSDELLHNVNAGKSTTNIMITTIIIVIIVILLALIAVGLLLYCKARSTPVTLSKDQLSGINNIAFSN

SEQ ID NO: 8712 - protein, 574 aa, Artificial Sequence
  derived and/or modified protein sequence (wt) from HRSV__AMT79586.1__F0
MELLIHRSSAIFLTFAINTLYLTSSQNITEEFYQSTCSAVSRGYLSALRTGWYTSVITIELSNIKETKCNGTDTKVKLIKQELDKYKNAVTELQLLMQNTPAASNRARREAPQYMNYTINTTKNLNVSISKKRKRRFLGFLLGVGSAIASGIAVSKVLHLEGEVNKIKNALLATNKAVVSLSNGVSVLTSKVLDLKNYINNQLLPIVNQQSCRISNIETVIEFQQKNSRLLEITREFSVNAGVTTPLSTYMLTNSELLSLINDMPITNDQKKLMSSNVQIVRQQSYSIMSIIKEEVLAYVVQLPIYGVIDTPCWKLHTSPLCTTNIKEGSNICLTRTDRGWYCDNAGSVSFFPQADTCKVQSNRVFCDTMNSLTLPSEVSLCNTDIFNSKYDCKIMTSKTDISSSVITSLGAIVSCYGKTKCTASNKNRGIIKTFSNGCDYVSNKGVDTVSVGNTLYYVNKLEGKNLYVKGEPIINYYDPLVFPSDEFDASISQVNEKINQSLAFIRRSDELLHNVNTGKSTTNIMITAIIIVIIVVLLSLIAIGLLLYCKAKNTPVTLSKDQLSGINNIAFSK

SEQ ID NO: 8713 - protein, 574 aa, Artificial Sequence
  derived and/or modified protein sequence (wt) from HRSV__AMT79553.1__F0
MELLIHRSSAIFLTLAINTLYLTSSQNITEEFYQSTCSAVSRGYFSALRTGWYTSVITIELSNIKETKCNGTDTKVKLIKQELDKYKNAVTELQLLMQNTPAANNRARREAPQYMNYTINTTKNLNVSISKKRKRRFLGFLLGVGSAIASGIAVSKVLHLEGEVNKIKNALLSTNKAVVSLSNGVSVLTSKVLDLKNYINNQLLPIVNQQSCRISNIETVIEFQQKNSRLLEITREFSVNAGVTTPLSTYMLTNSELLSLINDMPITNDQKKLMSSNVQIVRQQSYSIMSIIKEEVLAYVVQLPIYGVIDTPCWKLHTSPLCTINIKEGSNICLTRTDRGWYCDNAGSVSFFPQADTCKVQSNRVFCDTMNSLTLPSEVSLCNTDIFNSKYDCKIMTSKTDISSSVITSLGAIVSCYGKTKCTASNKNRGIIKTFSNGCDYVSNKGVDTVSVGNTLYYVNKLEGKNLYVKGEPIINYYDPLVFPSDEFDASISQVNEKINQSLAFIRRSDELLHNVNTGKSTTNIMITAIIIVIIVVLLSLIAIGLLLYCKAKNTPVTLSKDQLSGINNIAFSK

SEQ ID NO: 8714 - protein, 574 aa, Artificial Sequence
  derived and/or modified protein sequence (wt) from HRSV__AMT79542.1__F0
MELPILKTNAITTILAAVTLCFTSSQNITEEFYQSTCSAVSKGYLSALRTGWYTSVITIELSNIKENKCNGTDAKVKLIKQELDKYKNAVTELQLLMQSTPAANSRARRELPRFMNYTLNNTKNTNVTSSKKRKRRFLGFLLGVGSAIASGIAVSKVLHLEGEVNKIKSALLSTNKAVVSLSNGVSVLTSKVLDLKNYIDKQLLPIVNKQSCSISNIETVIEFQQKNNRLLEITREFSVNAGVTTPVSTYMLTNSELLSLINDMPITNDQKKLMSSNVQIVRQQSYSIMSIIKEEVLAYVVQLPLYGVIDTPCWKLHTSPLCTTNTKEGSNICLTRTDRGWYCDNAGSVSFFPQAETCKVQSNRVFCDTMNSLTLPSEVNLCNIDIFNPKYDCKIMTSKTDVSSSVITSLGAIVSCYGKTKCTASNKNRGIIKTFSNGCDYVSNKGVDTVSVGNTLYYVNKQEGKSLYVKGEPIINFYDPLVFPSDEFDASISQVNEKINQSLAFIRKSDELLHNVNAGKSTTNIMITTIIIVIIVILLALIAVGLLLYCKARSTPVTLSKDQLSGINNIAFSN

SEQ ID NO: 8715 - protein, 574 aa, Artificial Sequence
  derived and/or modified protein sequence (wt) from HRSV__AMT79476.1__F0
MELPILKTNAITTILAAVTLCFASSQNITEEFYQSTCSAVSKGYLSALRTGWYTSVITIELSNIKENKCNGTDAKVKLIKQELDKYKNAVTELQLLMQSTPAANSRARRELPRFMNYTLNNTKNTNVTLSKKRKRRFLGFLLGVGSAIASGIAVSKVLHLEGEVNKIKSALLSTNKAVVSLSNGVSVLTSKVLDLKNYIDKQLLPIVNKQSCSISNIETVIEFQQKNNRLLEITREFSVNAGVTTPVSTYMLTNSELLSLINDMPITNDQKKLMSSNVQIVRQQSYSIMSIIKEEVLAYVVQLPLYGVIDTPCWKLHTSPLCTTNTKEGSNICLTRTDRGWYCDNAGSVSFFPQAETCKVQSNRVFCDTMNSLTLPSEVNLCNIDIFNPKYDCKIMTSKTDVSSSVITSLGAIVSCYGKTKCTASNKNRGIIKTFSNGCDYVSNKGVDTVSVGNTLYYVNKQEGKSLYVKGEPIINFYDPLVFPSDEFDASISQVNEKINQSLAFIRKSDELLHNVNAGKSTTNIMITTIIIVIIVILLASIAVGLLLYCKARSTPVTLSKDQLSGINNIAFSN

SEQ ID NO: 8716 - protein, 574 aa, Artificial Sequence
  derived and/or modified protein sequence (wt) from HRSV__AMT79388.1__F0
MELLIHRSSAIFLTLAINTLYLTSSQNITEEFYQSTCSAVSRGYFSALRTGWYTSVITIELSNIKETKCNGTDTKVKLIKQELDKYKNAVTELQLLMQNTPAANNRARREAPQYMNYTINTTKNPNASISKKRKRRFLGFLLGVGSAVASGIAVSKVLHLEGEVNKIKNALLSTNKAVVSLSNGVSVLTSKVLDLKNYINNQLLPIVNQQSCRISNIETVIEFQQKNSRLLEITREFSVNAGVTTPLSTYMLTNSELLSLINDMPITNDQKKLMSSNVQIVRQQSYSIMSVIKEEVLAYVVQLPIYGVIDTPCWKLHTSPLCTTNIKEGSNICLTRTDRGWYCDNAGSVSFFPQADTCKVQSNRVFCDTMNSLTLPSEVSLCNTDIFNSKYDCKIMTSKTDISSSVITSLGAIVSCYGKTKCTASNKNRGIIKTFSNGCDYVSNKGVDTVSVGNTLYYVNKLEGKNLYVKGEPIINYYDPLVFPSDEFDASISQVNEKINQSLAFIRRSDELLHNVNTGKSTTNIMITAIIIVIIVVLLSLIAIGLLLYCKAKNTPVTLSKDQLSGINNIAFSK

SEQ ID NO: 8717 - protein, 574 aa, Artificial Sequence
  derived and/or modified protein sequence (wt) from HRSV__AMT79201.1__F0
MELPILKTNAITTIFAAVTLCFASSQNITEEFYQSTCSAVSKGYLSALRTGWYTSVITIELSNIKENKCNGTDAKVKLIKQELDKYKNAVTELQLLMQSTPAANSRARREIPRFMNYTLNNTKNTNVTLSKKRKRRFLGFLLGVGSAIASGIAVSKVLHLEGEVNKIKSALLSTNKAVVSLSNGVSVLTSKVLDLKNYIDKQLLPIVNKQSCSISNIETVIEFQQKNNRLLEITREFSVNAGVTTPVSTYMLTNSELLSLINDMPITNDQKKLMSSNVQIVRQQSYSIMSIIKEEVLAYVVQLPLYGVIDTPCWKLHTSPLCTTNTKEGSNICLTRTDRGWYCDNAGSVSFFPQAETCKVQSNRVFCDTMNSLTLPSEVNLCNIDIFNPKYDCKIMTSKTDVSSSVITSLGAIVSCYGKTKCTASNKNRGIIKTFSNGCDYVSNKGVDTVSVGNTLYYVNKQEGKSLYVKGEPIINFYDPLVFPSDEFDASISQVNEKINQSLAFIRKSDELLHNVNAGKSTTNIMITTIIIVIIVILLALIAVGLLLYCKARSTPVTLSKDQLSGINNIAFSN

SEQ ID NO: 8718 - protein, 574 aa, Artificial Sequence
  derived and/or modified protein sequence (wt) from HRSV__AMT79190.1__F0
MELPILKTNAITTILAAVTLCFTSSQNITEEFYQSTCSAVSKGYLSALRTGWYTSVITIELSNIKENKCNGTDAKVKLIKQELDKYKNAVTELQLLMQSTPAANSRARRELPRFMNYTLNNTKNTNVTLSKKRKRRFLGFLLGFGSAIASGIAVSKVLHLEGEVNKIKSALLSTNKAVVSLSNGVSVLTSKVLDLKNYIDKQLLPIVNKQSCSISNIETVIEFQQKNNRLLEITREFSVNAGVTTPVSTYMLTNSELLSLINDMPITNDQKKLMSSNVQIVRQQSYSIMSIIKEEVLAYVVQLPLYGVIDTPCWKLHTSPLCTTNTKEGSNICLTRTDRGWYCDNAGSVSFFPQAETCKVQSNRVFCDTMNSLTLPSEVNLCNIDIFNPKYDCKIMTSKTDVSSSVITSLGAIVSCYGKTKCTASNKNRGIIKTFSNGCDYVSNKGVDTVSVGNTLYYVNKQEGKSLYVKGEPIINFYDPLVFPSDEFDASISQVNEKINQSLAFIRKSDELLHNVNAGKSTTNIMITTIIIVIIVILLALIAVGLLLYCKARSTPVTLSKDQLSGINNIAFSN

SEQ ID NO: 8719 - protein, 574 aa, Artificial Sequence
  derived and/or modified protein sequence (wt) from HRSV__AMT79157.1__F0
MELLIRRSSAIFLTFAINTLYLTSSQNITEEFYQSTCSAVSRGYFSALRTGWYTSVITIELSNIKETKCNGTDTKVKLIKQELDKYKNAVTELQLLMQNTPAANNRARREAPQYMNYTINTTKNPNASISKKRKRRFLGFLLGVGSAIASGIAVSKVLHLEGEVNKIKNALLSTNKAVVSLSNGVSVLTSKVLDLKNYINNQLLPIVNQQSCRISNIETVIEFQQKNSRLLEITREFSVNAGVTTPLSTYMLTNSELLSLINDMPITNDQKKLMSSNVQIVRQQSYSIMSIIKEEVLAYVVQLPIYGVIDTPCWKLHTSPLCTTNIKEGSNICLTRTDRGWYCDNAGSVSFFPQADTCKVQSNRVFCDTMNSLTLPSEVSLCNTDIFNSKYDCKIMTSKTDISSSVITSLGAIVSCYGKTKCTASNKNRGIIKTFSNGCDYVSNKGVDTVSVGNTLYYVNKLEGKNLYVKGEPIINYYDPLVFPSDEFDASISQVNEKINQSLAFIRRSDELLHNVNTGKSTTNIMITAIIIVIIVVLLSLIAIGLLLYCKAKNTPVTLSKDQLSGINNIAFSK

SEQ ID NO: 8720 - protein, 574 aa, Artificial Sequence
  derived and/or modified protein sequence (wt) from HRSV__AMT79124.1__F0
MELLIHRSSAIFLTFAINTLYLTSSQNITEEFYQSTCSAVSRGYLSALRTGWYTSVITIELSNIKETKCNGTDTKVKLIKQELDKYKNAVTELQLLMQNTPAANNRARREAPQHMNYTINTTKNLNVSISKKRKRRFLGFLLGVGSAIASGIAVSKVLHLEGEVNKIKNALLATNKAVVSLSNGVSVLTSKVLDLKNYINNQLLPIVNQQSCRISNIETVIEFQQKNSRLLEITREFSVNAGVTTPLSTYMLTNSELLSLINDMPITNDQKKLMSSNVQIVRQQSYSIMSIIKEEVLAYVVQLPIYGVIDTPCWKLHTSPLCTTNIKEGSNICLTRTDRGWYCDNAGSVSFFPQADTCKVQSNRVFCDTMNSLTLPSEVSLCNTDIFNSKYDCKIMTSKTDISSSVITSLGAIVSCYGKTKCTASNKNRGIIKTFSNGCDYVSNKGVDTVSVGNTLYYVNKLEGKNLYVKGEPIINYYDPLVFPSDEFDASISQVNEKINQSLAFIRRSDELLHNVNTGKSTTNIMITAIIIVIIVVLLSLIAIGLLLYCKAKNTPVTLSKDQLSGINNIAFSK

SEQ ID NO: 8721 - protein, 574 aa, Artificial Sequence
  derived and/or modified protein sequence (wt) from HRSV__AMT79091.1__F0
MELLIHRSSAIFLTLAINALYLTSSQNITEEFYQSTCSAVSRGYFSALRTGWYTSVITIELSNIKETKCNGTDTKVKLIKQELDKYKNAVTELQLLMQNTPAANNRARREAPQYMNYTINTTKNLNVSISKKRKRRFLGFLLGVGSAIASGIAVSKVLHLEGEVNKIKNALLSTNKAVVSLSNGVSVLTSKVLDLKNYINNQLLPIVNQQSCHISNIETVIEFQQKNSRLLEITREFSVNAGVTTPLSTYMLTNSELLSLINDMPITNDQKKLMSSNVQIVRQQSYSIMSIIKEEVLAYVVQLPIYGVIDTPCWKLHTSPLCTTNIKEGSNICLTRTDRGWYCDNAGSVSFFPQADTCKVQSNRVFCDTMNSLTLPSEVSLCNTDIFNSKYDCKIMTSKTDISSSVITSLGAIVSCYGKTKCTASNKNRGIIKTFSNGCDYVSNKGVDTVSVGNTLYYVNKLEGKNLYVKGEPIINYYDPLVFPSDEFDASISQVNEKINQSLAFIRRSDELLHNVNTGKSTTNIMITVIIIVIIVVLLSLIAIGLLLYCKAKNTPVTLSKDQLSGINNIAFSK

SEQ ID NO: 8722 - protein, 574 aa, Artificial Sequence
  derived and/or modified protein sequence (wt) from HRSV__AMT79047.1__F0
MELPILKTNAITTILAAVTLCFTSSQNITEEFYQSTCSAVSKGYLSALRTGWYTSVITIELSNIKENKCNGTDTKVKLIKQELDKYKNAVTELQLLMQSTPAANSRARRELPRFMNYTLNNAKNTNVTLSKKRKRRFLGFLLGVGSAIASGIAVSKVLHLEGEVNKIKSALLSTNKAVVSLSNGVSVLTSKVLDLKNYIDKQLLPIVNKQSCSISNIETVIEFQQKNNRLLEITREFSVNAGVTTPVSTYMLTNSELLSLINDMPITNDQKKLMSSNVQIVRQQSYSIMSIIKEEVLAYVVQLPLYGVIDTPCWKLHTSPLCTTNTKEGSNICLTRTDRGWYCDNAGSVSFFPQAETCKVQSNRVFCDTMNSLTLPSEVNLCNIDIFNPKYDCKIMTSKTDVSSSVITSLGAIVSCYGKTKCTASNKNRGIIKTFSNGCDYVSNKGVDTVSVGNTLYYVNKQEGKSLYVKGEPIINFYDPLVFPSDEFDASISQVNEKINQSLAFIRKSDELLHNVNAGKSTTNIMITTIIIVIIVILLALIAVGLLLYCKARSTPVTLSKDQLSGINNIAFSN

SEQ ID NO: 8723 - protein, 574 aa, Artificial Sequence
  derived and/or modified protein sequence (wt) from HRSV__AMT79014.1__F0
MELPILKTNAITTILAAVTLCFASSQNITEEFYQSTCSAVSKGYLSALRTGWYTSVITIELSNIKENKCNGTDAKVKLIKQELDKYKNAVTELQLLMQSTPAANSRARRELPRFMNYTLNNTKNTNVTLSKKRKRRFLGFLLGVGSAIASGIAVSKVLHLEGEVNKIKSALLSTNKAVVSLSNGVSVLTSKVLDLKNYIDKQLLPIVNKQSCSISNIETVIEFQQKNNRLLEITREFSVNAGVTTPVSTYMLTNSELLSLINDMPITNDQKKLMSSNVQIVRQQSYSIMSIIKEEVLAYVVQLPLYGVIDTPCWKLHTSPLCTTNTKEGSNICLTRTDRGWYCDNAGSVSFFPQAETCKVQSNRVFCDTMNSLTLPSEVNLCNIDIFNPKYDCKIMTSKTDVSSSVITSLGAIVSCYGKTKCTASNKNRGIIKTFSNGCDYVSNKGVDTVSVGNTLYYVNKQEGKSLYVKGEPIINFYDPLVFPSDEFDASISQVNEKINQSLAFIRKSDELLHNANAGKSTTNIMITTIIIVIIVILLALIAVGLLLYCKARSTPVTLSKDQLSGINNIAFSN

SEQ ID NO: 8724 - protein, 574 aa, Artificial Sequence
  derived and/or modified protein sequence (wt) from HRSV__AMT79003.1__F0
MELLIHRSSAIFLTLAINALYLTSSQNITEEFYQSTCSAVSRGYLSALRTGWYTSVITIELSNIKETKCNGTDTKVKLIKQELDKYKNAVTELQLLMQNTPAVNNRARREAPQYMNYTINTTKNLNVSISKKRKRRFLGFLLGVGSAIASGIAVSKVLHLEGEVNKIKNALQSTNKAVVSLSNGVSVLTSKVLDLKNYINNQLLPIVNQQSCRISNIETVIEFQQKNSRLLEITREFSVNAGVTTPLSTYMLTNSELLSLINDMPITNDQKKLMSSNVQIVRQQSYSIMSIIKEEVLAYVVQLPIYGVIDTPCWKLHTSPLCTTNIKEGSNICLTRTDRGWYCDNAGSVSFFPQADTCKVQSNRVFCDTMNSLTLPSEVSLCNTDIFNSKYDCKIMTSKTDISSSVITSLGAIVSCYGKTKCTASNKNRGIIKTFSNGCDYVSNKGVDTVSVGNTLYYVNKLEGKNLYVKGEPIINYYDPLVFPSDEFDASISQVNEKINQSLAFIRRSDELLHNVNTGKSTTNIMITAIIIVIIVVLLSLIAIGLLLYCKARNTPVTLSKDQLSGINNIAFSK

SEQ ID NO: 8725 - protein, 574 aa, Artificial Sequence
  derived and/or modified protein sequence (wt) from HRSV__AMT78872.1__F0
MELPILKTNAITTILTAVTLCFASSQNITEEFYQSTCSAVSKGYLSALRTGWYTSVITIELSNIKENKCNGTDTKVKLIKQELDKYKNAVTELQLLMQSTPAANSRARRELPRFMNYTLNNTKNTNVTLSKKRKRRFLGFLLGVGSAIASGIAVSKVLHLEGEVNKIKSALLSTNKAVVSLSNGVSVLTSKVLDLKNYIDKQLLPIVNKQSCSISNIETVIEFQQKNNRLLEITREFSVNAGVTTPVSTYMLTNSELLSLINDMPITNDQKKLMSSNVQIVRQQSYSIMSIIKEEVLAYVVQLPLYGVIDTPCWKLHTSPLCTTNTKEGSNICLTRTDRGWYCDNAGSVSFFPQAETCKVQSNRVFCDTMNSLTLPSEVNLCNIDIFNPKYDCKIMTSKTDVSSSVITSLGAIVSCYGKTKCTASNKNRGIIKTFSNGCDYVSNKGVDTVSVGNTLYYVNKQEGKSLYVKGEPIINFYDPLVFPSDEFDASISQVNEKINQSLAFIRKSDELLHNVNAGKSTTNIMITTIIIVIIVILLALIAVGLLLYCKARSTPVTLSKDQLSGINNIAFSN

SEQ ID NO: 8726 - protein, 574 aa, Artificial Sequence
  derived and/or modified protein sequence (wt) from HRSV__AMT78832.1__F0
MELPILKTNAITTILAAVTLCFTSSQNITEEFYQSTCSAVSKGYLSALRTGWYTSVITIELSNIKENKCNGTDAKVKLIKQELDKYKNAVTELQLLMQSTPAANSRARRELPRFMNYTLNNTKNTNVTLSKKRKRRFLGFLLGVGSAIASGIAVSKVLHLEGEVNKIKSALLSTNKAVVSLSNGVSVLTSKVLDLKNYIDKQLLPIVNKQSCSISNIETVIEFQQKNNRLLEITREFSVNAGVTTPVSTYMLTNSELLSLINDMPITNDQKKLMSSNVQIVRQQSYSIMSIIKEEVLAYVVQLPLYGVIDTPCWKLHTSPLCTTNTKEGSNICLTRTDRGWYCDNAGSVSFFPQAETCKVQSNRVFCDTMNSLTLPSEVNLCNIDIFNPKYDCKIMTSKTDVSSSVITSLGAIVSCYGKTKCTASNKNRGIIKTFSNGCDYVSNKGVDTVSVGNTLYYVNKQEGKSLYVKGEPIINYYDPLVFPSDEFDASISQVNEKINQSLAFIRKSDELLHNVNAGKSTTNIMITTIIIVIIVILLALIAVGLLLYCKARSTPVTLSKDQLSGINNIAFSN

SEQ ID NO: 8727 - protein, 574 aa, Artificial Sequence
  derived and/or modified protein sequence (wt) from HRSV__AMT78689.1__F0
MELPILKTNAITTILAAVTLCFTSSQNITEEFYQSTCSAVSKGYLSALRTGWYTSVITIELSNIKENKCNGTDAKVKLIKQELDKYKNAVTELQLLMQSTPAANSRARRELPRFMNYTLNNTKNTNVTLSKKRKRRFLGFLLGVGSAIASGIAVSKVLHLEGEVNKIKSALLSTNKAVVSLSNGVSVLTSKVLDLKNYIDKQLLPIVNKQSCSISNIETVIEFQQKNNRLLEITREFSVNAGVTTPVSTYMLTNSELLSLINDMPITNDQKKLMSSNVQIVRQQSYSIMSIIKEEVLAYVVQLPLYGVIDTPCWKLHTSPLCTTNTKEGSNICLTRTDRGWYCDNAGSVSFFPQAETCKVQSNRVFCDTMNSLTLPSEVNLCNIDIFNPKYDCKIMTSKTDVSSSVITSLGAIVSCYGKTKCTASNKNRGIIKTFSNGCDYVSNKGVDTVSVGNTLYYVNKQEGKSLYVKGEPIINFYDPLVFPSDEFDASISQVNEKINQSLAFIRKSDELLHNVNAGKSTTNIMITTIIIIIIVILLALIAVGLLLYCKARSTPVTLSKDQLSGINNIAFSN

SEQ ID NO: 8728 - protein, 574 aa, Artificial Sequence
  derived and/or modified protein sequence (wt) from HRSV__AMT78645.1__F0
MELLIHRSSAIFLTFAINTLYLTSSQNITEEFYQSTCSAVSRGYLSALRTGWYTSVITIELSNIKETKCNGTDTKVKLIKQELDKYKNAVTELQLLMQNTPAANNRARREAPQYMNYTINTTKNLNVSISKKRKRRFLGFLLGVGSAIASGIAVSKVLHLEGEVNKIKNALLATNKAVVSLSNGVSVLTSKVLDLKNYINNQLLPIVNQQSCRISNIETVIEFQQKNSRLLEITREFSVNAGVTTPLSIYMLTNSELLSLINDMPITNDQKKLMSSNVQIVRQQSYSIMSIIKEEVLAYVVQLPIYGVIDTPCWKLHTSPLCTTNIKEGSNICLTRTDRGWYCDNAGSVSFFPQADTCKVQSNRVFCDTMNSLTLPSEVSLCNTDIFNSKYDCKIMTSKTDISSSVITSLGAIVSCYGKTKCTASNKNRGIIKTFSNGCDYVSNKGVDTVSVGNTLYYVNKLEGKNLYVKGEPIINYYDPLVFPSDEFDASISQVNEKINQSLAFIRRSDELLHNVNTGKSTTNIMITAIIIVIIVVLLSLIAIGLLLYCKAKNTPVTLSKDQLSGINNIAFSK

SEQ ID NO: 8729 - protein, 574 aa, Artificial Sequence
  derived and/or modified protein sequence (wt) from HRSV__AMT78513.1__F0
MDLPILKTNAITAILAAVSLCFASSQNITEEFYQSTCSAVSKGYLSALRTGWYTSVITIELSNIKENKCNGTDAKVKLIKQELDKYKNAVTELQLLMQSTPAANNRSRRELPRFMNYTLNNTKNNNVTLSKKRKRRFLGFLLGVGSAIASGIAVSKVLHLEGEVNKIKSALLSTNKAVVSLSNGVSVLTSKVLDLKNYIDKQLLPIVNKQSCSISNIETVIEFQQKNNRLLEITREFSVNAGVTTPVSTYMLTNSELLSLINDMPITNDQKKLMSNNVQIVRQQSYSIMSIIKEEVLAYVVQLPLYGVIDTPCWKLHTSPLCTTNTKEGSNICLTRTDRGWYCDNAGSVSFFPQAETCKVQSNRVFCDTMNSLTLPSEVNLCNIDIFNPKYDCKIMTSKTDVSSSVITSLGAIVSCYGKTKCTASNKNRGIIKTFSNGCDYVSNKGVDTVSVGNTLYYVNKQEGKSLYVKGEPIINFYDPLVFPSDEFDASISQVNEKINQSLAFIRKSDELLHNVNVGKSTTNIMITTIIIVIIVILLLLIAVGLFLYCKARSTPVTLSKDQLSGINNIAFSN

SEQ ID NO: 8730 - protein, 574 aa, Artificial Sequence
  derived and/or modified protein sequence (wt) from HRSV__AMT78480.1__F0
MDLPILKTNAITAILAAVSLCFASSQNITEEFYQSTCSAVSKGYLSALRTGWYTSVITIELSNIKENKCNGTDAKVKLIKQELDKYKNAVTELQLLMQSTPAANNRARRELPRFMNYTLNNTKNNNVTLSKKRKRRFLGFLLGVGSAIASGIAVSKVLHLEGEVNKIKSALLSTNKAVVSLSNGVSILTSKVLDLKNYIDKQLLPIVNKQSCSISNIETVIEFQQKNNRLLEITREFSVNAGVTTPVSTYMLTNSELLSLINDMPITNDQKKLMSNNVQIVRQQSYSIMSIIKEEVLAYVVQLPLYGVIDTPCWKLHTSPLCTTNTKEGSNICLTRTDRGWYCDNAGSVSFFPQAETCKVQSNRVFCDTMNSLTLPSEVNLCNIDIFNPKYDCKIMTSKTDVSSSVITSLGAIVSCYGKTKCTASNKNRGIIKTFSNGCDYVSNKGVDTVSVGNTLYYVNKQEGKSLYVKGEPIINFYDPLVFPSDEFDASISQVNEKINQSLAFIRKSDELLHNVNVGKSTTNIMITTIIIVIIVILLLLIAVGLFLYCKARSTPVTLSKDQLSGINNIAFSN

SEQ ID NO: 8731 - protein, 574 aa, Artificial Sequence
  derived and/or modified protein sequence (wt) from HRSV__AMT78447.1__F0
MELLIHRSSAIFLTLAINALYLTSSQNITEEFYQSTCSAVSRGYLSALRTGWYTSVITIELSNIKETKCNGTDTKVKLIKQELDKYKNAVTELQLLMQNTPAANNRARREAPQYMNYTINTTKNLNVSISKKRKRRFLGFLLGVGSAIASGIAVSKVLHLEGEVNKIKNALLSTNKAVVSLSNGVSVLTSKVLDLKNYINNQLLPIVNQQSCRISNIETVIEFQQKNSRLLEITREFSVNAGVTTPLSTYMLTNSELLSLINDMPITNDQKKLMSNNVQIVRQQSYSIMSIIKEEVLAYVVQLPIYGVIDTPCWKLHTSPLCTTNIKEGSNICLTRTDRGWYCDNAGSVSFFPQADTCKVQSNRVFCDTMNSLTLPSEVSLCNTDIFNSKYDCKIMTSKTDISSSVITSLGAIVSCYGKTKCTASNKNRGIIKTFSNGCDYVSNKGVDTVSVGNTLYYVNKLEGKNLYVKGKPIINYYDPLVFPSDEFDASISQVNEKINQSLAFIRRSDELLHNVNTGKSTTNIMITAIIIVIIVVLLSLIAIGLLLYCKAKNTPVTLSKDQLSGINNIAFSK

SEQ ID NO: 8732 - protein, 574 aa, Artificial Sequence
  derived and/or modified protein sequence (wt) from HRSV__AMT78392.1__F0
MELLIHRSSAIFLTFAINTLYLTSSQNITEEFYQSTCSAVSRGYLSALRTGWYTSVITIELSNIKETKCNGTDTKVKLIKQELDKYKNAVTELQLLMQNTPVANNRARREAPQYMNYTINTTKNLNVSISKKRKRRFLGFLLGVGSAIASGIAVSKVLHLEGEVNKIKNALLATNKAVVSLSNGVSVLTSKVLDLKNYINNQLLPIVNQQSCRISNIETVIEFQQKNSRLLEITREFSVNAGVTTPLSTYMLTNSELLSLINDMPITNDQKKLMSSNVQIVRQQSYSIMSIIKEEVLAYVVQLPIYGVIDTPCWKLHTSPLCTTNIKEGSNICLTRTDRGWYCDNAGSVSFFPQADTCKVQSNRVFCDTMNSLTLPSEVSLCNTDIFNSKYDCKIMTSKTDISSSVITSLGAIVSCYGKTKCTASNKNRGIIKTFSNGCDYVSNKGVDTVSVGNTLYYVNKLEGKNLYVKGEPIINYYDPLVFPSDEFDASISQVNEKINQSLAFIRRSDELLHNVNTGKSTTNIMITAIIIVIIVVLLSLIAIGLLLYCKTKNTPVTLSKDQLSGINNIAFSK

SEQ ID NO: 8733 - protein, 574 aa, Artificial Sequence
  derived and/or modified protein sequence (wt) from HRSV__AMT78194.1__F0
MELLIHRSSAIFLNFAINTLYLTSSQNITEEFYQSTCSAVSRGYLSALRTGWYTSVITIELSNIKETKCNGTDTKVKLIKQELDKYKNAVTELQLLMQNTPAANNRARREAPQYMNYTINTTKNLNVSISKKRKRRFLGFLLGVGSAIASGIAVSKVLHLEGEVNKIKNALLATNKAVVSLSNGVSVLTSKVLDLKNYINNQLLPIVNQQSCRISNIETVIEFQQKNSRLLEITREFSVNAGVTTPLSTYMLTNSELLSLINDMPITNDQKKLMSSNVQIVRQQSYSIMSIIKEEVLAYVVQLPIYGVIDTPCWKLHTSPLCTTNIKEGSNICLTRTDRGWYCDNAGSVSFFPQADTCKVQSNRVFCDTMNSLTLPSEVSLCNTDIFNSKYDCKIMTSKTDISSSVITSLGAIVSCYGKTKCTASNKNRGIIKTFSNGCDYVSNKGVDTVSVGNTLYYVNKLEGKNLYVKGEPIINYYDPLVFPSDEFDASISQVNEKINQSLAFIRRSDELLHNVNTGKSTTNIMITAIIIVIIVVLLSLIAIGLLLYCKAKNTPVTLSKDQLSGINNIAFSK

SEQ ID NO: 8734 - protein, 574 aa, Artificial Sequence
  derived and/or modified protein sequence (wt) from HRSV__AMT78084.1__F0
MELPILKTNAITTILAAVTLCFASSQNITEEFYQSTCSAVSKGYLSALRTGWYTSVITIELSNIKENKCNGTDAKVKLIKQELDKYKNAVTELQLLMQSTPAANSRARRELPRFMNYTLNNTKNTNVTLSKKRKRRFLGFLLGVGSAIASGIAVSKVLHLEGEVNKIKSALLSTNKAVVSLSNGVSVLTSKVLDLKNYIDKQLLPIVNKQSCSISNIETVIEFQQKNNRLLEITREFSVNAGVTTPVSTYMLTNSELLSLINDMPITNDQKKLMSSNVQIVRQQSYSIMSIIKEEVLAYVVQLPLYGVIDTPCWKLHTSPLCTTNTKEGSNICLTRTDRGWYCDNAGSVSFFPQAETCKVQSNRVFCDTMNSLTLPSEVNLCNIDIFNPKYDCKIMTSKTDVSSSVITSLGAIVSCYGKTKCTASNKNRGIIKTFTNGCDYVSNKGVDTVSVGNTLYYVNKQEGKSLYVKGEPIINFYDPLVFPSDEFDASISQVNEKINQSLAFIRKSDELLHNVNAGKSTTNIMITTIIIVIIVILLALIAVGLLLYCKARSTPVTLSKDQLSGINNIAFSN

SEQ ID NO: 8735 - protein, 574 aa, Artificial Sequence
  derived and/or modified protein sequence (wt) from HRSV__AMT78051.1__F0
MELPILKTNAITTILAAVTLCFASSQNITEEFYQSTCSAVSKGYLSALRTGWYTSVITIELSNIKENKCNGTDAKVKLIKQELDKYKNAVTELQLLMQSTPAANSRARRELPRFMNYTLNNTKNTDVTLSKKRKRRFLGFLLGVGSAIASGIAVSKVLHLEGEVNKIKSALLSTNKAVVSLSNGVSVLTSKVLDLKNYIDKQLLPIVNKQSCSISNIETVIEFQQKNNRLLEITREFSVNAGVTTPVSTYMLTNSELLSLINDMPITNDQKKLMSSNVQIVRQQSYSIMSIIKEEVLAYVVQLPLYGVIDTPCWKLHTSPLCTTNTKEGSNICLTRTDRGWYCDNAGSVSFFPQAETCKVQSNRVFCDTMNSLTLPSEVNLCNIDIFNPKYDCKIMTSKTDVSSSVITSLGAIVSCYGKTKCTASNKNRGIIKTFSNGCDYVSNKGVDTVSVGNTLYYVNKQEGKSLYVKGEPIINFYDPLVFPSDEFDASISQVNEKINQSLAFIRKSDELLHNVNAGKSTTNIMITTIIIVIIVILLALIAVGLLLYCKARSTPVTLSKDQLSGINNIAFSN

SEQ ID NO: 8736 - protein, 574 aa, Artificial Sequence
  derived and/or modified protein sequence (wt) from HRSV__AMT77963.1__F0
MELPILKTNAITTILAAVTLCFASSQNITEEFYQSTCSAVSKGYLSALRTGWYTSVITIELSNIKENKCNGTDAKVKLIKQELDKYKNAVTELQLLMQSTPAANSRARRELPRFMNYTLNNTKNTNVTLSKKRKRRFLGFLLGVGSAIASGIAVSKVLHLEGEVNKIKSALLSTNKAVVSLSNGVSVLTSKVLDLKNYIDKQLLPIVNKQSCSISNIETVIEFQQKNNRLLEITREFSVNAGVTTPVSTYMLTNSELLSLINDMPITNDQKKLMSSNVQIVRQQSYSIMSIIKEDVLAYVVQLPLYGVIDTPCWKLHTSPLCTTNTKEGSNICLTRTDRGWYCDNAGSVSFFPQAETCKVQSNRVFCDTMNSLTLPSEVNLCNIDIFNPKYDCKIMTSKTDVSSSVITSLGAIVSCYGKTKCTASNKNRGIIKTFSNGCDYVSNKGVDTVSVGNTLYYVNKQEGKSLYVKGEPIINFYDPLVFPSDEFDASISQVNEKINQSLAFIRKSDELLHNVNAGKSTTNIMITTIIIVIIVILLALIAVGLLLYCKARSTPVTLSKDQLSGINNIAFSN

SEQ ID NO: 8737 - protein, 574 aa, Artificial Sequence
  derived and/or modified protein sequence (wt) from HRSV__AMT77908.1__F0
MELLIHRSSAIFLTLAINALYLTSSQNITEEFYQSTCSAVSRGYLSALRTGWYTSVITIELSNIKETKCNGTDTKVKLIKQELDKYKNAVTELQLLMQNTPAANNRARREAPQYMNYTINTTKSLNVSISKKRKRRFLGFLLGVGSAIASGIAVSKVLHLEGEVNKIKNALLSTNKAVVSLSNGVSVLTSKVLDLKNYINNQLLPIVNQQSCRISNIETVIEFQQKNSRLLEITREFSVNAGVTTPLSTYMLTNSELLSLINDMPITNDQKKLMSSNVQIVRQQSYSIMSIIKEEVLAYVVQLPIYGVIDTPCWKLHTSPLCTTNIKEGSNICLTRTDRGWYCDNAGSVSFFPQADTCKVQSNRVFCDTMNSLTLPSEVSLCNTDIFNSKYDCKIMTSKTDISSSVITSLGAIVSCYGKTKCTASNKNRGIIKTFSNGCDYVSNKGVDTVSVGNTLYYVNKLEGKNLYVKGEPIINYYDPLVFPSDEFDASISQVNEKINQSLAFIRRSDELLHNVNTGKSTTNIMITAIIIVIIVVLLSLIAIGLLLYCKAKNTPVTLSKDQLSGINNIAFSK

SEQ ID NO: 8738 - protein, 574 aa, Artificial Sequence
  derived and/or modified protein sequence (wt) from HRSV__AMT77776.1__F0
MELLIHRSSAIFLTFAINALYLTSSQNITEEFYQSTCSAVSRGYLSALRTGWYTSVITIELSNIKETKCNGTDTKVKLIKQELDKYKNAVTELQLLMQNTPAANNRARREAPQYMNYTINTTKNLNVSISKKRKRRFLGFLLGVGSAIASGIAVSKVLHLEGEVNKIKNALLSTNKAVVSLSNGVSVLTSKVLDLKNYINNQLLPIVNQQSCRISNIETVIEFQQKNSRLLEITREFSVNAGVTTPLSTYMLTNSELLSLINDMPITNDQKKLMSSNVQIVRQQSYSIMSIIKEEVLAYVVQLPIYGVIDTPCWKLHTSPLCTTNIKEGSNICLTRTDRGWYCDNAGSVSFFPQADTCKVQSNRVFCDTMNSLTLPSEVSLCNTDIFNSKYDCKIMTSKTDISSSVITSLGAIVSCYGKTKCTASNKNRGIIKTFSNGCDYVSNKGVDTVSVGNTLYYVNKLEGKNLYVKGEPIINYYDPLVFPSDEFDASISQVNEKINQSLAFIRRSDELLHNVNTGKSTTNIMITAIIIVIIVVLLSLIAIGLLLYCRAKNTPVTLSKDQLSGINNIAFSK

SEQ ID NO: 8739 - protein, 574 aa, Artificial Sequence
  derived and/or modified protein sequence (wt) from HRSV__AMT77710.1__F0
MELLIRRSSAIFLTLAINTLYLTSSQNITEEFYQSTCSAVSRGYFSALRTGWYTSVITIELSNIKETRCNGTDTKVKLIKQELDKYKNAVTELQLLMQNTPAANNRARREAPQYMNYTINTTKNPNASISKRRKRRFLGFLLGVGSAIASGIAVSKVLHLEGEVNKIKNALLSTNKAVVSLSNGVSVLTSKVLDLKNYINNQLLPIVNQQSCRISNIETVIEFQQKNSRLLEITREFSVNAGVTTPLSTYMLTNSELLSLINDMPITNDQKKLMSSNVQIVRQQSYSIMSIIKEEVLAYVVQLPIYGVIDTPCWKLHTSPLCTTNIKEGSNICLTRTDRGWYCDNAGSVSFFPQADTCKVQSNRVFCDTMNSLTLPSEVSLCNTDIFNSKYDCKIMTSKTDISSSVITSLGAIVSCYGKTKCTASNKNRGIIKTFSNGCDYVSNKGVDTVSVGNTLYYVNKLEGKNLYVKGEPIINYYDPLVFPSDEFDASISQVNEKINQSLAFIRRSDELLHNVNTGKSTTNIMITAIIIVIIVVLLSLIAIGLLLYCKAKNTPVTLSKDQLSGINNIAFSK

SEQ ID NO: 8740 - protein, 574 aa, Artificial Sequence
  derived and/or modified protein sequence (wt) from HRSV__AMT77501.1__F0
MELPILKTNAITTILAAVTLCFASSQNITEEFYQSTCSAVSKGYLSALRTGWYTSVITIELSNIKENKCNGTDAKVKLIKQELDKYKNAVTELQLLMQSTPAANSRARRELPRFMNYTLNNTKNTNVTLSKKRKRRFLGFLLGVGSAIASGIAVSKVLHLEGEVNKIKSALLSTNKAVVSLSNGVSVLTSKVLDLKNYIDKQLLPIVNKQSCSISNIETVIEFQQKNNRLLEITREFSVNAGVTTPVSTYMLTNSELLSLINDMPITNDQKKLMSSNVQIVRQQSYSIMSIIKEEVLAYVVQLPLYGVIDTPCWKLHTSPLCTTNTKEGSNICLTRTDRGWYCDNAGSVSFFPQAETCKVQSNRVFCDTMNSLTLPSEVNLCNIDIFNPKYDCKIMTSKTDVSSSVITSLGAIVSCYGKTKCTASNKNRGIIKTFSNGCDYVSNKGVDTVSVGNTLYYVNKQEGKSLYVKGEPIINFYDPLVFPSDEFDASISQVNEKINQSLAFIRKSDELLHNVNAGKSTTNIMITTIIIVIIVILLALIAVGLLLYCKARSTPVTLNKDQLSGINNIAFSN

SEQ ID NO: 8741 - protein, 574 aa, Artificial Sequence
  derived and/or modified protein sequence (wt) from HRSV__AMT77424.1__F0
MELLIHRSSAIFLTFAINTLYLTSSQNITEEFYQSTCSAVSRGYLSALRTGWYTSVITIELSNIKETKCNGTDTKVKLIKQELDKYKNAVTELQLLMQNTPAANNRARREAPQYMNYTINTTKNLNVSISKKRKRRFLGFLLGVGSAIASGIAVSKVLHLEGEVNKIKNALLATNKAVVSLSNGVSVLTSKVLDLKNYINNQLLPIVNQQSCRISNIETVIEFQQKNSRLLEITREFSVNAGVTTPLSTYMLTNSELLSLINDMPITNDQKKLMSSNVQIVRQQSYSIMSIIKEEVLAYVVQLPIYGVIDTPCWKLHTSPLCTTNIKEGSNICLTRTDRGWYCDNAGSVSFFPQADTCKVQSNRVFCDTMNSLTLPSEVSLCNTDIFNSKYDCKIMTSKTDISSSVITSLGAIVSCYGKTKCTASNKNRGIIKTFSNGCDYVSNKGVDTVSVGNTLYYVNKLEGKNLYVKGEPIINYYDPLVFPSDEFDASISQVNKKINQSLAFIRRSDELLHNVNTGKSTTNIMITAIIIVIIVVLLSLIAIGLLLYCKAKNTPVTLSKDQLSGINNIAFSK

SEQ ID NO: 8742 - protein, 574 aa, Artificial Sequence
  derived and/or modified protein sequence (wt) from HRSV__AMN91385.1__F0
MELLIHRSSAIFLTLAINTLYLTSSQNITEEFYQSTCSAVSRGYFSALRTGWYTSVITIELSNIKETKCNGTDTKVKLIKQELDKYKNAVTELQLLMQNTPAANNRARREAPQYMNYTINTTKNPNASISKKRKRRFLGFLLGVGSAIASGIAVSKVLHLEGEVNKIKNALLSTNKAVVSLSNGVSVLTSKVLDLKNYINNQLLPIVNQQSCRISNIETVIEFQQKNSRLLEITREFSVNAGVTTPLSTYMLTNSELLSLINDMPITNDQKKLMSSNVQIVRQQSYSIMSIIKEEVLAYVVQLPIYGVIDTPCWKLHTSPLCTTNIKEGSNICLTRTDRGWYCDNAGSVSFFPQADTCKVQSNRVFCDTMNSLTLPSEVSLCNTDIFNSKYDCKIMTSKTDISSSVITSLGAIVSCYGKTKCTASNKNRGIIKTFSNGCDYVSNKGVDTVSVGNTLYYVNKLEGKNLYVKGEPIINYYDPLVFPSDEFDASISQVNEKINQSLAFIRRSDELLHNVNTGKSTTNIMITVIIIVIIVVLLSLIAIGLLLYCKAKNTPVTLSKDQLSGINNIAFSK

SEQ ID NO: 8743 - protein, 574 aa, Artificial Sequence
  derived and/or modified protein sequence (wt) from HRSV__AMN91264.1__F0
MELLIHRSSAIFLTLAINALYLTSSQNITEEFYQSTCSAVSRGYLSALRTGWYTSVITIELSNIKETKCNGTDTKVKLIKQELDKYKNAVTELQLLMQNTPAVNNRARREAPQYMNYTINATKNLNVSISKKRKRRFLGFLLGVGSAIASGIAVSKVLHLEGEVNKIKNALQSTNKAVVSLSNGVSVLTSKVLDLKNYINSQLLPIVNKQSCRISNIETVIEFQQKNSRLLEITREFSVNAGVTTPLSTYMLTNSELLSLINDMPITNDQKKLMSSNVQIVRQQSYSIMSIIKEEVLAYVVQLPIYGVIDTPCWKLHTSPLCTTNIKEGSNICLTRTDRGWYCDNAGSVSFFPQADTCKVQSNRVFCDTMNSLTLPSEVSLCNTDIFNSKYDCKIMTSKTDISSSVITSLGAIVSCYGKTKCTASNKNRGIIKTFSNGCDYVSNKGVDTVSVGNTLYYVNKLEGKNLYVKGEPIINYYDPLVFPSDEFDASISQVNEKINQSLAFIRRSDELLHNVNTGKSTTNIMITAIIIVIIVVLLSLIAIGLLLYCKAKNTPVTLSKDQLSGINNIAFSK

SEQ ID NO: 8744 - protein, 574 aa, Artificial Sequence
  derived and/or modified protein sequence (wt) from HRSV__AMN91242.1__F0
MELLIHRSSAIFLTFAINTLYLTSSQNITEEFYQSTCSAVSRGYLSALRTGWYTSVITIELSNIKETKCNGTDTKVKLIKQELDKYKNAVTELQLLMQNTPAANNRARREAPQYMNYTINTTKNLNVSISKKRKRRFLGFLLGVGSAIASGIAVSKVLHLEGEVNKIKNALLATNKAVVSLSNGVSVLTSKVLDLKNYINNQLLPIVNQQSCRISNIETVIEFQQKNSRLLEITREFSVNAGVTTPLSTYMLTNSELLSLINDMPITNDQKKLMSSNVQIVRQQSYSIMSIIKEEVLAYVVQLPIYGVIDTPCWKLHTSPLCTTNIKEGSNICLTRTDRGWYCDNAGSVSFFPQADTCKVQSNRVFCDTMNSLTLPSEVSLCNTDIFNSKYDCKIMTSKTDISSSVITSLGAIVSCYGKTKCTASNKNRGIIKTFSNGCDYVSNKGVDTVSVGNTLYYVNKLEGKNLYVKGEPIINYYDPLVFPSDEFDASISQVNEKINQSLAFIRRSDELLHNVNTGKSTTNIMITAIIIVIIVVLLSLIAIGLLLYCKAKNTPVTLSKDQLSGINNIAFSK

SEQ ID NO: 8745 - protein, 574 aa, Artificial Sequence
  derived and/or modified protein sequence (wt) from HRSV__AHX57504.1__F0
MELPILKTNAITTILAAVTLCFASNQNITEEFYQSTCSAVSKGYLSALRTGWYTSVITIELSNIKENKCNGTDAKVKLIKQELDKYKNAVTELQLLMQSTPAANSRARRELPRFMNYTLNNTKNTNVTLSKKRKRRFLGFLLGVGSAIASGIAVSKVLHLEGEVNKIKSALLSTNKAVVSLSNGVSVLTSKVLDLKNYIDKQLLPIVNKQSCSISNIETVIEFQQKNNRLLEITREFSVNAGVTTPVSTYMLTNSELLSLINDMPITNDQKKLMSSNVQIVRQQSYSIMSIIKEEVLAYVVQLPLYGVIDTPCWKLHTSPLCTTNTKEGSNICLTRTDRGWYCDNAGSVSFFPQAETCKVQSNRVFCDTMNSLTLPSEVNLCNIDIFNPKYDCKIMTSKTDVSSSVITSLGAIVSCYGKTKCTASNKNRGIIKTFSNGCDYVSNKGVDTVSVGNTLYYVNKQEGKSLYVKGEPIINFYDPLVFPSDEFDASISQVNEKINQSLAFIRKSDELLHNVNAGKSTTNIMITTIIIVIIVILLALIAVGLLLYCKARSTPVTLSKDQLSGINNIAFSN

SEQ ID NO: 8746 - protein, 574 aa, Artificial Sequence
  derived and/or modified protein sequence (wt) from HRSV__CUS01881.1__F0
MELLIHRSSAIFLTLAINALYLTSSQNITEEFYQSTCSAVSRGYFSALRTGWYTSVITIELSNIKETKCNGTDTKVKLIKQELDKYKNAVTELQLLMQNTPAANNRARREAPQYMNYTINTTKNLNVSISKKRKRRFLGFLLGVGSAIASGIAVSKVLHLEGEVNKIKNALLSTNKAVVSLSNGVSVLTSKVLDLKNYINNQLLPIVNQQSCRITNIETVIEFQQKNSRLLEITREFSVNAGVTTPLSTYMLTNSELLSLINDMPITNDQKKLMSSNVQIVRQQSYSIMSIIKEEVLAYVVQLPIYGVIDTHCWKLHTSPLCTTNIKEGSNICLTRTDRGWYCDNAGSVSFFPQADTCKVQSNRVFCDTMNSLTLPSEVSLCNTDIFNSKYDCKIMTSKTDISSSVITSLGAIVSCYGKTKCTASNKNRGIIKTFSNGCDYVSNKGVDTVSVGNTLYYVNKLEGKNLYVKGEPIINYYDPLVFPSDEFDASISQVNEKINQSLAFIRRSDELLHNVNTGKSTTNIMITAIIIVIIVVLLSLIAIGLLLYCKAKNTPVTLSKDQLSGINNIAFSK

SEQ ID NO: 8747 - protein, 574 aa, Artificial Sequence
  derived and/or modified protein sequence (wt) from HRSV__CUS01870.1__F0
MELLIHRSSAIFLTLAINALYLTSSQNITEEFYQSTCSAVSRGYLSALRTGWYTSVITIELSNIKETKCNGTDTKVKLIKQELDKYKNAVTELQLLMQNTPAANNRARREAPQYMNYTINTTKNPNVSISKKRKRRFLGFLLGVGSAIASGIAVSKVLHLEGEVNKIKNALLSTNKAVVSLSNGVSVLTSKVLDLKNYINNQLLPIVNQQSCRISNIETVIEFQQKNSRLLEITREFSVNAGVTTPLSTYMLTNSELLSLINDMPITNDQKKLMSSNVQIVRQQSYSIMSIIKEEVLAYVVQLPIYGVIDTPCWKLHTSPLCTTNIKEGSNICLTRTDRGWYCDNAGSVSFFPQADTCKVQSNRVFCDTMNSLTLPSEVSLCNTNIFNSKYDCKIMTSKTDISSSVITSLGAIVSCYGKTKCTASNKNRGIIKTFSNGCDYVSNKGVDTVSVGNTLYYVNKLEGKNLYVKGEPIINYYDPLVFPSDEFDASISQVNEKINQSLAFIRRSDELLHNVNTGKSTTNIMITVIIIVIIVVLLSLIAIGLLLYCKAKNTPVTLSKDQLSGINNIAFSK

SEQ ID NO: 8748 - protein, 574 aa, Artificial Sequence
  derived and/or modified protein sequence (wt) from HRSV__AMA67350.1__F0
MELLIHRSSAIFLTLAINALYFTSSQNITEEFYQSTCSAVSRGYFSALRTGWYTSVITIELSNIKETKCNGTDTKVKLIKQELDKYKNAVTELQLLMQNTPAANNRARREAPQYMNYTINTTKNLNVSISKKRKRRFLGFLLGVGSAIASGIAVSKVLHLEGEVNKIKNALLSTNKAVVSLSNGVSVLTSKVLDLKNYINNQLLPIVNQQSCRISNIETVIEFQQKNSRLLEITREFSVNAGVTTPLSTYMLTNSELLSLINDMPITNDQKKLMSSNVQIVRQQSYSIMSIIKEEVLAYVVQLPIYGVIDTHCWKLHTSPLCTTNIKEGSNICLTRTDRGWYCDNAGSVSFFPQADTCKVQSNRVFCDTMNSLTLPSEVSLCNTDIFNSKYDCKIMTSKTDISSSVITSLGAIVSCYGKTKCTASNKNRGIIKTFSNGCDYVSNKGVDTVSVGNTLYYVNKLEGKNLYVKGEPIINYYDPLVFPSDEFDASISQVNEKINQSLAFIRRSDELLHNVNTGKSTTNIMITTIIIVIIVVLLSLIAIGLLLYCKAKNTPVTLSKDQLSGINNIAFSK

SEQ ID NO: 8749 - protein, 574 aa, Artificial Sequence
  derived and/or modified protein sequence (wt) from HRSV__AMA67251.1__F0
MELLIHRSSAIFLTLAINALCLTSSQNITEEFYQSTCSAVSRGYFSALRTGWYTSVITIELSNIKETKCNGTDTKVKLIKQELDKYKNAVTELQLLMQNTPAANNRARREAPQYMNYTINTTKNLNVSISKKRKRRFLGFLLGVGSAIASGIAVSKVLHLEGEVNKIKNALLSTNKAVVSLSNGVSVLTSKVLDLKNYINNQLLPIVNQQSCRISNIETVIEFQQKNSRLLEITREFSVNAGVTTPLSTYMLTNSELLSLINDMPITNDQKKLMSSNVQIVRQQSYSIMSIIKEEVLAYVVQLPIYGVIDTPCWKLHTSPLCTTNIKEGSNICLTRTDRGWYCDNAGSVSFFPQADTCKVQSNRVFCDTMNSLTLPSEVSLCNTDIFNSKYDCKIMTSKTDISSSVITSLGAIVSCYGKTKCTASNKNRGIIKTFSNGCDYVSNKGVDTVSVGNTLYYVNKLEGKNLYVKGEPIINYYDPLVFPSDEFDASISQVNEKINQSLAFIRRSDELLHNVNTGKSTTNIMITTIIIVIIVVLLSLIAIGLLLYCKAKNTPVTLSKDQLSGINNIAFSK

SEQ ID NO: 8750 - protein, 574 aa, Artificial Sequence
  derived and/or modified protein sequence (wt) from HRSV__AMA67262.1__F0
MELPIIKANAITTILIAVTFCFASSQNITEEFYQSTCSAVSKGYLSALRTGWYTSVITIELSNIKENKCNGTDAKVKLIKQELDKYKNAVTELQLLMQSTPAANNRARRELPRVMNYTLNNAKKTNVTLSKKRKRRFLGFLLGVGSAIASGIAVSKVLHLEGEVNKIKSALLSTNKAVVSLSNGVSVLTSKVLDLKNYIDKQLLPIVNKQSCSISNIETVIEFQQKNNRLLEITREFSVNAGVTTPVSTYMLTNSELLSLINDMPITNDQKKLMSNNVQIVRQQSYSIMSIIKEEVLAYVVQLPLYGVIDTPCWKLHTSPLCTTNTKEGSNICLTRTDRGWYCDNAGSVSFFPQADTCKVQSNRVFCDTMNSLTLPSEVNLCNIDIFNPKYDCKIMTSKTDVSSSVITSLGAIVSCYGKTKCTASNKNRGIIKTFSNGCDYVSNKGVDTVSVGNTLYYVNKQEGKSLYVKGEPIINFYDPLVFPSDEFDASISQVNEKINQSLAFIRKSDELLHNVNAGKSTTNIMITTIIIVIIVILLSLIAVGLLLYCKARSTPVTLSKDQLSGINNIAFSN

SEQ ID NO: 8751 - protein, 574 aa, Artificial Sequence
  derived and/or modified protein sequence (wt) from HRSV__AMA67229.1__F0
MELPILKANAITTILIAVTFCFASSQNITEEFYQSTCSAVSKGYFSALRTGWYTSVITIELSNIKENKCNGTDAKVKLIKQELDKYKNAVTELQLLMQSTPAANNRARRELPRFMNYTLNNAKKTNVTLSKKRKRRFLGFLLGVGSAIASGIAVSKVLHLEGEVNKIKSALLSTNKAVVSLSNGVSVLTSKVLDLKNYIDKQLLPIVNKQSCSISNIETVIEFQQKNNRLLEITREFSVNAGVTTPVSTYMLTNSELLSLINDMPITNDQKKLMSNNVQIVRQQSYSIMSIIKEEVLAYVVQLPLYGVIDTPCWKLHTSPLCTTNTKEGSNICLTRTDRGWYCDNAGSVSFFPQAETCKVQSNRVFCDTMNSLTLPSEVNLCNVDIFNPKYDCKIMTSKTDVSSSVITSLGAIVSCYGKTKCTASNKNRGIIKTFSNGCDYVSNKGVDTVSVGNTLYYVNKQEGKSLYVKGEPIINFYDPLVFPSDEFDASISQVNEKINQSLAFIRKSDELLHNVNAGKSTTNIMITTIIIVIIVILLSLIAVGLLLYCKARSTPVTLSKDQLSGINNIAFSN

SEQ ID NO: 8752 - protein, 574 aa, Artificial Sequence
  derived and/or modified protein sequence (wt) from HRSV__AMA67196.1__F0
MELPIIKANAITTILIAVTFCFASSQNITEEFYQSTCSAVSKGYLSALRTGWYTSVITIELSNIKENKCNGTDAKVKLIKQELDKYKNAVTELQLLMQSTPAANNRARRELPRFMNYTLNNAEKTNVTLSKKRKRRFLGFLLGVGSAIASGIAVSKVLHLEGEVNKIKSALLSTNKAVVSLSNGVSVLTSKVLDLKNYIDKQLLPIVNKQSCSISNIETVIEFQQKNNRLLEITREFSVNAGVTTPVSTYMLTNSELLSLINDMPITNDQKKLMSNNVQIVRQQSYSIMSIIKEEVLAYVVQLPLYGVIDTPCWKLHTSPLCTTNTKEGSNICLTRTDRGWYCDNAGSVSFFPQADTCKVQSNRVFCDTMNSLTLPSEVNLCNIDIFNPKYDCKIMTSKTDVSSSVITSLGAIVSCYGKTKCTASNKNRGIIKTFSNGCDYVSNKGVDTVSVGNTLYYVNKQEGKSLYVKGEPIINFYDPLVFPSDEFDASISQVNEKINQSLAFIRKSDELLHNVNAGKSTTNIMITTIIIVIIVILLSLIAVGLLLYCKARSTPVTLSKDQLSGINNIAFSN

SEQ ID NO: 8753 - protein, 574 aa, Artificial Sequence
  derived and/or modified protein sequence (wt) from HRSV__AMA67130.1__F0
MELPIIKANAITTILIAVTFCFASSQNITEEFYQSTCSAVSKGYLSALRTGWYTSVITIELSNIKENKCNGTDAKVKLIKQELDKYKNAVTELQLLMQSTPAANNRARRELSRFMNYTLNNAKKTNVTLSKKRKRRFLGFLLGVGSAIASGIAVSKVLHLEGEVNKIKSALLSTNKAVVSLSNGVSVLTSKVLDLKNYIDKQLLPIVNKQSCSISNIETVIEFQQKNNRLLEITREFSVNAGVTTPVSTYMLTNSELLSLINDMPITNDQKKLMSNNVQIVRQQSYSIMSIIKEEVLAYVVQLPLYGVIDTPCWKLHTSPLCTTNTKEGSNICLTRTDRGWYCDNAGSVSFFPQADTCKVQSNRVFCDTMNSLTLPSEVNLCNIDIFNPKYDCKIMTSKTDVSSSVITSLGAIVSCYGKTKCTASNKNRGIIKTFSNGCDYVSNKGVDTVSVGNTLYYVNKQEGKSLYVKGEPIINFYDPLVFPSDEFDASISQVNEKINQSLAFIRKSDELLHNVNAGKSTTNIMITTIIIVIIVILLSLIAVGLLLYCKARSTPVTLSKDQLSGINNIAFSN

SEQ ID NO: 8754 - protein, 574 aa, Artificial Sequence
  derived and/or modified protein sequence (wt) from HRSV__AMA67185.1__F0
MELPILKTNAITTILAAVTLCLASSQNITEEFYQSTCSAVSKGYLSALRTGWYTSVITIELSNIKENKCNGTDAKVKLIKQELDKYKNAVTELQLLMQNTPAANNRARRELPRFMNYTLNNTKNTNATLSKKRKRRFLGFLLGVGSAIASGIAVSKVLHLEGEVNKIKSALLSTNKAVVSLSNGVSVLTSKVLDLKNYIDKQLLPIVNKQSCSISNIETVIEFQQKNNRLLEITREFSVNAGVTTPVSTYMLTNSELLSLINDMPITNDQKKLMSNNVQIVRQQSYSIMSIIKEEVLAYVVQLPLYGVIDTPCWKLHTSPLCTTNTKEGSNICLTRTDRGWYCDNAGSVSFFPQAETCKVQSNRVFCDTMNSLTLPSEVNLCNIDIFNPKYDCKIMTSKTDVSSSVITSLGAIVSCYGKTKCTASNKNRGIIKTFSNGCDYVSNKGVDTVSVGNTLYYVNKQEGKSLYVKGEPIINFYDPLVFPSDEFDASISQVNEKINQSLAFIRKSDELLHNVNAGKSTTNIMITTIIIVIIVILLSLIAVGLLLYCKARSTPVTLSKDQLSGINNIAFSN

SEQ ID NO: 8755 - protein, 574 aa, Artificial Sequence
  derived and/or modified protein sequence (wt) from HRSV__AMA67163.1__F0
MELPIIKANAITTILIAVTFCFASSQNITEEFYQSTCSAVSKGYLSALRTGWYTSVITIELSNIKENKCNGTDAKVKLIKQELDKYKNAVTELQLLMQSTPAANNRARRELPRFMNYTLNNAKKTNVTLSKKRKRRFLGFLLGVGSAIASGIAVSKVLHLEGEVNKIKSALLSTNKAVVSLSNGVSVLTSKVLDLKNYIDKQLLPIVNKQSCSISNIETVIEFQQKNNRLLEITREFSVNAGVTTPVSTYMLTNSELLSLINDMPITNDQKKLMSNNVQIVRQQSYSIMSIIKEEVLAYVVQLPLYGVIDTPCWKLHTSPLCTTNTKEGSNICLTRTDRGWYCDNAGSVSFFPQADTCKVQSNRVFCDTMNSLTLPSEVNLCNIDIFNPKYDCKIMTSKTDVSSSVITSLGAIVSCYGKTKCTASNKNRGIIKTFSNGCDYVSNRGVDTVSVGNTLYYVNKQEGKSLYVKGEPIINFYDPLVFPSDEFDASISQVNEKINQSLAFIRKSDELLHNVNAGKSTTNIMITTIIIVIIVILLSLIAVGLLLYCKARSTPVTLSKDQLSGINNIAFSN

SEQ ID NO: 8756 - protein, 574 aa, Artificial Sequence
  derived and/or modified protein sequence (wt) from HRSV__AMA67086.1__F0
MELLIHRSSAIFLTLAINALYLTSSQNITEEFYQSTCSAVSRGYFSALRTGWYTSVITIELSNIKETKCNGTDTKVKLIKQELDKYKNAVTELQLLMQNTPAANNRARREAPQYMNYTINTTKNLNVSISKKRKRRFLGFLLGIGSAIASGIAVSKVLHLEGEVNKIKNALLSTNKAVVSLSNGVSVLTSKVLDLKNYINNQLLPIVNQQSCRISNIETVIEFQQKNSRLLEITREFSVNAGVTTPLSTYMLTNSELLSLINDMPITNDQKKLMSSNVQIVRQQSYSIMSIIKEEVLAYVVQLPIYGVIDTPCWKLHTSPLCTTNIKEGSNICLTRTDRGWYCDNAGSVSFFPQADTCKVQSNRVFCDTMNSLTLPSEVSLCNTDIFNSKYDCKIMTSKTDISSSVITSLGAIVSCYGKTKCTASNKNRGIIKTFSNGCDYVSNKGVDTVSVGNTLYYVNKLEGKNLYVKGEPIINYYDPLVFPSDEFDASISQVNEKINQSLAFIRRSDELLHNVNTGKSTTNIMITAIIIVIIVVLLSLIAIGLLLYCKAKNTPVTLSKDQLSGINNIAFSK

SEQ ID NO: 8757 - protein, 574 aa, Artificial Sequence
  derived and/or modified protein sequence (wt) from HRSV__AMA67075.1__F0
MELPILKTNAITTILAAVTLCFASSQNITEEFYQSTCSAVSKGYLSALRTGWYTSVITIELSNIKENKCNGTDAKVKLIKQELDKYKNAVTELQLLMQSTPAANNRARRELPRFMNYTLNNTKNTNVTLSKKRKRRFLGFLLGVGSAIASGIAVSKVLHLEGEVNKIKSALLSTNKAVVSLSNGVSVLTSKVLDLKNYIDKQLLPIVNKQSCSISNIETVIEFQQKNNRLLEITREFSVNAGVTTPVSTYMLTNSELLSLINDMPITNDQKKLMSNNVQIVRQQSYSIMSIVKEEVLAYVVQLPLYGVIDTPCWKLHTSPLCTTNTKEGSNICLTRTDRGWYCDNAGSVSFFPQAETCKVQSNRVFCDTMNSLTLPSEVNLCNIDIFNPKYDCKIMTSKTDVSSSVITSLGAIVSCYGKTKCTASNKNRGIIKTFSNGCDYVSNKGVDTVSVGNTLYYVNKQEGKSLYVKGEPIINFYDPLVFPSDEFDASISQVNEKINQSLAFIRKSDELLHNVNAGKSTTNIMITTIIIVIIVILLSLIAVGLLLYCKARSTPVTLSKDQLSGINNIAFSN

SEQ ID NO: 8758 - protein, 574 aa, Artificial Sequence
  derived and/or modified protein sequence (wt) from HRSV__AMA66998.1__F0
MELPILKTNAITTILAAATLCFTSSQNITEEFYQSTCSAVSKGYLSALRTGWYTSVITIELSNIKENKCNGTDAKVKLIKQELDKYKNAVTELQLLMQSTPAANNRARRELPRFMNYTLDNTKNTNVTLSKKRKRRFLGFLLGVGSAIASGIAVSKVLHLEGEVNKIKSALLSTNKAVVSLSNGVSVLTSKVLDLKNYIDKQLLPIVNKQSCSISNIETVIEFQQKNNRLLEITREFSVNAGVTTPVSTYMLTNSELLSLINDMPITNDQKKLMSNNVQIVRQQSYSIMSIIKEEVLAYVVQLPLYGVIDTPCWKLHTSPLCTTNTKEGSNICLTRTDRGWYCDNAGSVSFFPQAETCKVQSNRVFCDTMNSLTLPSEVNLCNIDIFNPKYDCKIMTSKTDVSSSVITSLGAIVSCYGKTKCTASNKNRGIIKTFSNGCDYVSNKGVDTVSVGNTLYYVNKQEGKSLYVKGEPIINFYDPLVFPSDEFDASISQVNEKINQSLAFIRKSDELLHNVNAGKSTTNIMITTIIIVIIVILLSLIAVGLLLYCKARSTPVTLSKDQLSGINNIAFSN

SEQ ID NO: 8759 - protein, 574 aa, Artificial Sequence
  derived and/or modified protein sequence (wt) from HRSV__AMA66987.1__F0
MELPILKTNAITTILAAVTLCFASSQNITEEFYQSTCSAVSKGYLSALRTGWYTSVITIELSNIKENKCNGTDAKVKLIKQELDKYKNAVTELQLLMQSTPAANNRARRELPKFMNYTLNNTKNTNVTLSKKRKRRFLGFLLGVGSAIASGIAVSKVLHLEGEVNKIKSALLSTNKAVVSLSNGVSVLTSKVLDLKNYIDKQLLPIVNKQSCSISNIETVIEFQQKNNRLLEITREFSVNAGVTTPVSTYMLTNSELLSLINDMPITNDQKKLMSNNVQIVRQQSYSIMSIIKEEVLAYVVQLPLYGVIDTPCWKLHTSPLCTTNTKEGSNICLTRTDRGWYCDNAGSVSFFPQAETCKVQSNRVFCDTMNSLTLPSEVNLCNIDIFNPKYDCKIMTSKTDVSSSVITSLGAIVSCYGKTKCTASNKNRGIIKTFSNGCDYVSNKGVDTVSVGNTLYYVNKQEGKSLYVKGEPIINFYDPLVFPSDEFDASISQVNEKINQSLAFIRKSDELLHNVNAGKSTTNIMITTIIIVIIVILLSLIAVGLLLYCKARSTPVTLSKDQLSGINNIAFSN

SEQ ID NO: 8760 - protein, 574 aa, Artificial Sequence
  derived and/or modified protein sequence (wt) from HRSV__AMA66976.1__F0
MELPILKTNAITTILAAVTLCFASSQNITEEFYQSTCSAVSKGYLSALRTGWYTSVITIELSNIKENKCNGTDAKVKLIKQELDKYKNAVTELQLLMQSTPAANNRARRELPRFMNYTLNNTKNTNVTLSKKRKRRFLGFLLGVGSAIASGIAVSKVLHLEGEVNKIKSALLSTNKAVVSLSNGVSVLTSKVLDLKNYIDKQLLPIVNKQSCSISNIETVIEFQQKNNRLLEITREFSVNAGVTTPVSTYMLTNSELLSLINDMPITNDQKKLMSNNVQIVRQQSYSIMSIIKEEVLAYVVQLPLYGVIDTPCWKLHTSPLCTTNTKEGSNICLTRTDRGWYCDNAGSVSFFPQAETCKVQSNRVFCDTMNSLTLPSEVNLCNIDIFNPKYDCKIMTSKTDVSSSVITSLGAIVSCYGKTKCTASNKNRGIIKTFSNGCDYVSNKGVDTVSVGNTLYYVNKQEGKSLYVKGEPIINFYDPLVFPSDEFDASISQVNEKINQSLAFIRKSDELLHNVNAGKSTTNIMITTIIIVIIVILLSLIAIGLLLYCKARSTPVTLSKDQLSGINNIAFSN

SEQ ID NO: 8761 - protein, 574 aa, Artificial Sequence
  derived and/or modified protein sequence (wt) from HRSV__AMA66965.1__F0
MELLIHKSSAILLTLAINALYLTSSQNITEEFYQSTCSAVSRGYFSALRTGWYTSVITIELSNIKETKCNGTDTKVKLIKQELDKYKNAVTELQLLMQNTPAANNRARREAPQHMNYTINTTKNLNVSISKKRKRRFLGFLLGVGSAIASGIAVSKVLHLEGEVNKIKNALLSTNKAVVSLSNGVSVLTSKVLDLKNYINNQLLPIVNKQSCRISNIETVIEFQQKNSRLLEITREFSVNAGVTTPLSTYMLTNSELLSLINDMPITNDQKKLMSSNVQIVRQQSYSIMSIIKEEVLAYVVQLPIYGVIDTPCWKLHTSPLCTTNIKEGSNICLTRTDRGWYCDNAGSVSFFPQADTCKVQSNRVFCDTMNSLTLPSEVSLCNTDIFNSKYDCKIMTSKTDISSSVITSLGAIVSCYGKTKCTASNKNRGIIKTFSNGCDYVSNKGVDTVSVGNTLYYVNKLEGKNLYVKGEPIINYYDPLVFPSDEFDASISQVNEKINQSLAFIRRSDELLHNVNTGKSTTNIMITTIIIVIIVVLLSLMAIGLLLYCKAKNTPVTLSKDQLSGINNIAFSK

SEQ ID NO: 8762 - protein, 574 aa, Artificial Sequence
  derived and/or modified protein sequence (wt) from HRSV__AMA66921.1__F0
MELPILKTNAITTILAAATLCFVSSQNITEEFYQSTCSAVSKGYLSALRTGWYTSVITIELSNIKENKCNGTDAKVKLIKQELDKYKNAVTELQLLMQSTPAANNRARRELPRFMNYTLNNTKNTNVTLSKKRKRRFLGFLLGVGSAIASGIAVSKVLHLEGEVNKIKSALLSTNKAVVSLSNGVSVLTSKVLDLKNYIDKQLLPIVNKQSCSISNIETVIEFQQKNNRLLEITREFSVNAGVTTPVSTYMLTNSELLSLINDMPITNDQKKLMSNNVQIVRQQSYSIMSIIKEEVLAYVVQLPLYGVIDTPCWKLHTSPLCTTNTKEGSNICLTRTDRGWYCDNAGSVSFFPQAETCKVQSNRVFCDTMSSLTLPSEVNLCNIDIFNPKYDCKIMTSKTDVSSSVITSLGAIVSCYGKTKCTASNKNRGIIKTFSNGCDYVSNKGVDTVSVGNTLYYVNKQEGKSLYVKGEPIINFYDPLVFPSDEFDASISQVNEKINQSLAFIRKSDELLHNVNAGKSTTNIMITTIIIVIIVILLSLIAVGLLLYCKARSTPVTLSKDQLSGINNIAFSN

SEQ ID NO: 8763 - protein, 574 aa, Artificial Sequence
  derived and/or modified protein sequence (wt) from HRSV__AMA66844.1__F0
MELLIYRSSAIFLTLAINALYLTSSQNITEEFYQSTCSAVSRGYFSALRTGWYTSVITIELSNIKETKCNGTDTKVKLIKQELDKYKNAVTELQLLMQNTPAANNRARREAPQYTNYTINTTKNLNVSISKKRKRRFLGFLLGVGSAIASGIAVSKVLHLEGEVNKIKNALLSTNKAVVSLSNGVSVLTSKVLDLKNYINNQLLPIVNKQSCRISNIETVIEFQQKNSRLLEITREFSVNAGVTTPLSTYMLTNSELLSLINDMPITNDQKKLMSSNAQIVRQQSYSIMSIIKEEVLAYVVQLPIYGVIDTPCWKLHTSPLCTTNIKEGSNICLTRTDRGWYCDNAGSVSFFPQADTCKVQSNRVFCDTMNSLTLPSEVSLCNTDIFNSKYDCKIMTSKTDISSSVITSLGAIVSCYGKTKCTASNKNRGIIKTFSNGCDYVSNKGVDTVSVGNTLYYVNKLEGKNLYVKGEPIINYYDPLVFPSDEFDASISQVNEKINQSLAFIRRSDELLHNVNTGKSTTNIMITTIIIVIIVVLLSLIAIGLLLYCKAKNTPVTLSKDQLSGINNIAFSK

SEQ ID NO: 8764 - protein, 574 aa, Artificial Sequence
  derived and/or modified protein sequence (wt) from HRSV__AMA66833.1__F0
MELPILKTNAITTILAAVTLCFASSQNITEEFYQATCSAVSKGYLSALRTGWYTSVITIELSNIKENKCNGTDAKVKLIKQELDKYKNAVTELQLLMQSTPAANNRARRELPKFMNYTLNNTKNTNVTLSKKRKRRFLGFLLGVGSAIASGIAVSKVLHLEGEVNKIKSALLSTNKAVVSLSNGVSVLTSKVLDLKNYIDKQLLPIVNKQSCSISNIETVIEFQQKNNRLLEITREFSVNAGVTTPVSTYMLTNSELLSLINDMPITNDQKKLMSNNVQIVRQQSYSIMSIIKEEVLAYVVQLPLYGVIDTPCWKLHTSPLCTTNTKEGSNICLTRTDRGWYCDNAGSVSFFPQAETCKVQSNRVFCDTMNSLTLPSEVNLCNIDIFNPKYDCKIMTSKTDVSSSVITSLGAIVSCYGKTKCTASNKNRGIIKTFSNGCDYVSNKGVDTVSVGNTLYYVNKQEGKSLYVKGEPIINFYDPLVFPSDEFDASISQVNEKINQSLAFIRKSDELLHNVNAGKSTTNIMITTIIIVIIVILLSLIAVGLLLYCKARSTPVTLSKDQLSGINNIAFSN

SEQ ID NO: 8765 - protein, 574 aa, Artificial Sequence
  derived and/or modified protein sequence (wt) from HRSV__AMA66624.1__F0
MELLIHRSSAIFLTLAINALYLTSSQNITEEFYQSTCSAVSRGYFSALRTGWYTSVITIELSNIKETKCNGTDTKVKLIKQELDKYKNAVTELQLLMQKTPAVNNRARREAPQHMNYTINTTKNLNVSISKKRKRRFLGFLLGVGSAIASGIAVSKVLHLEGEVNKIKNALLSTNKAVVSLSNGVSVLTSKVLDLKNYINNQLLPIVNKQSCRISNIETVIEFQQKNSRLLEITREFSVNAGVTTPLSTYMLTNSELLSLINDMPITNDQKKLMSSNVQIVRQQSYSIMSIIKEEVLAYVVQLPIYGVIDTHCWKLHTSPLCTTNIKEGSNICLTRTDRGWYCNNAGSVSFFPQADTCKVQSNRVFCDTMNSLTLPSEVSLCNTDIFNSKYDCKIMTSKTDISSSVITSLGAIVSCYGKTKCTASNKNRGIIKTFSNGCDYVSNKGVDTVSVGNTLYYVNKLEGKNLYVKGEPIINYYDPLVFPSDEFDASISQVNEKINQSLAFIRRSDELLHNVNTGKSTTNIMITTIIIVIIVVLLSLIAIGLLLYCKAKNTPVTLSKDQLSGINNIAFSK

SEQ ID NO: 8766 - protein, 574 aa, Artificial Sequence
  derived and/or modified protein sequence (wt) from HRSV__AMA66613.1__F0
MELLIHRSSAIFLTLAINALYLTSSQNITEEFYQSTCSAVSRGYFSALRTGWYTSVITIELSNIKETKCNGTDTKVKLIKQELDKYKNAVTELQLLMQNTPAANNRARREAPQYTNYTINTTKNLNVSISKKRKRRFLGFLLGVGSAIASGIAVSKVLHLEGEVNKIKSALLSTNKAVVSLSNGVSVLTSKVLDLKNYINNQLLPIVNQQSCRISNIETVIEFQQKNSRLLEITREFSVNAGVTTPLSTYMLTNSELLSLINDMPITNDQKKLMSSNVQIVRQQSYSIMSIIKEEVLAYVVQLPIYGVIDTPCWKLHTSPLCTTNIKEGSNICLTRTDRGWYCDNAGSVSFFPQADTCKVQSNRVFCDTMNSLTLPSEVSLCNTDIFNSKYDCKIMTSKTDISSSVITSLGAIVSCYGKTKCTASNKNRGIIKTFSNGCDYVSNKGVDTVSVGNTLYYVNKLEGKNLYVKGEPIINYYDPLVFPSDEFDASISQVNEKINQSLAFIRRSDELLHNVNTGKSTTNIMITTIIIVIIVVLLSLIAIGLLLYCKAKNTPVTLSKDQLSGINNIAFSK

SEQ ID NO: 8767 - protein, 574 aa, Artificial Sequence
  derived and/or modified protein sequence (wt) from HRSV__AMA66591.1__F0
MKLLIHRSSAIFLTLAINALYLTSSQNITEEFYQSTCSAVSRGYFSALRTGWYTSVITIELSNIKETKCNGTDTKVKLIKQELDKYKNAVTELQLLMQNTPAANNRARREAPQYMNYTINTTKNLNVSISKKRKRRFLGFLLGVGSAIASGIAVSKVLHLEGEVNKIKNALLSTNKAVVSLSNGVSVLTSKVLDLKNYINNQLLPIVNQQSCRISNIETVIEFQQKNSRLLEITREFSVNAGVTTPLSTYMLTNSELLSLINDMPITNDQKKLMSSNVQIVRQQSYSIMSIIKEEVLAYVVQLPIYGVIDTPCWKLHTSPLCTTNIKEGSNICLTRTDRGWYCDNAGSVSFFPQADTCKVQSNRVFCDTMNSLTLPSEVSLCNTDIFNSKYDCKIMTSKTDISSSVITSLGAIVSCYGKTKCTASNKNRGIIKTFSNGCDYVSNKGVDTVSVGNTLYYVNKLEGKNLYVKGEPIINYYDPLVFPSDEFDASISQVNEKINQSLAFIRRSDELLHNVNTGKSTTNIMITTIIIVIIVVLLSLIAIGLLLYCKAKNTPVTLSKDQLSGINNIAFSK

SEQ ID NO: 8768 - protein, 574 aa, Artificial Sequence
  derived and/or modified protein sequence (wt) from HRSV__AMA66569.1__F0
MELLIHRSSAIFLTIAINALYLTSSQNITEEFYQSTCSAVSRGYFSALRTGWYTSVITIELSNIKETKCNGTDTKVKLIKQELDKYKNAVTELQLLMQNTPAANNRARREAPQYMNHTINTTKNLNVSISKKRKRRFLGFLLGVGSAIASGIAVSKVLHLEGEVNKIKNALLSTNKAVVSLSNGVSVLTSKVLDLKNYINNQLLPIVNQQSCRISNIETVIEFQQKNSRLLEITREFSVNAGVTTPLSTYMLTNSELLSLINDMPITNDQKKLMSSNVQIVRQQSYSIMSIIKEEVLAYVVQLPIYGVIDTPCWKLHTSPLCTTNIKEGSNICLTRTDRGWYCDNAGSVSFFPQADTCKVQSNRVFCDTMNSLTLPSEVSLCNTDIFNSKYDCKIMTSKTDISSSVITSLGAIVSCYGKTKCTASNKNRGIIKTFSNGCDYVSNKGVDTVSVGNTLYYVNKLEGKNLYVKGEPIINYYDPLVFPSDEFDASISQVNEKINQSLAFIRRSDELLHNVNTGKSTTNIMITAIIIVIIVVLLSLIAIGLLLYCKAKNTPVTLSKDQLSGINNIAFSK

SEQ ID NO: 8769 - protein, 574 aa, Artificial Sequence
  derived and/or modified protein sequence (wt) from HRSV__AMA66547.1__F0
MELPIIKANAITTILIAVTFCFASSQNITEEFYQSTCSAVSKGYLSALRTGWYTSVITIELSNIKENKCNGTDAKVKLIKQELDKYKNAVTELQLLMQSTPAANNRARRELPKFMNYTLNNAKKTNVTLSKKRKRRFLGFLLGVGSAIASGIAVSKVLHLEGEVNKIKSALLSTNKAVVSLSNGVSVLTSKVLDLKNYIDKQLLPIVNKQSCSISNIETVIEFQQKNNRLLEITREFSVNAGVTTPVSTYMLTNSELLSLINDMPITNDQKKLMSNNVQIVRQQSYSIMSIIKEEVLAYVVQLPLYGVIDTPCWKLHTSPLCTTNTKEGSNICLTRTDRGWYCDNAGSVSFFPQADTCKVQSNRVFCDTMNSLTLPSEVNLCNIDIFNPKYDCKIMTSKTDVSSSVITSLGAIVSCYGKTKCTASNKNRGIIKTFSNGCDYVSNKGVDTVSVGNTLYYVNKQEGKSLYVKGEPIINFYDPLVFPSDEFDASISQVNEKINQSLAFIRKSDELLHNVNAGKSTTNIMITTIIIVIIVILLSLIAVGLLLYCKARSTPVTLSKDQLSGINNIAFSN

SEQ ID NO: 8770 - protein, 574 aa, Artificial Sequence
  derived and/or modified protein sequence (wt) from HRSV__AMA66503.1__F0
MELLIHRSSAIFLTLAINALYLTSSQNITEEFYQSTCSAVSRGYFSALRTGWYTSVITIELSNIKETKCNGTDTKVKLIKQELDKYKNAVTELQLLMQNTPAANNRARREAPQYMNYTINTTKNLNVSISKKRKRRFLGFLLGVGSAIASGIAVSKVLHLEGEVNKIKNALLSTNKAVVSLSNGVSVLTSKVLDLKNYINNQLLPIVNKQSCRISNIETVIEFQQKNSRLLEITREFSVNAGVTTPLSTYMLTNSELLSLINDMPITNDQKKLMSSNVQIVRQQSYSIMSIIKEEVLAYVVQLPIYGVIDTPCWKLHTSPLCTTNIKEGSNICLTRTDRGWYCDNAGSVSFFPQADTCKVQSNRVFCDTMNSLTLPSEVSLCNTDIFNSKYDCKIMTSKTDISSSVITSLGAIVSCYGKTKCTASNKNRGIIKTFSNGCDYVSNKGVDTVSVGNTLYYVNKLEGKNLYVKGEPIINYYDPLVFPSDEFDASISQVNEKINQSLAFIRRSDELLHNVNTGKSTTNIMITAIIIVIIVVLLSLIAIGLLLYCKAKNTPVTLSKDQLSGINNIAFSK

SEQ ID NO: 8771 - protein, 574 aa, Artificial Sequence
  derived and/or modified protein sequence (wt) from HRSV__AMA66492.1__F0
MELPILKTNAITTILAAVTLCFASSQNITEEFYQSTCSAVSKGYLSALRTGWYTSVITIELSNIKENKCNGTDAKVKLIKQELDKYKNAVTELQLLMQSTPAANNRARRELPRFMNYTLNNTKNTNVTLSKKRKRRFLGFLLGVGSAIASGIAVSKVLHLEGEVNKIKSALLSTNKAVVSLSNGVSVLTSKVLDLKNYIDKQLLPIVNKQSCSISNIETVIEFQQKNNRLLEITREFSVNAGVTTPVSTYMLTNSELLSLINDMPITNDQKKLMSNNVQIVRQQSYSIMSIIKEEVLAYVVQLPLYGVIDTPCWKLHTSPLCTTNTKEGSNICLTRTDRGWYCDNAGSVSFFPQAETCKVQSNRVFCDTMNSLTLPSEVNLCNIDIFNPKYDCKIMTSKTDVSSSVITSLGAIMSCYGKTKCTASNKNRGIIKTFSNGCDYVSNKGVDTVSVGNTLYYVNKQEGKSLYVKGEPIINFYDPLVFPSDEFDASISQVNEKINQSLAFIRKSDELLHNVNVGKSTTNIMITTIIIVIIVILLLLIAVGLFLYCKARSTPVSLSKDQLSGINNIAFSN

SEQ ID NO: 8772 - protein, 574 aa, Artificial Sequence
  derived and/or modified protein sequence (wt) from HRSV__AMA66481.1__F0
MELPIIKANAITTILIAVTFCFASSQNITEEFYQSTCSAVSKGYLSALRTGWYTSVITIELSNIKENKCNGTDAKVKLIKQELDKYKNAVTELQLLMQSTPAANNRARRELPRFMNYTFNNAKKTNVTLSKKRKRRFLGFLLGVGSAIASGIAVSKVLHLEGEVNKIKSALLSTNKAVVSLSNGVSVLTSKVLDLKNYIDKQLLPIVNKQSCSISNIETVIEFQQKNNRLLEITREFSVNAGVTTPVSTYMLTNSELLSLINDMPITNDQKKLMSNNVQIVRQQSYSIMSIIKEEVLAYVVQLPLYGVIDTPCWKLHTSPLCTTNTKEGSNICLTRTDRGWYCDNAGSVSFFPQADTCKVQSNRVFCDTMNSLTLPSEVNLCNIDIFNPKYDCKIMTSKTDVSSSVITSLGAIVSCYGKTKCTASNKNRGIIKTFSNGCDYVSNKGVDTVSVGNTLYYVNKQEGKSLYVKGEPIINFYDPLVFPSDEFDASISQVNEKINQSLAFIRKSNELLHNVNAGKSTTNIMITTIIIVIIVILLSLIAVGLLLYCKARSTPVTLSKDQLSGINNIAFSN

SEQ ID NO: 8773 - protein, 574 aa, Artificial Sequence
  derived and/or modified protein sequence (wt) from HRSV__AMA66448.1__F0
MELLIHRSSAIFLTLAINALYLTSSQNITEEFYQSTCSAVSRGYFSALRTGWYTSVITIELSNIKETKCNGTDTKVKLINQELDKYKNAVTELQLLMQNTPAANNRARREAPRYMNYTINTTKNLNVSISKKRKRRFLGFLLGVGSAIASGIAVSKVLHLEGEVNKIKNALLSTNKAVVSLSNGVSVLTSKVLDLKNYINNQLLPIVNQQSCRISNIETVIEFQQKNSRLLEITREFSVNAGVTTPLSTYMLTNSELLSLINDMPITNDQKKLMSSNVQIVRQQSYSIMSIIKEEVLAYVVQLPIYGVIDTPCWKLHTSPLCTTNIKEGSNICLTRTDRGWYCDNAGSVSFFPQADTCKVQSNRVFCDTMNSLTLPSEVSLCNTDIFNSKYDCKIMTSKTDISSSVITSLGAIVSCYGKTKCTASNKNRGIIKTFSNGCDYVSNKGVDTVSVGNTLYYVNKLEGKNLYVKGEPIINYYDPLVFPSDEFDASISQVNEKINQSLAFIRRSDELLHNVNTGKSTTNIMITAIIIVIIVVLLSLIAIGLLLYCKAKNTPVTLSKDQLSGINNIAFSK

SEQ ID NO: 8774 - protein, 574 aa, Artificial Sequence
  derived and/or modified protein sequence (wt) from HRSV__AMA66415.1__F0
MELLIHRSSAIFLTLAINALYLTSSQNITEEFYQSTCSAVSRGYFSALRTGWYTSVITIELSNIKETKCNGTDTKVKLIKQELDKYKNAVTELQLLMQNTPAANNRARREAPQHMNYTINTTKNLNVSISKKRKRRFLGFLLGVGSAIASGIAVSKVLHLEGEVNKIKNALLSTNKAVVSLSNGVSVLTSKVLDLKNYINNQLLPIVNKQSCRISNIETVIEFQQKNSRLLEITREFSVNAGVTTPLSTYMLTNSELLSLINDMPITNDQKKLMSSNVQIVRQQSYSIMSIIKEEVLAYVVQLPIYGVIDTPCWKLHTSPLCTTNIKEGSNICLTRTDRGWYCDNAGSVSFFPQADTCKVQSNRVFCDTMNSLTLPSEVSLCNTDIFNSKYDCKIMTSKTDISSSVITSLGAIVSCYGKTKCTASNKNRGIIKTFSNGCDYVSNKGVDTVSVGNTLYYVNKLEGKNLYVKGEPIINYYDPLVFPSDEFDASISQVNEKINQSLAFIRRSDELLHNVNTGKSTTNIMITTIIIVIIVVLLSLIAIGLLLYCKAKNTPVTLSKDQLSGINNIAFSK

SEQ ID NO: 8775 - protein, 574 aa, Artificial Sequence
  derived and/or modified protein sequence (wt) from HRSV__AMA66393.1__F0
MELLIHKSSAIFLTLAINALYLTSSQNITEEFYQSTCSAVSRGYFSALRTGWYTSVITIELSNIKETKCNGTDTKVKLIKQELDKYKNAVTELQLLMQNTPAANNRARREAPQHMNYTINTTKNLNVSISKKRKRRFLGFLLGVGSAIASGIAVSKVLHLEGEVNKIKNALLSTNKAVVSLSNGVSVLTSKVLDLKNYINNQLLPIVNKQSCRISNIETVIEFQQKNSRLLEITREFSVNAGVTTPLSTYMLTNSELLSLINDMPITNDQKKLMSSNVQIVRQQSYSIMSIIKEEVLAYVVQLPIYGVIDTPCWKLHTSPLCTTNIKEGSNICLTRTDRGWYCDNAGSVSFFPQADTCKVQSNRVFCDTMNSLTLPSEVSLCNTDIFNSKYDCKIMTSKTDISSSVITSLGAIVSCYGKTKCTASNKNRGIIKTFSNGCDYVSNKGVDTVSVGNTLYYVNKLEGKNLYVKGEPIINYYDPLVFPSDEFDASISQVNEKINQSLAFIRRSDELLHNVNTGKSTTNIMITTIIIVIIVVLLSLMAIGLLLYCKAKNTPVTLSKDQLSGINNIAFSK

SEQ ID NO: 8776 - protein, 574 aa, Artificial Sequence
  derived and/or modified protein sequence (wt) from HRSV__AMA66360.1__F0
MELPIFKTNAITTILAAVTLCFASSQNITEEFYQSTCSAVSKGYLSALRTGWYTSVITIELSNIKENKCNGTDAKVKLIKQELDKYKNAVTELQLLMQSTPAANNRARRELPRFMNYTLNNTKNTNVTLSKKRKRRFLGFLLGVGSAIASGIAVSKVLHLEGEVNKIKSALLSTNKAVVSLSNGVSVLTSKVLDLKNYIDKQLLPIVNKQSCSISNIETVIEFQQKNNRLLEITREFSVNAGVTTPVSTYMLTNSELLSLINDMPITNDQKKLMSNNVQIVRQQSYSIMSIIKEEVLAYVVQLPLYGVIDTPCWKLHTSPLCTTNTKEGSNICLTRTDRGWYCDNAGSVSFFPQAETCKVQSNRVFCDTMNSLTLPSEVNLCNIDIFNPKYDCKIMTSKTDVSSSVITSLGAIVSCYGKTKCTASNKNRGIIKTFSNGCDYVSNKGVDTVSVGNTLYYVNKQEGKSLYVKGEPIINFYDPLVFPSDEFDASISQVNEKINQSLAFIRKSDELLHNVNAGKSTTNIMITTIIIVIIVILLSLIVVGLLLYCKARSTPVTLSKDQLSGINNIAFSN

SEQ ID NO: 8777 - protein, 574 aa, Artificial Sequence
  derived and/or modified protein sequence (wt) from HRSV__AGG39553.1__F0
MELLIHRSSAIFLTLAINALYLTSSQNITEEFYQSTCSAVSRGYFSALRTGWYTSVITIELSNIKETKCNGTDTKVKLIKQELDKYKNAVTELQLLMQNTPAANNRARREAPQYMNYTVNTTKNLNVSISKKRKRRFLGFLLGVGSAIASGIAVSKVLHLEGEVNKIKNALLSTNKAVVSLSNGVSVLTSKVLDLKNYINNQLLPIVNQQSCRISNIETVIEFQQKNSRLLEITREFSVNAGVTTPLSTYMLTNSELLSLINDMPITNDQKKLMSSNVQIVRQQSYSIMSIIKEEVLAYVVQLPIYGVIDTPCWKLHTSPLCTTNIKEGSNICLTRTDRGWYCDNAGSVSFFPQADTCKVQSNRVFCDTMNSLTLPSEVSLCNTDIFNSKYDCKIMTSKTDISSSVITSLGAIVSCYGKTKCTASNKNRGIIKTFSNGCDYVSNKGVDTVSVGNTLYYVNKLEGKNLYVKGEPIINYYDPLVFPSDEFDASISQVNEKINQSLAFIRRSDELLHNVNTGKSTTNIMITTIIIVIIVVLLSLIAIGLLLYCKAKNTPVTLSKDQLSGINNIAFSK

SEQ ID NO: 8778 - protein, 574 aa, Artificial Sequence
  derived and/or modified protein sequence (wt) from HRSV__AGG39469.1__F0
MELPILKTNAITTILAAATLCFASSQNITEEFYQSTCSAVSKGYLSALRTGWYTSVITIELSNIKENKCNGTDAKVKLIKQELDKYKNAVTELQLLMQSTPAANNRARRELPRFMNYTLNNTKNTNVTLSKKRKRRFLGFLLGVGSAIASGIAVSKVLHLEGEVNKIKSALLSTNKAVVSLSNGVSVLTSKVLDLKNYIDKQLLPIVNKQSCSISNIETVIEFQQKNNRLLEITREFSVNAGVTTPVSTYMLTNSELLSLINDMPITNDQKKLMSNNVQIVRQQSYSIMSIIKEEVLAYVVQLPLYGVIDTPCWKLHTSPLCTTNTKEGSNICLTRTDRGWYCDNAGSVSFFPQAETCKVQSNRVFCDTMNSLTLPSEVNLCNIDIFNPKYDCKIMTSKTDVSSSVITSLGAIVSCYGKTKCTASNKNRGIIKTFSNGCDYVSNKGVDTVSVGNTLYYVNKQEGKSLYVKGEPIINFYDPLVFPSDEFDASISQVNEKINQSLAFIRKSDELLHNVNVGKSTTNIMITTIIIVIIVILLSLIAVGLLLYCKARSTPVTLSKDQLSGINNIAFSN

SEQ ID NO: 8779 - protein, 574 aa, Artificial Sequence
  derived and/or modified protein sequence (wt) from HRSV__AJZ70144.1__F0
MELPILKTNAITTILAAVTLCFASSQNITEEFYQSTCSAVSKGYLSALRTGWYTSVITIELSNIKENKCNGTDAKVKLIKQELDKYKNAVTELQLLMQSTPAANSRARRELPRFMNYTLNNTKNTNVTSSKKRKRRFLGFLLGVGSAIASGVAVSKVLHLEGEVNKIKSALLSTNKAVVSLSNGVSVLTSKVLDLKNYIDKQLLPIVNKQSCSISNIETVIEFQQKNNRLLEITREFSVNAGVTTPVSTYMLTNSELLSLINDMPITNDQKKLMSSNVQIVRQQSYSIMSIIKEEVLAYVVQLPLYGVIDTPCWKLHTSPLCTTNTKEGSNICLTRTDRGWYCDNAGSVSFFPQAETCKVQSNRVFCDTMNSLTLPSEVNLCNIDIFNPKYDCKIMTSKTDVSSSVITSLGAIVSCYGKTKCTASNKNRGIIKTFSNGCDYVSNKGVDTVSVGNTLYYVNKQEGKSLYVKGEPIINFYDPLVFPSDEFDASISQVNEKINQSLAFIRKSDELLHNVNAGKSTTNIMITTIIIVIIVILLALIAVGLLLYCKARSTPVTLSKDQLSGINNIAFSN

SEQ ID NO: 8780 - protein, 574 aa, Artificial Sequence
  derived and/or modified protein sequence (wt) from HRSV__AJZ70166.1__F0
MELPILKTNAITTILAAVTLCFASSQNITEEFYQSTCSAVSKGYLSALRTGWYTSVITIELSNIKENKCNGTDAKVKLIKQELDKYKNAVTELQLLMQSTPAANNRARRELPRFMNYTLNNTKNTNVTLSKKRKRRFLGFLLGVGSAIASGVAVSKVLHLEGEVNKIKSALLSTNKAVVSLSNGVSVLTSKVLDLKNYIDKQLLPIVNKQSCSISNIETVIEFQQKNNRLLEITREFSVNAGVTTPVSTYMLTNSELLSLINDMPITNDQKKLMSSNVQIVRQQSYSIMSIIKEEVLAYVVQLPLYGVIDTPCWKLHTSPLCTTNTKEGSNICLTRTDRGWYCDNAGSVSFFPQAETCKVQSNRVFCDTMNSLTLPSEVNLCNIDIFNPKYDCKIMTSKTDVSSSVITSLGAIVSCYGKTKCTASNKNRGIIKTFSNGCDYVSNKGVDTVSVGNTLYYVNKQEGKSLYVKGEPIINFYDPLVFPSDEFDASISQVNEKINQSLAFIRKSDELLHNVNAGKSTTNIMITTIIIVIIVILLALIAVGLLLYCKARSTPVTLSKDQLSGINNIAFSN

SEQ ID NO: 8781 - protein, 574 aa, Artificial Sequence
  derived and/or modified protein sequence (wt) from HRSV__AJZ70155.1__F0
MELPILKTNAITTILAAVTICFASSQNITEEFYQSTCSAVSKGYLSALRTGWYTSVITIELSNIKENKCNGTDAKVKLIKQELDKYKNAVTELQLLMQSTPAANSRARRELPRFMNYTLNNTKNTNVTLSKKRKRRFLGFLLGVGSAIASGVAVSKVLHLEGEVNKIKSALLSTNKAVVSLSNGVSVLTSKVLDLKNYIDKQLLPIVNKQSCSISNIETVIEFQQKNNRLLEITREFSVNAGVTTPVSTYMLTNSELLSLINDMPITNDQKKLMSSNVQIVRQQSYSIMSIIKEEVLAYVVQLPLYGVIDTPCWKLHTSPLCTTNTKEGSNICLTRTDRGWYCDNAGSVSFFPQAETCKVQSNRVFCDTMNSLTLPSEVNLCNIDIFNPKYDCKIMTSKTDVSSSVITSLGAIVSCYGKTKCTASNKNRGIIKTFSNGCDYVSNKGVDTVSVGNTLYYVNKQEGKSLYVKGEPIINFYDPLVFPSDEFDASISQVNEKINQSLAFIRKSDELLHNVNAGKSTTNIMITTIIIVIIVILLALIAVGLLLYCKARSTPVTLSKDQLSGINNIAFSN

SEQ ID NO: 8782 - protein, 574 aa, Artificial Sequence
  derived and/or modified protein sequence (wt) from HRSV__AJZ70133.1__F0
MELPILKTNAITTILAAVTLCFASSQNITEEFYQSTCSAVSKGYLSALRTGWYTSVITIELSNIKENKCNGTDAKVKLIKQELDKYKNAVTELQLLMQSTPAANSRTRRELPRFMNYTLNNTKNTNVTLSKKRKRRFLGFLLGVGSAIASGVAVSKVLHLEGEVNKIKSALLSTNKAVVSLSNGVSVLTSKVLDLKNYIDKQLLPIVNKQSCSISNIETVIEFQQKNNRLLEITREFSVNAGVTTPVSTYMLTNSELLSLINDMPITNDQKKLMSSNVQIVRQQSYSIMSIIKEEVLAYVVQLPLYGVIDTPCWKLHTSPLCTTNTKEGSNICLTRTDRGWYCDNAGSVSFFPQAETCKVQSNRVFCDTMNSLTLPSEVNLCNIDIFNPKYDCKIMTSKTDVSSSVITSLGAIVSCYGKTKCTASNKNRGIIKTFSNGCDYVSNKGVDTVSVGNTLYYVNKQEGKSLYVKGEPIINFYDPLVFPSDEFDASISQVNEKINQSLAFIRKSDELLHNVNAGKSTTNIMITTIIIVIIVILLALIAVGLLLYCKARSTPVTLSKDQLSGINNIAFSN

SEQ ID NO: 8783 - protein, 574 aa, Artificial Sequence
  derived and/or modified protein sequence (wt) from HRSV__AJZ70067.1__F0
MELPILKTNAITTILAAVTLCFASSQNITEEFYQSTCSAVSKGYLSALRTGWYTSVITIELSNIKENKCNGTDAKVKLIKQELDKYKNAVTELQLLMQSTPAANSRARRELPRFMNYTLNNTKNTNVTLSKKRKRRFLGFLLGVGSAIASGVAVSKVLHLEGEVNKIKSALLSTNKAVVSLSNGVSVLTSKVLDLKNYIDKQLLPIVNKQSCSISNIETVIEFQQKNNRLLEITREFSVNAGVTTPVSTYMLTNSELLSLINDMPITNDQKKLMSNNVQIVRQQSYSIMSIIKEEVLAYVVQLPLYGVIDTPCWKLHTSPLCTTNTKEGSNICLTRTDRGWYCDNAGSVSFFPQAETCKVQSNRVFCDTMNSLTLPSEVNLCNIDIFNPKYDCKIMTSKTDVSSSVITSLGAIVSCYGKTKCTASNKNRGIIKTFSNGCDYVSNKGVDTVSVGNTLYYVNKQEGKSLYVKGEPIINFYDPLVFPSDEFDASISQVNEKINQSLAFIRKSDELLHNVNAGKSTTNIMITTIIIVIIVILLSLIAVGLLLYCKARSTPITLSKDQLSGINNIAFSN

SEQ ID NO: 8784 - protein, 574 aa, Artificial Sequence
  derived and/or modified protein sequence (wt) from HRSV__AJZ69946.1__F0
MELPILKTNAITTILAAVTLCFASSQNITEEFYQSTCSAVSKGYLSALRTGWYTSVITIELSNIKENKCNGTDAKVKLIKQELDKYKNAVTELQLLMQSTPAANSRARRELPRFMNYTLNNTKNTNVTLSKKRKRRFLGFLLGVGSAIASGVAVSKVLHLEGEVNKIKSALLSTNKAVVSLSNGVSVLTSKVLDLKNYIDKQLLPIVNKQSCSISNIETVIEFQQKNNRLLEITREFSVNAGVTTPVSTYMLTNSELLSLINDMPITNDQKKLMSSNVQIVRQQSYSIMSIIKEEVLAYVVQLPLYGVIDTPCWKLHTSPLCTTNTKEGSNICLTRTDRGWYCDNAGSVSFFPQAETCKVQSNRVFCDTMNSLTLPSEVNLCNIDIFNSKYDCKIMTSKTDVSSSVITSLGAIVSCYGKTKCTASNKNRGIIKTFSNGCDYVSNKGVDTVSVGNTLYYVNKQEGKSLYVKGEPIINFYDPLVFPSDEFDASISQVNEKINQSLAFIRKSDELLHNVNAGKSTTNIMITTIIIVIIVILLALIAVGLLLYCKARSTPVTLSKDQLSGINNIAFSN

SEQ ID NO: 8785 - protein, 574 aa, Artificial Sequence
  derived and/or modified protein sequence (wt) from HRSV__AJZ69913.1__F0
MELPILNTNAITTILAAVTLCFTSSQNITEEFYQSTCSAVSKGYLSALRTGWYTSVITIELSNIKENKCNGTDAKVKLIKQELDKYKNAVTELQLLMQSTPAANSRARRELPRFMNYTLNNTKNTNVTLSKKRKRRFLGFLLGVGSAIASGVAVSKVLHLEGEVNKIKSALLSTNKAVVSLSNGVSVLTSKVLDLKNYIDKQLLPIVNKQSCSISNIETVIEFQQKNNRLLEITREFSVNAGVTTPVSTYMLTNSELLSLINDMPITNDQKKLMSNNVQIVRQQSYSIMSIIKEEVLAYVVQLPLYGVIDTPCWKLHTSPLCTTNTKEGSNICLTRTDRGWYCDNAGSVSFFPQAETCKVQSNRVFCDTMNSLTLPSEVNLCNIDIFNPKYDCKIMTSKTDVSSSVITSLGAIVSCYGKTKCTASNKNRGIIKTFSNGCDYVSNKGVDTVSVGNTLYYVNKQEGKSLYVKGEPIINFYDPLVFPSDEFDASISQVNEKINQSLAFIRKSDELLHNVNAGKSTTNIMITTIIIVIIVILLSLIAVGLLLYCKARSTPVTLSKDQLSGINNIAFSN

SEQ ID NO: 8786 - protein, 574 aa, Artificial Sequence
  derived and/or modified protein sequence (wt) from HRSV__AJZ69880.1__F0
MELPILKTNAITTILAAVTLCFASSQNITEEFYQSTCSAVSKGYLSALRTGWYTSVITIELSNIKENKCNGTDAKVKLIKQELDKYKNAVTELQLLMQSTPAANSRARRELPRFMNYTPNNTKNTNVTLSKKRKRRFLGFLLGVGSAIASGVAVSKVLHLEGEVNKIKSALLSTNKAVVSLSNGVSVLTSKVLDLKNYIDKQLLPIVNKQSCSISNIETVIEFQQKNNRLLEITREFSVNAGVTTPVSTYMLTNSELLSLINDMPITNDQKKLMSSNVQIVRQQSYSIMSIIKEEVLAYVVQLPLYGVIDTPCWKLHTSPLCTTNTKEGSNICLTRTDRGWYCDNAGSVSFFPQAETCKVQSNRVFCDTMNSLTLPSEVNLCNIDIFNPKYDCKIMTSKTDVSSSVITSLGAIVSCYGKTKCTASNKNRGIIKTFSNGCDYVSNKGVDTVSVGNTLYYVNKQEGKSLYVKGEPIINFYDPLVFPSDEFDASISQVNEKINQSLAFIRKSDELLHNVNAGKSTTNIMITTIIIVIIVILLALIAVGLLLYCKARSTPVTLSKDQLSGINNIAFSN

SEQ ID NO: 8787 - protein, 574 aa, Artificial Sequence
  derived and/or modified protein sequence (wt) from HRSV__AJZ69847.1__F0
MELPILKTNAITTILAAVTLCFASSQNITEEFYQSTCSAVSKGYLSALRTGWYTSVITIELSNIKENKCNGTDAKVKLIKQELDKYKNAVTELQLLMQSTPAANSRARRELPRFMNYTLNNTKNTNVTLSKKRKRRFLGFLLGVGSAIASGVAVSKVLHLEGEVNKIKSALLSTNKAVVSLSNGVSVLTSKVLDLKNYIDKQLLPIVNKQSCSISNIETVIEFQQKNNRLLEITREFSVNAGVTTPVSTYMLTNSELLSLINDMPITNDQKKLMSSNVQIVRQQSYSIMSIIKEEVLAYVVQLPLYGVIDTPCWKLHTSPLCTTNTKEGSNICLTRTDRGWYCDNAGSVSFFPQAETCKVQSNRVFCDTMNSLTLPSEVNLCNIDIFNPKYDCKIMTSKTDVSSSVITSLGAIVSCYGKTKCTASNKNRGIIKTFSNGCDYVSNKGVDTVSVGNTLYYVNKQEGKSLYVKGEPIINFYDPLVFPSDEFDASISQVNEKINQSLAFIRKSDELLHNVNAGKSTTNIMITTIIIVIIVILLALIAVGLLLYCKARSTPVTLSKDQLSGINNIAFSN

SEQ ID NO: 8788 - protein, 574 aa, Artificial Sequence
  derived and/or modified protein sequence (wt) from HRSV__AJZ69869.1__F0
MELPILKTNAITTIFAAVTLCFASSQNITEEFYQSTCSAVSKGYLSALRTGWYTSVITIELSNIKENKCNGTDAKVKLIKQELDKYKNAVTELQLLMQSTPAANNRARRELPRFMNYTLNNTKNNNVTLSKKRKRRFLGFLLGVGSAIASGVAVSKVLHLEGEVNKIKSALLSTNKAVVSLSNGVSVLTSKVLDLKNYIDKQLLPIVNKQSCSISNIETVIEFQQKNNRLLEITREFSVNAGVTTPVSTYMLTNSELLSLINDMPITNDQKKLMSNNVQIVRQQSYSIMSIIKEEVLAYVVQLPLYGVIDTPCWKLHTSPLCTTNTKEGSNICLTRTDRGWYCDNAGSVSFFPQAETCKVQSNRVFCDTMNSLTLPSEVNLCNIDIFNPKYDCKIMTSKTDVSSSVITSLGAIVSCYGKTKCTASNKNRGIIKTFSNGCDYVSNKGVDTVSVGNTLYYVNKQEGKSLYVKGEPIINFYDPLVFPSDEFDASISQVNEKINQSLAFIRKSDELLHNVNVGKSTTNIMITTIIIVIIVILLLLIAVGLFLYCKARSTPVTLSKDQLSGINNIAFSN

SEQ ID NO: 8789 - protein, 574 aa, Artificial Sequence
  derived and/or modified protein sequence (wt) from HRSV__AJO16077.1__F0
MELLIHRSSAIFLTLAINALYLTSSQNITEEFYQSTCSAVSRGYLSALRTGWYTSVITIELSNIKETKCNGTDTKVKLIKQELDKYKNAVTELQLLMQNTPAVNNRARREAPQYMNYTINITKNLNVSISKKRKRRFLGFLLGVGSAIASGIAVSKVLHLEGEVNKIKNALQSTNKAVVSLSNGVSVLTSKVLDLKNYINNQLLPIVNQQSCRISNIETVIEFQQKNSRLLEITREFSVNAGVTTPLSTYMLTNSELLSLINDMPITNDQKKLMSSNVQIVRQQSYSIMSIIKEEVLAYVVQLPIYGVIDTPCWKLHTSPLCTTNIKEGSNICLTRTDRGWYCDNAGSVSFFPQADTCKVQSNRVFCDTMNSLTLPSEVSLCNTDIFNSKYDCKIMTSKTDISSSVITSLGAIVSCYGKTKCTASNKNRGIIKTFSNGCDYVSNKGVDTVSVGNTLYYVNKLEGKNLYVKGEPIINYYDPLVFPSDEFDASISQVNEKINQSLAFIRRSDELLHNVNTGKSTTNIMITAIIIVIIVVLLSLIAIGLLLYCKAKNTPVTLSKDQLSGINNIAFSK

SEQ ID NO: 8790 - protein, 574 aa, Artificial Sequence
  derived and/or modified protein sequence (wt) from HRSV__AJO16055.1__F0
MELPILKTNAITTILAAVTLCFASSQNITEEFYQSTCSAVSKGYLSALRTGWYTSVITIELSNIKENKCNGTDAKVKLIKQELDKYKNAVTELQLLMQSTPAANSRARRELPRFMNHTLNNTKNTNVTLSKKRKRRFLGFLLGVGSAIASGIAVSKVLHLEGEVNKIKSALLSTNKAVVSLSNGVSVLTSKVLDLKNYIDKQLLPIVNKQSCSISNIETVIEFQQKNNRLLEITREFSVNAGVTTPVSTYMLTNSELLSLINDMPITNDQKKLMSSNVQIVRQQSYSIMSIIKEEVLAYVVQLPLYGVIDTPCWKLHTSPLCTTNTKEGSNICLTRTDRGWYCDNAGSVSFFPQAETCKVQSNRVFCDTMNSLTLPSEVNLCNIDIFNPKYDCKIMTSKTDVSSSVITSLGAIVSCYGKTKCTASNKNRGIIKTFSNGCDYVSNKGVDTVSVGNTLYYVNKHEGKSLYVKGEPIINFYDPLVFPSDEFDASISQVNEKINQSLAFIRKSDELLHNVNAGKSTTNIMITTIIIVIIVILLALIAVGLLLYCKARSTPVTLSKDQLSGINNIAFSN

SEQ ID NO: 8791 - protein, 574 aa, Artificial Sequence
  derived and/or modified protein sequence (wt) from HRSV__AKE31881.1__F0
MELLIHRSNAIFLTLAINALYLTSSQNITEEFYQSTCSAVSRGYFSALRTGWYTSVITIELSNIKETKCNGTDTKVKLMKQELDKYKNAVTELQLLMQNTPAANNRARREAPQYMNYTINTTKNLNVSISKKRKRRFLGFLLGVGSAIASGIAVSKVLHLEGEVNKIKNALLSTNKAVVSLSNGVSVLTSKVLDLKNYINNQLLPIVNQQSCRISNIETVIEFQQKNSRLLEITREFSVNAGVTTPLSTYMLTNSELLSLINDMPITNDQKKLMSSNVQIVRQQSYSIMSIIKEEVLAYVVQLPIYGVIDTPCWKLHTSPLCTTNIKEGSNICLTRTDRGWYCDNAGSVSFFPQADTCKVQSNRVFCDTMNSLTLPSEVSLCNTDIFNSKYDCKIMTSKTDISSSVITSLGAIVSCYGKTKCTASNKNRGIIKTFSNGCDYVSNKGVDTVSVGNTLYYVNKLEGKNLYVKGEPIINYYDPLVFPSDEFDASISQVNEKINQSLAFIRRSDELLHNVNAGKSTTNIMITAIIIVIIVVLLSLIAIGLLLYCKAKNTPVTLSKDQLSGINNIAFSK

SEQ ID NO: 8792 - protein, 574 aa, Artificial Sequence
  derived and/or modified protein sequence (wt) from HRSV__AKE31882.1__F0
MELLVHRSSAIFLTLAINALYLTSSQNITEEFYQSTCSAVSRGYFSALRTGWYTSVITIELSNIKETKCNGTDTKVKLIKQELDKYKNAVTELQLLMQNTPAANNRARREAPQYMNYTINTTKNLNVSISKKRKRRFLGFLLGVGSAIASGIAVSKVLHLEGEVNKIKNALLSTNKAVVSLSNGVSVLTSKVLDLKNYINNQLLPIVNQQSCRISNIETVIEFQQKNSRLLEITREFSVNAGVTTPLSTYMLTNSELLSLINDMPITNDQKKLMSSNVQIVRQQSYSIMSIIKEEVLAYVVQLPIYGVIDTPCWKLHTSPLCTTNIKEGSNICLTRTDRGWYCDNAGSVSFFPQADTCKVQSNRVFCDTMNSLTLPSEVSLCNTDIFNSKYDCKIMTSKTDISSSVITSLGAIVSCYGKTKCTASNKNRGIIKTFSNGCDYVSNKGVDTVSVGNTLYYVNKLEGKNLYVKGEPIINYYDPLVFPSDEFDASISQVNEKINQSLAFIRRSDELLHNVNTGKSTTNIMITVIIIVIIVVLLSLIAIGLLLYCKAKNTPVTLSKDQLSGINNIAFSK

SEQ ID NO: 8793 - protein, 574 aa, Artificial Sequence
  derived and/or modified protein sequence (wt) from HRSV__AJF44835.1__F0
MDLPILKTNAITTIFAAVLLCFASSQNITEEFYQSTCSAVSKGYLSALRTGWYTSVITIELSNIKENKCNGTDAKVKLIKQELDKYKNAVTELQLLMQSTPAANNRARRELPRFMNYTLNNNKNNNVTLSKKRKRRFLGFLLGVGSAIASGIAVSKVLHLEGEVNKIKSALLSTNKAVVSLSNGVSVLTSKVLDLKNYIDKQLLPIVNKQSCSISNIETVIEFQQKNNRLLEITREFSVNAGVTTPVSTYMLTNSELLSLINDMPITNDQKKLMSNNVQIVRQQSYSIMSIIKEEVLAYVVQLPLYGVIDTPCWKLHTSPLCTTNTKEGSNICLTRTDRGWYCDNAGSVSFFPQAETCKVQSNRVFCDTMNSLTLPSEVNLCNIDIFNPKYDCKIMTSKTDVSSSVITSLGAIVSCYGKTKCTASNKNRGIIKTFSNGCDYVSNKGVDTVSVGNTLYYVNKQEGKSLYVKGEPIINFYDPLVFPSDEFDASISQVNEKINQSLAFIRKSDELLHNVNVGKSTTNIMITTIIIVIIVILLLLIAVGLFLYCKARSTPVTLSKDQLSGINNIAFSN

SEQ ID NO: 8794 - protein, 574 aa, Artificial Sequence
  derived and/or modified protein sequence (wt) from HRSV__AJF44790.1__F0
MELSILKTNAITTILAAVTLCFASSQNITEEFYQSTCSAVSKGYLSALRTGWYTSVITIELSNIKENKCNGTDAKVKLIKQELDKYKNAVTELQLLMQSTPAANSRARRELPRFMDYTLNNTKNTNVTLSKKRKRRFLGFLLGVGSAIASGIAVSKVLHLEGEVNKIKSALLSTNKAVVSLSNGVSVLTSKVLDLKNYIDKQLLPIVNKQSCSISNIETVIEFQQKNNRLLEITREFSVNAGVTTPVSTYMLTNSELLSLINDMPITNDQKKLMSSNVQIVRQQSYSIMSIIKEEVLAYVVQLPLYGVIDTPCWKLHTSPLCTTNTKEGSNICLTRTDRGWYCDNAGSVSFFPQAETCKVQSNRVFCDTMNSLTLPSEVNLCNIDIFNPKYDCKIMTSKTDVSSSVITSLGAIVSCYGKTKCTASNKNRGIIKTFSNGCDYVSNKGVDTVSVGNTLYYVNKQEGKSLYVKGEPIINFYDPLVFPSDEFDASISQVNEKINQSLAFIRKSDELLHNVNAGKSTTNIMITTIIIVIIVILLALIAVGLLLYCKARSTPVTLSKDQLSGINNIAFSN

SEQ ID NO: 8795 - protein, 574 aa, Artificial Sequence
  derived and/or modified protein sequence (wt) from HRSV__AJF44737.1__F0
MELPILKTNVITTILTAVTLCFASSQNITEEFYQSTCSAVSKGYLSALRTGWYTSVITIELSNIKENKCNGTDAKVKLIKQELDKYKNAVTELQLLMQSTPAANNRARRELPRFMNYTLNNTKYTNVTLSKKRKRRFLGFLLGVGSAIASGIAVSKVLHLEGEVNKIKSALLSTNKAVVSLSNGVSVLTSKVLDLKNYIDKQLLPIVNKQSCSISNIETVIEFQQKNNRLLEITREFSVNAGVTTPVSTYMLTNSELLSLINDMPITNDQKKLMSNNVQIVRQQSYSIMSIIKEEVLAYVVQLPLYGVIDTPCWKLHTSPLCTTNTKEGSNICLTRTDRGWYCDNAGSVSFFPQAETCKVQSNRVFCDTMNSLTLPSEVNLCNIDIFNPKYDCKIMTSKTDVSSSVITSLGAIVSCYGKTKCTASNKNRGIIKTFSNGCDYVSNKGVDTVSVGNTLYYVNKQEGKSLYVKGEPIINFYDPLVFPSDEFDASISQVNEKINQSLAFIRKSDELLHNVNAGKSTTNIMITTIIIVIVVILLSLIAVGLLLYCKARSTPVTLSKDQLSGINNIAFSS

SEQ ID NO: 8796 - protein, 574 aa, Artificial Sequence
  derived and/or modified protein sequence (wt) from HRSV__AJF44716.1__F0
MELLIHRSSAIFLTLAINALYLASSQNITEEFYQSTCSAVSRGYLSALRTGWYTSVITIELSNIKETKCNGTDTKVKLIKQELDKYKNAVTELQLLMQNTPAANNRARREAPQYMNYTINTTKNLNVSISKKRKRRFLGFLLGVGSAIASGIAVSKVLHLEGEVNKIKNALLSTNKAVVSLSNGVSVLTSKVLDLKNYINNQLLPIVNQQSCRISNIETVIEFQQKNSRLLEITREFSVNAGVTTPLSTYMLTNSELLSLINDMPITNDQKKLMSSNVQIVRQQSYSIMSIIKEEVLAYVVQLPIYGVIDTPCWKLHTSPLCTTNIKEGSNICLTRTDRGWYCDNAGSVSFFPQADTCKVQSNRVFCDTMNSLTLPSEVSLCNTDIFNSKYDCKIMTSKTDISSSVITSLGAIVSCYGKTKCTASNKNRGIIKTFSNGCDYVSNKGVDTVSVGNTLYYVNKLEGKNLYVKGEPIINYYDPLVFPSDEFDASISQVNEKINQSLAFIRRSDELLHNVNTGKSTTNIMITAIIIVIIVVLLSLVAIGLLLYCKAKNTPVTLSKDQLSGINNIAFSK

SEQ ID NO: 8797 - protein, 574 aa, Artificial Sequence
  derived and/or modified protein sequence (wt) from HRSV__AJF44725.1__F0
MELPILKTNVITTILAAVTLCFASSQNITEEFYQSTCSAVSKGYLSALRTGWYTSVITIELSNIKENKCNGTDAKVKLIKQELDKYKNAVTELQLLMQSTPAANNRARRELPRFMNYTLNNTKYTNVTLSKKRKRRFLGFLLGVGSAIASGIAVSKVLHLEGEVNKIKSALLSTNKAVVSLSNGVSVLTSKVLDLKNYIDKQLLPIVNKQSCSISNIETVIEFQQKNNRLLEITREFSVNAGVTTPVSTYMLTNSELLSLINDMPITNDQKKLMSNNVQIVRQQSYSIMSIIKEEVLAYVVQLPLYGVIDTPCWKLHTSPLCTTNTKEGSNICLTRTDRGWYCDNAGSVSFFPQAETCKVQSNRVFCDTMNSLTLPSEVNLCNIDIFNPKYDCKIMTSKTDVSSSVITSLGAIVSCYGKTKCTASNKNRGIIKTFSNGCDYVSNKGVDTVSVGNTLYYVNKQEGKSLYVKGEPIINFYDPLVFPSDEFDASISQVNEKINQSLAFIRKSDELLHNVNAGKSTTNIMITTIIIVIVVILLSLIAVGLLLYCKARSTPVTLSKDQLSGINNIAFSS

SEQ ID NO: 8798 - protein, 574 aa, Artificial Sequence
  derived and/or modified protein sequence (wt) from HRSV__AJF44643.1__F0
MELLIHRSSAIFLTLAINALYLASSQNITEEFYQSTCSAVSRGYLSALRTGWYTSVITIELSNIKETKCNGTDTKVKLIKQELDKYKNAVTELQLLMQNTPAANNRARREAPQYMNYTINTTKNLNVSISKKRKRRFLGFLLGVGSAIASGIAVSKVLHLEGEVNKIKNALLSTNKAVVSLSNGVSVLTSKVLDLKNYINNQLLPIVNQQSCRISNIETVIEFQQKNSRLLEITREFSVNAGVTTPLSTYMLTNSELLSLINDMPITNDQKKLMSSNVQIVRQQSYSIMSIIKEEVLAYVVQLPIYGVIDTPCWKLHTSPLCTTNIKEGSNICLTRTDRGWYCDNAGSVSFFPQADTCKVQSNRVFCDTMNSLTLPSEVSLCNTDIFNSKYDCKIMTSKTDISSSVITSLGAIVSCYGKTKCTASNKNRGIIKTFSNGCDYVSNKGVDTVSVGNTLYYVNKLEGKNLYVKGEPIINYYDPLVFPSDEFDASISQVNEKINQSLAFIRRSDELLHNVNTGKSTTNIMITAIIIVIIVVLLSLIAIGLLLYCKAKNTPVTLSKDQLSGINNIAFSK

SEQ ID NO: 8799 - protein, 574 aa, Artificial Sequence
  derived and/or modified protein sequence (wt) from HRSV__AJF44628.1__F0
MELLIHRSSAIFLTLAINALYLTSSQNITEEFYQSTCSAVSRGYFSALRTGWYTSVITIELSNIKETKCNGTDTKVKLIKQELDKYKNAVTELQLLMQNTPAANNRARREAPQYMNYTINTTKNLNVSISKKRKRRFLGFLLGVGSAIASGIAVSKVLHLEGEVNKIKNALLSTNKAVVSLSNGVSVLTSKVLDLKNYINNQLLPIVNQQSCRISNIETVIEFQQKNSRLLEITREFSVNAGVTTPLSTYMLTNSELLSLINDMPITNDQKKLMSSNVQIVRQQSYSIMSIIKEEVLAYVVQLPIYGVIDTHCWKLHTSPLCTTNIKEGSNICLTRTDRGWYCDNAGSVSFFPQADTCKVQSNRVFCDTMNSLTLPSEVSLCNTDIFNSKYDCKIMTSKTDISSSVITSLGAIVSCYGKTKCTASNKNRGIIKTFSNGCDYVSNKGVDTVSVGNTLYYVNKLEGKNLYVKGEPIINYYDPLVFPSDEFDASISQVNEKINQSLAFIRRSDELLHNVNTGKSTTNIMITAIIIVIIVVLLSLIAIGLLLYCKAKNTPVTLSKDQLSGINNIAFSK

SEQ ID NO: 8800 - protein, 574 aa, Artificial Sequence
  derived and/or modified protein sequence (wt) from HRSV__AJF44624.1__F0
MELLIHRSSAIFLTLAINALYLTSSQNITEEFYQSTCSAVSRGYFSALRTGWYTSVITIELSNIQETKCNGTDTKVKLIKQELDKYKNAVTELQLLMQNTPAINNRARREAPQYMNHTINTTKNLNVSISKKRKRRFLGFLLGVGSAIASGIAVSKVLHLEGEVNKIKNALLSTNKAVVSLSNGVSVLTSKVLDLKNYINNQLLPIVNQQSCRISNIETVIEFQQKNNRLLEITREFSVNAGVTTPLSTYMLTNSELLSLINDMPITNDQKKLMSSNVQIVRQQSYSIMSIIKEEVLAYVVQLPIYGVIDTPCWKLHTSPLCTTNIKEGSNICLTRTDRGWYCDNAGSVSFFPQADTCKVQSNRVFCDTMNSLTLPSEVSLCNTDIFNSKYDCKIMTSKTDISSSVITSLGAIVSCYGKTKCTASNKNRGIIKTFSNGCDYVSNKGVDTVSVGNTLYYVNKLEGKNLYVKGEPIINYYDPLVFPSDEFDASISQVNEKINQSLAFIRRSDELLHNVNTGKSTTNIMITAIIIVIIVVLLSLIAIGLLLYCKAKNTPVTLSKDQLSGINNIAFSK

SEQ ID NO: 8801 - protein, 574 aa, Artificial Sequence
  derived and/or modified protein sequence (wt) from HRSV__AJF44613.1__F0
MELLIHRSSAIFLTLAINALYLTSSQNITEEFYQSTCSAVSRGYLSALRTGWYTSVITIELSNIKETKCNGTDTKVKLIKQELDKYKNAVTELQLLMQNTPAANNRARREAPQYMNYTINTTKNSNVSTIKKRKRRFLGFLLGVGSAIASGIAVSKVLHLEGEVNKIKNALLSTNKAVVSLSNGVSVLTSKVLDLKNYINNQLLPIVNQQSCRISNIETVIEFQQKNSRLLEITREFSVNAGVTTPLSTYMLTNSELLSLINDMPITNDQKKLMSSNVQIVRQQSYSIMSIIKEEVLAYVVQLPIYGVIDTPCWKLHTSPLCTTNIKEGSNICLTRTDRGWYCDNAGSVSFFPQADTCKVQSNRVFCDTMNSLTLPSEVSLCNTDIFNSKYDCKIMTSKTDISSSVITSLGAIVSCYGKTKCTASNKNRGIIKTFSNGCDYVSNKGVDTVSVGNTLYYVNKLEGKNLYVKGEPIINYYDPLVFPSDEFDASISQVNEKINQSLAFIRRSDELLHNVNTGKSTTNIMITAIIIVIIVVLLSLIAIGLLLYCKAKNTPVTLSKDQLSGINNIAFSK

SEQ ID NO: 8802 - protein, 574 aa, Artificial Sequence
  derived and/or modified protein sequence (wt) from HRSV__AJF44566.1__F0
MELLIHRSSAIFLTLAINALYLTSSQNITEEFYQSTCSAVSRGYFSALRTGWYTSVITIELSNIQETKCNGTDTKVKLIKQELDKYKNAVTELQLLMQNTPAINNRARREAPQYMNHTINTTKNLNVSISKKRKRRFLGFLLGVGSAIASGIAVSKVLHLEGEVNKIKNALLSTNKAVVSLSNGVSVLTSKVLDLKNYINNQLLPIVNQQSCRISNIETVIEFQQKNSRLLEITREFSVNAGVTTPLSTYMLTNSELLSLINDMPITNDQKKLMSSNVQIVRQQSYSIMSIIKEEVLAYVVQLPIYGVIDTPCWKLHTSPLCTTNIKEGSNICLTRTDRGWYCDNAGSVSFFPQADTCKVQSNRVFCDTMNSLTLPSEVSLCNTDIFNSKYDCKIMTSKTDISSSVITSLGAIVSCYGKTKCTASNKNRGIIKTFSNGCDYVSNKGVDTVSVGNTLYYVNKLEGKNLYVKGEPIINYYDPLVFPSDEFDASISQVNEKINQSLAFIRRSDELLHNVNTGKSTTNIMITAIIIVIIVVLLSLIAIGLLLYCKAKNTPVTLSKDQLSGINNIAFSK

SEQ ID NO: 8803 - protein, 574 aa, Artificial Sequence
  derived and/or modified protein sequence (wt) from HRSV__AJF44555.1__F0
MELLIHRSSAIFLTLAINALYLTSSQNITEEFYQSTCSAVSRGYFSALRTGWYTSVITIELSNIQETNCNGTDTKVKLIKQELDKYKNAVTELQLLMQNTPAINNRARREAPQYMNHTINTTKNLNVSISKKRKRRFLGFLLGVGSAIASGIAVSKVLHLEGEVNKIKNALLSTNKAVVSLSNGVSVLTSKVLDLKNYINNQLLPIVNQQSCRISNIETVIEFQQKNSRLLEITREFSVNAGVTTPLSTYMLTNSELLSLINDMPITNDQKKLMSSNVQIVRQQSYSIMSIIKEEVLAYVVQLPIYGVIDTPCWKLHTSPLCTTNIKEGSNICLTRTDRGWYCDNAGSVSFFPQADTCKVQSNRVFCDTMNSLTLPSEVSLCNTDIFNSKYDCKIMTSKTDISSSVITSLGAIVSCYGKTKCTASNKNRGIIKTFSNGCDYVSNKGVDTVSVGNTLYYVNKLEGKNLYVKGEPIINYYDPLVFPSDEFDASISQVNEKINQSLAFIRRSDELLHNVNTGKSTTNIMITAIIIVIIVVLLSLIAIGLLLYCKAKNTPVTLSKDQLSGINNIAFSK

SEQ ID NO: 8804 - protein, 574 aa, Artificial Sequence
  derived and/or modified protein sequence (wt) from HRSV__AJF44526.1__F0
MELLIHRSSAIFLTLAINALYLTSSQNITEEFYQSTCSAVSRGYFSALRTGWYTSVITIELSNIKETKCNGTDTKVRLIKQELDKYKNAVTELQLLMQNTPAANNRARREAPQYMNYTINTTKNLNVSISKKRKRRFLGFLLGVGSAIASGIAVSKVLHLEGEVNKIKNALLSTNKAVVSLSNGVSVLTSKVLDLKNYINNQLLPIVNQQSCRISNIETVIEFQQKNSRLLEITREFSVNAGVTTPLSTYMLTNSELLSLINDMPITNDQKKLMSSNVQIVRQQSYSIMSIIKEEVLAYVVQLPIYGVIDTHCWKLHTSPLCTTNIKEGSNICLTRTDRGWYCDNAGSVSFFPQADTCKVQSNRVFCDTMNSLTLPSEVSLCNTDIFNSKYDCKIMTSKTDISSSVITSLGAIVSCYGKTKCTASNKNRGIIKTFSNGCDYVSNKGVDTVSVGNTLYYVNKLEGKNLYVKGEPIINYYDPLVFPSDEFDASISQVNEKINQSLAFIRRSDELLHNVNTGKSTTNIMITAIIIVIIVVLLSLIAIGLLLYCKAKNTPVTLSKDQLSGINNIAFSK

SEQ ID NO: 8805 - protein, 574 aa, Artificial Sequence
  derived and/or modified protein sequence (wt) from HRSV__AJF44517.1__F0
MELLIHRSSAIFLTLAINALYLTSSQNITEEFYQSTCSAVSRGYLSALRTGWYTSVITIELSNIKETKCNGTDTKVKLIKQELDKYKNAVTELQLLMQNTPAANNRARREAPQYMNYTINTTKNLNVSISKKRKRRFLGFLLGVGSAIASGIAVSKVLHLEGEVNKIKNALLSTNKAVVSLSNGVSVLTSKVLDLKNYINNQLLPIVNQQSCRISNIETVIEFQQKNSRLLEITREFSVNAGVTTPLSTYMLTNSELLSLINDMPITNDQKKLMSSNVQIVRQQSYSIMSIIKEEVLAYVVQLPIYGVIDTPCWKLHTSPLCTTNIKEGSNICLTRTDRGWYCDNAGSVSFFPQADTCKVQSNRVFCDTMNSLTLPSEVSLCNTDIFNSKYDCKIMTSKTDISSSVITSLGAIVSCYGKTKCTASNKNRGIIKTFSNGCDYVSNKGVDTVSVGNTLYYVNKLEGKNLYVKGEPIINYYDPLVFPSDEFDASISQVNEKINQSLAFIRRSDELLHNVNAGKSTTNIMITAIIIVIIVVLLSLIAIGLLLYCKAKNTPVTLSKDQLSGINNIAFSK

SEQ ID NO: 8806 - protein, 574 aa, Artificial Sequence
  derived and/or modified protein sequence (wt) from HRSV__AHB33455.1__F0
MELLIHRSSAIFLTLAINALYLTSSQNITEEFYQSTCSAVSRGYLSALRTGWYTSVITIELSNIKETKCNGTDTKVKLIKQELDKYKNAVTELQLLMQNTPAANNRARREAPQYMNYTINTTKNLNVSISKKRKRRFLGFLLGVGSAIASGIAVSKVLHLEGEVNKIKNALLSTNKAVVSLSNGVSVLTSKVLDLKNYINNQLLPIVNQQSCRISNIETVIEFQQKNSRLLEITREFSVNAGVTTPLSTYMLTNSELLSLINDMPITNDQKKLMSSNVQIVRQQSYSIMSIIKEEVLAYVVQLPIYGVIDTPCWKLHTSPLCTTNIKEGSNICLTRTDRGWYCDNAGSVSFFPQADTCKVQSNRVFCDTMNSLTLPSEVSLCNTDIFNSKYDCKIMTSKTDISSSVITSLGAIVSCYGKTKCTASNKNRGIIKTFSNGCDYVSNKGVDTVSVGNTLYYVNKLEGKNLYVKGEPIINYYDPLVFPSDEFDASISQVNEKINQSLAFIRRSDELLHNVNTGKSTTNIMITAIIIVIIVVLLSLIAIGLLLYCKAKTTPVTLSKDQLSGINNIAFSK

SEQ ID NO: 8807 - protein, 574 aa, Artificial Sequence
  derived and/or modified protein sequence (wt) from HRSV__AKA45882.1__F0
MELPILKTNAITTILTAVTLCFASSQNITEEFYQSTCSAVSKGYLSALRTGWYTSVITIELSNIKENKCNGTDAKVKLIKQELDKYKNAVTELQLLMQSTPAANNRARRELSRFMNYTLNNTKNTNVTLSKKRKRRFLGFLLGVGSAIASGIAVSKVLHLEGEVNKIKSALLSTNKAVVSLSNGVSVLTSKVLDLKNYIDKQLLPIVNKQSCSISNIETVIEFQQKNNRLLEITREFSVNAGVTTPVSTYMLTNSELLSLINDMPITNDQKKLMSNNVQIVRQQSYSIMSIIKEEVLAYVVQLPLYGVIDTPCWKLHTSPLCTTNTKEGSNICLTRTDRGWYCDNAGSVSFFPQAETCKVQSNRVFCDTMNSLTLPNEVNLCNIDIFNPKYDCKIMTSKTDVSSSVITSLGAIVSCYGKTKCTASNKNRGIIKTFSNGCDYVSNKGVDTVSVGNTLYYVNKQEGKSLYVKGEPIINFYDPLVFPSDEFDASISQVNEKINQSLAFIRKSDELLHNVNAGKSTTNIMITTIIIVIIVILLSLIAVGLLLYCKARSTPVTLSKDQLSGINNIAFSN

SEQ ID NO: 8808 - protein, 574 aa, Artificial Sequence
  derived and/or modified protein sequence (wt) from HRSV__AKA45849.1__F0
MELLIHRSSAIFLTLAINALYLTSSQNITEEFYQSTCSAVSRGYFSALRTGWYTSVITIELSNIKETKCNGTDTKVKLIKQELDKYKNAVTELQLLMQNTPAANNRARREAPQYMNYTINTTKNLNVSISKKRKRRFLGFLLGVGSAIASGIAVSKVLHLEGEVNKIKNALLSTNKAVVSLSNGVSVLTSKVLDLKNYINNQLLPIVNQQSCRISNIETVIEFQQKNSRLLEITREFSVNAGVTTPLSTYMLTNSELLSLINDMPITNDQKKLMSSNAQIVRQQSYSIMSIIKEEVLAYVVQLPIYGVIDTPCWKLHTSPLCTTNIKEGSNICLTRTDRGWYCDNAGSVSFFPQADTCKVQSNRVFCDTMNSLTLPSEVSLCNTDIFNSKYDCKIMTSKTDISSSVITSLGAIVSCYGKTKCTASNKNRGIIKTFSNGCDYVSNKGVDTVSVGNTLYYVNKLEGKNLYVKGEPIINYYDPLVFPSDEFDASISQVNEKINQSLAFIRRSDELLHNVNTGKSTTNIMITAIIIVIIVVLLSLIAIGLLLYCKAKNTPVTLSKDQLSGINNIAFSK

SEQ ID NO: 8809 - protein, 574 aa, Artificial Sequence
  derived and/or modified protein sequence (wt) from HRSV__AHA83913.1__F0
MELLIHRSSAIFLTLAINALYLTSSQNITEEFYQSTCSAVSRGYISALRTGWYTSVITIELSNIKETKCNGTDTKVKLIKQELDKYKNAVTELQLLMQNTPAANNRARREAPQYMNYTINTTKNLNVSISKKRKRRFLGFLLGVGSAIASGIAVSKVLHLEGEVNKIKNALLSTNKAVVSLSNGVSVLTSKVLDLKNYINNQLLPIVNQQSCRISNIETVIEFQQKNSRLLEITREFSVNAGVTTPLSTYMLTNSELLSLINDMPITNDQKKLMSSNVQIVRQQSYSIMSIIKEEVLAYVVQLPIYGVIDTPCWKLHTSPLCTTNIKEGSNICLTRTDRGWYCDNAGSVSFFPQADTCKVQSNRVFCDTMNSLTLPSEVSLCNTDIFNSKYDCKIMTSKTDISSSVITSLGAIVSCYGKTKCTASNKNRGIIKTFSNGCDYVSNKGVDTVSVGNTLYYVNKLEGKNLYVKGEPIINYYDPLVFPSDEFDASISQVNEKINQSLAFIRRSDELLHNVNTGKSTTNIMITAIIIVIIVVLLSLIAIGLLLYCKAKNTPVTLSKDQLSGINNIAFSK

SEQ ID NO: 8810 - protein, 574 aa, Artificial Sequence
  derived and/or modified protein sequence (wt) from HRSV__AGN28715.1__F0
MELLIHRSSAILLTLAINALYLTSSQNITEEFYQSTCSAVSRGYFSALRTGWYTSVITIELSNIKETKCNGTDTKVKLIKQELDKYKNAVTELQLLMQNTPAANNRARREAPQYMNYTINTTKNLNVSISKKRKRRFLGFLLGVGSAIASGIAVSKVLHLEGEVNKIKNALLSTNKAVVSLSNGVSVLTSKVLDLKNYINNQLLPIVNQQSCRISNIETVIEFQQKNSRLLEITREFSVNAGVTTPLSTYMLTNSELLSLINDMPITNDQKKLMSSNVQIVRQQSYSIMSIIKEEVLAYVVQLPIYGVIDTPCWKLHTSPLCTTNIKEGSNICLTRTDRGWYCDNAGSVSFFPQADTCKVQSNRVFCDTMNSLTLPSEVSLCNTDIFNSKYDCKIMTSKTDISSSVITSLGAIVSCYGKTKCTASNKNRGIIKTFSNGCDYVSNKGVDTVSVGNTLYYVNKLEGKNLYVKGEPIINYYDPLVFPSDEFDASISQVNEKINQSLAFIRRSDELLHNVNTGKSTTNIMITAIIIVIIVVLLSLIAIGLLLYCKAKNTPVTLSKDQLSGINNIAFSK

SEQ ID NO: 8811 - protein, 574 aa, Artificial Sequence
  derived and/or modified protein sequence (wt) from HRSV__AHA83902.1__F0
MELLIHRSSAIFLTLAINALYLTSSQNITEEFYQSTCSAVSRGYISALRTGWYTSVITIELSNIKETKCNGTDTKVKLIKQELDKYKNAVTELQLLMQNTPAANNRARREAPQYMNYTINTTKNLNVSISKKRKRRFLGFLLGVGSAIASGIAVSKVLHLEGEVNKIKNALLSTNKAVVSLSNGVSVLTSKVLDLKNYINNQLLPIVNQQSCRISNIETVIEFQQKNSRLLEITREFSVNAGVTTPLSTYMLTNSELLSLINDMPITNDQKKLMSSNVQIVRQQSYSIMSIIKEEVLAYVVQLPIYGVIDTPCWKLHTSPLCTTNIKEGSNICLTRTDRGWYCDNAGSVSFFPQADTCKVQSNRVFCDTMNSLTLPSEVSLCNTDIFNSKYDCKIMTSKTDISSSVITSLGAIVSCYGKTKCTASNKNRGIIKTFSNGCDYVSNKGVDTVSVGNTLYYVNKLEGKNLYVKGEPIINYYDPLMFPSDEFDASISQVNEKINQSLAFIRRSDELLHNVNTGKSTTNIMITAIIIVIIVVLLSLIAIGLLLYCKAKNTPVTLSKDQLSGINNIAFSK

SEQ ID NO: 8812 - protein, 574 aa, Artificial Sequence
  derived and/or modified protein sequence (wt) from HRSV__AHA83837.1__F0
MDLPILKTNAITAILAAVSLCFASSQNITEEFYQSTCSAVSKGYLSALRTGWYTSVITIELSNIKENKCNGTDAKVKLIKQELDKYKNAVTELQLLMQSTPAANNRARRELPRFMNYTLNNTKNNNVTLSKKRKRRFLGFLLGVGSAIASGIAVSKVLHLEGEVNKIKSALLSTNKAVVSLSNGVSVLTSKVLDLKNYIDKQLLPIVNKQSCSISNIETVIEFQQKNNRLLEITREFSVNAGVTTPVSTYMLTNSELLSLINDMPITNDQKKLMSNNVQIVRQQSYSIMSIIKEEVLAYVVQLPLYGVIDTPCWKLHTSPLCTTNTKEGSNICLTRTDRGWYCDNAGSVSFFPQAETCKVQSNRVFCDTMNSLTLPNEVNLCNIDIFNPKYDCKIMTSKTDVSSSVITSLGAIVSCYGKTKCTASNKNRGIIKTFSNGCDYVSNKGVDTVSVGNTLYYVNKQEGKSLYVKGEPIINFYDPLVFPSDEFDASISQVNEKINQSLAFIRKSDELLHNVNVGKSTTNIMITTIIIVIIVILLLLIAVGLFLYCKARSTPVTLSKDQLSGINNIAFSN

SEQ ID NO: 8813 - protein, 574 aa, Artificial Sequence
  derived and/or modified protein sequence (wt) from HRSV__AHA83826.1__F0
MDLPILKTNAITAILAAVSLCFASSQNITEEFYQSTCSAVSKGYLSALRTGWYTSVITIELSNIKENKCNGTDAKVKLIKQELDKYKNAVTELQLLMQSTPAANNRARRELPRFMNYTLNNTKNNNVTLSKKRKRRFLGFLLGVGSAIASGIAVSKVLHLEGEVNKIKSALLSTNKAVVSLSNGVSVLTSKVLDLKNYIDKQLLPIVNKQSCSISNIETVIEFQQKNNRLLEITREFSVNAGVTTPVSTYMLTNSELLSLINDMPITNDQKKLMSNNVQIVRQQSYSIMSIIKEEVLAYVVQLPLYGVIDTPCWKLHTSPLCTTNTKEGSNICLTRTDRGWYCDNAGSVSFFPQAETCKVQSNRVFCDTMNSLTLPSEVNLCNIDIFNPKYDCKIMTSKTDVSSSVITSLGAIVSCYGKTKCTASNKNRGIIKTFSNGCDYVSNKGVDTVSVGNTLYYVNKQEGKSLYVKGEPIINFYDPLVFPSDEFDASISQVNEKINQSLAFIRKSNELLHNVNVGKSTTNIMITTIIIVIIVILLLLIAVGLFLYCKARSTPVTLSKDQLSGINNIAFSN

SEQ ID NO: 8814 - protein, 574 aa, Artificial Sequence
  derived and/or modified protein sequence (wt) from HRSV__AHA83705.1__F0
MELLIHRSSAIFLTFAINALYLTSSQNITEEFYQSTCSAVSRGYLSALRTGWYTSVITIELSNIKETKCNGTDTKVKLIKQELDKYKNAVTELQLLMQNTPAANNRARREAPQYMNYTINTTKNLNVSISKKRKRRFLGFLLGVGSAIASGIAVSKVLHLEGEVNKIKNALLSTNKAVVSLSNGVSVLTSKVLDLKNYINNQLLPIVNQQSCRISNIETVIEFQQKNSRLLEITREFSVNAGVTTPLSTYMLTNSELLSLINDMPITNDQKKLMSSNVQIVRQQSYSIMSIIKEEVLAYVVQLPIYGVIDTPCWKLHTSPLCTTNIKEGSNICLTRTDRGWYCDNAGSVSFFPQADTCKVQSNRVFCDTMNSLTLPSEVSLCNTDIFNSKYDCKIMTSKTDISSSVITSLGAIVSCYGKTKCTASNKNRGIIKTFSNGCDYVSNKGVDTVSVGNTLYYVNKLEGKNLYVKGEPIINYYDPLVFPSDEFDASISQVNEKINQSLAFIRRSDELLHNVNTGKSTTNIMITAIIIVIIVVLLSLIAIGLLLYCNAKNTPVTLSKDQLSGINNIAFSK

SEQ ID NO: 8815 - protein, 574 aa, Artificial Sequence
  derived and/or modified protein sequence (wt) from HRSV__AHA83630.1__F0
MELPILKTNAITTILAAVTLCFASSQNITEEFYQSTCSAVSKGYLSALRTGWYTSVITIELSNIKENKCNGTDAKVKLIKQELDKYKNAVTELQLLMQSTPAANSRARRELPRFMNYTLNNTKNTNVTLSKKRKRRFLGFLLGVGSAIASGIAVSKVLHLEGEVNKIKSALLSTNKAVVSLSNGVSVLTSKVLDLKNYIDKQLLPIVNKQSCSISNIETVIEFQQKNNRLLEITREFSVNAGVTTPVSTYMLTNSELLSLINDMPITNDQKKLMSSNVQIVRQQSYSIMSIIKEEVLAYVVQLPLYGVIDTPCWKLHTSPLCTTNTKEGSNICLTRTDRGWYCDNAGSVSFFPQAETCKVQSNRVFCDTMNSLTLPSEVNLCNIDIFNPKYDCKIMTSKTDVSSSVITSLGAIVSCYGKTKCTASNKNRGIIKTFSNGCDYVSNKGVDTVSVGNTLYYVNKQEGKSLYVKGEPIINFYDPLVFPSDEFDASISQVNEKINQSLAFIRKSDELLHNVNVGKSTTNIMITTIIIVIIVILLALIAVGLLLYCRARSTPVTLSKDQLSGINNIAFSN

SEQ ID NO: 8816 - protein, 574 aa, Artificial Sequence
  derived and/or modified protein sequence (wt) from HRSV__AGG39505.1__F0
MELLIHRSSAIFLTLAINALYLTSSQNITEEFYQSTCSAVSRGYFSALRTGWYTSVITIELSNIKETKCNGTDTKVKLIKQELDKYKNAVTELQLLMQNTPAANNRARREAPQYMNYTINTTKNLNVSISKKRKRRFLGFLLGVGSAIASGIAVSKVLHLEGEVNKIKNALLSTNKAVVSLSNGVSVLTSKVLDLKNYINNQLLPIVNQQSCRISNIETVIEFQQKNSRLLEITREFSVNAGVTTPLSTYMLTNSELLSLINDMPITNDQKKLMSSNAQIVRQQSYSIMSIIKEEVLAYVVQLPIYGVIDTPCWKLHTSPLCTTNTKEGSNICLTRTDRGWYCDNAGSVSFFPQADTCKVQSNRVFCDTMNSLTLPSEVSLCNTDIFNSKYDCKIMTSKTDISSSVITSLGAIVSCYGKTKCTASNKNRGIIKTFSNGCDYVSNKGVDTVSVGNTLYYVNKLEGKNLYVKGEPIINYYDPLVFPSDEFDASISQVNEKINQSLAFIRRSDELLHNVNTGKSTTNIMITAIIIVIIVVLLSLIAIGLLLYCKAKNTPVTLSKDQLSGINNIAFSK

SEQ ID NO: 8817 - protein, 574 aa, Artificial Sequence
  derived and/or modified protein sequence (wt) from HRSV__AIY70242.1__F0
MELPILKANAITTILAAVTLCFASSQNITEEFYQSTCSAVSKGYLSALRTGWYTSVITIELSNIKENKCNGTDAKVKLIKQELDKYKNAVTELQLLMQSTPAANNRARRELPRFMNYTLNNTKNTNVTLSKKRKRRFLGFLLGVGSAIASGIAVSKVLHLEGEVNKIKSALLSTNKAVVSLSNGVSVLTSKVLDLKNYIDKQLLPIVNKQSCSISNIETVIEFQQKNNRLLEITREFSVNAGVTTPVSTYMLTNSELLSLINDMPITNDQKKLMSNNVQIVRQQSYSIMSIIKEEVLAYVVQLPLYGVIDTPCWKLHTSPLCTTNTKEGSNICLTRTDRGWYCDNAGSVSFFPQAETCKVQSNRVFCDTMNSLTLPSEVNLCNVDIFNPKYDCKIMTSKTDVSSSVITSLGAIVSCYGKTKCTASNKNRGIIKTFSNGCDYVSNKGVDTVSVGNTLYYVNKQEGKNLYVKGEPIINFYDPLVFPSDEFDASISQVNEKINQSLAFIRKSDELLHNVNAVKSTTNIMITTIIIVIIVILLSLIVVGLLLYCKARSTPVTLSKDQLSGINNIAFSS

SEQ ID NO: 8818 - protein, 574 aa, Artificial Sequence
  derived and/or modified protein sequence (wt) from HRSV__AIY70198.1__F0
MELPILKANAITTILAAVTLCFASSQNITEEFYQSTCSAVSKGYLSALRTGWYTSVITIELSNIKENKCNGTDAKVKLIKQELDKYKNAVTELQLLMQSTPAANNRARRELPRFMNYTLNNTENTNVTLSKKRKRRFLGFLLGVGSAIASGIAVSKVLHLEGEVNKIKSALLSTNKAVVSLSNGVSVLTSKVLDLKNYIDKQLLPIVNKQSCSISNIETVIEFQQKNNRLLEITREFSVNAGVTTPVSTYMLTNSELLSLINDMPITNDQKKLMSNNVQIVRQQSYSIMSIIKEEVLAYVVQLPLYGVIDTPCWKLHTSPLCTTNTKEGSNICLTRTDRGWYCDNAGSVSFFPQAETCKVQSNRVFCDTMNSLTLPSEVSLCNVDIFNPKYDCKIMTSKTDVSSSVITSLGAIVSCYGKTKCTASNKNRGIIKTFSNGCDYVSNKGVDTVSVGNTLYYVNKQEGKNLYVKGEPIINFYDPLVFPSDEFDASISQVNEKINQSLAFIRKSDELLHNVNAVKSTTNIMITTIIIVIIVILLSLIVVGLLLYCKARSTPVTLSKDQLSGINNIAFSS

SEQ ID NO: 8819 - protein, 574 aa, Artificial Sequence
  derived and/or modified protein sequence (wt) from HRSV__AII30203.1__F0
MELPILKTNAITTILAAATLCFASSQNITEEFYQSTCSAVSKGYLSALRTGWYTSVITIELSNIKENKCNGTDAKVKLIKQELDKYKNAVTELQLLMQSTPAANNRARRELPKFMNYTLNNTKNTNVTLSKKRKRRFLGFLLGVGSAIASGIAVSKVLHLEGEVNKIKSALLSTNKAVVSLSNGVSVLTSKVLDLKNYIDKQLLPIVNKQSCSISNIETVIEFQQKNNRLLEITREFSVNAGVTTPVSTYMLTNSELLSLINDMPITNDQKKLMSNNVQIVRRQSYSIMSIIKEEVLAYVVQLPLYGVIDTPCWKLHTSPLCTTNTKEGSNICLTRTDRGWYCDNAGSVSFFPQAETCKVQSNRVFCDTMNSLTLPSEVNLCNIDIFNPKYDCKIMTSKTDVSSSVITSLGAIVSCYGKTKCTASNKNRGIIKTFSNGCDYVSNKGVDTVSVGNTLYYVNKQEGKSLYVKGEPIINFYDPLVFPSDEFDASISQVNEKINQSLAFIRKSDELLHNVNAGKSTTNIMITTIIIVIIVILLSLIAVGLLLYCKARSTPVTLSKDQLSGINNIAFSN

SEQ ID NO: 8820 - protein, 574 aa, Artificial Sequence
  derived and/or modified protein sequence (wt) from HRSV__AHY21441.1__F0
MELPILKTNAITTILAAVTLCFASSQNITEEFYQSTCSAVSKGYLSALRTGWYTSVITIELSNIKENKCNGTDAKVKLIKQELDKYKNAVTELQLLMQSTPAANNRARRELPRFMNYTLNNTKNTNVTLSKKRKRRFLGFLLGVGSAIASGIAVSKVLHLEGEVNKIKSALLSTNKAVVSLSNGVSVLTSKVLDLKNYIDKQLLPIVNKQSCSISNIETVIEFQQKNNRLLEITREFSVNAGVTTPVSTYMLTNSELLSLINDMPITNDQKKLMSNNVQIVRQQSYSIMSIIKEEVLAYVVQLPLYGVIDTPCWKLHTSPLCTTNTKEGSNICLTRTDRGWYCDNAGSVSFFPQAETCKVQSNRVFCDTMNSLTLPSEVNLCNIDIFNPKYDCKIMTSKTDVSSSVITSLGAIVSCYGKTKCTASNKNRGIIKTFSNGCDYVSNKGVDTVSVGNTLYYVNKQEGKSLYVKGEPIINFYDPLVFPSDEFDASISQVNEKINQSLAFIRKSDELLHNVNVGKSTTNIMITTIIIVIIVILLLLIAVGLFLYCKARSTPVSLSKDQLSGINNIAFSN

SEQ ID NO: 8821 - protein, 574 aa, Artificial Sequence
  derived and/or modified protein sequence (wt) from HRSV__AHY21463.1__F0
MELPILKTNAITTIFAAVTLCFASSQNITEEFYQSTCSAVSKGYLSALRTGWYTSVITVELSNIKENKCNGTDAKVKLIKQELDKYKNAVTELQLLMQSTPAANNRARRELPRFMNYTLNNTKNTNVTLSKKRKRRFLGFLLGVGSAIASGIAVSKVLHLEGEVNKIKSALLSTNKAVVSLSNGVSVLTSKVLDLKNYIDKQLLPIVNKQSCSISNIETVIEFQQKNNRLLEITREFSVNAGVTTPVSTYMLTNSELLSLINDMPITNDQKKLMSNNVQIVRQQSYSIMSIIKEEVLAYVVQLPLYGVIDTPCWKLHTSPLCTTNTKEGSNICLTRTDRGWYCDNAGSVSFFPQAETCKVQSNRVFCDTMNSLTLPSEVNLCNIDIFNPKYDCKIMTSKTDVSSSVITSLGAIVSCYGKTKCTASNKNRGIIKTFSNGCDYVSNKGVDTVSVGNTLYYVNKQEGKSLYVKGEPIINFYDPLVFPSDEFDASISQVNEKINQSLAFIRKSDELLHNVNAGKSTTNIMITTIIIVIIVILLSLIAVGLLLYCKARSTPVTLSKDQLSGINNIAFSN

SEQ ID NO: 8822 - protein, 574 aa, Artificial Sequence
  derived and/or modified protein sequence (wt) from HRSV__AHY21397.1__F0
MELLIHRSSAIFLTLAINALYLTSSQNITEEFYQSTCSAVSRGYFSALRTGWYTSVITIELSNIKETKCNGTDTKVKLIKQELDKYKNAVTELQLLMQNTPAANNRARREAPQYTNYTINTTKNLNVSISKKRKRRFLGFLLGVGSAIASGIAVSKVLHLEGEVNKIKNALLSTNKAVVSLSNGVSVLTSKVLDLKNYINNQLLPIVNKQSCRISNIETVIEFQQKNSRLLEITREFSVNAGVTTPLSTYMLTNSELLSLINDMPITNDQKKLMSSNAQIVRQQSYSIMSIIKEEVLAYVVQLPIYGVIDTPCWKLHTSPLCTTNIKEGSNICLTRTDRGWYCDNAGSVSFFPQADTCKVQSNRVFCDTMNSLTLPSEVSLCNTDIFNSKYDCKIMTSKTDISSSVITSLGAIVSCYGKTKCTASNKNRGIIKTFSNGCDYVSNKGVDTVSVGNTLYYVNKLEGKNLYVKGEPIINYYDPLVFPSDEFDASISQVNEKINQSLAFIRRSDELLHNVNTGKSTTNIMITTIIIVIIVVLLSLIAIGLLLYCKAKNTPVTLSKDQLSGINNIAFSK

SEQ ID NO: 8823 - protein, 574 aa, Artificial Sequence
  derived and/or modified protein sequence (wt) from HRSV__AHY21320.1__F0
MELPIIKANAITTILIAVTFCFASSQNITEEFYQSTCSAVSKGYLSALRTGWYTSVITIELSNIKENKCNGTDAKVKLIKQELDKYKNAVTELQLLMQSTPAANNRARRELPRFMNYTLNNAKKTNVTLSKKRKRRFLGFLLGVGSAIASGIAVSKVLHLEGEVNKIKSALLSTNKAVVSLSNGVSVLTSKVLDLKNYIDKQLLPIVNKQSCSISNIETVIEFQQKNNRLLEITREFSVNAGVTTPVSTYMLTNSELLSLINDMPITNDQKKLMSNNVQIVRQQSYSIMSIIKEEVLAYVVQLPLYGVIDTPCWKLHTSPLCTTNTKEGSNICLTRTDRGWYCDNAGSVSFFPQADTCKVQSNRVFCDTMNSLTLPSEVNLCNIDIFNPKYDCKIMTSKTDVSSSVITSLGAIVSCYGKTKCTASNKNRGIIKTFSNGCDYVSNKEVDTVSVGNTLYYVNKQEGKSLYVKGEPIINFYDPLVFPSDEFDASISQVNEKINQSLAFIRKSDELLHNVNAGKSTTNIMITTIIIVIIVILLSLIAVGLLLYCKARSTPVTLSKDQLSGINNIAFSN

SEQ ID NO: 8824 - protein, 574 aa, Artificial Sequence
  derived and/or modified protein sequence (wt) from HRSV__AHY21298.1__F0
MELMIHKSSAIFLTLAINALYLTSSQNITEEFYQSTCSAVSRGYFSALRTGWYTSVITIELSNIKETKCNGTDTKVKLIKQELDKYKNAVTELQLLMQNTPAVNNRARREAPQYMNYTINTTKNLNVSISKKRKRRFLGFLLGVGSAIASGIAVSKVLHLEGEVNKIKNALLSTNKAVVSLSNGVSVLTSKVLDLKNYINNQLLPIVNQQSCRISNIETVIEFQQKNSRLLEITREFSVNAGVTTPLSTYMLTNSELLSLINDMPITNDQKKLMSSNVQIVRQQSYSIMSIIKEEVLAYVVQLPIYGVIDTPCWKLHTSPLCTTNIKEGSNICLTRTDRGWYCDNAGSVSFFPQADTCKVQSNRVFCDTMNSLTLPSEVSLCNTDIFNSKYDCKIMTSKTDISSSVITSLGAIVSCYGKTKCTASNKNRGIIKTFSNGCDYVSNKGVDTVSVGNTLYYVNKLEGKNLYVKGEPIINYYDPLVFPSDEFDASISQVNEKINQSLAFIRRSDELLHNVNTGKSTTNIIITTIIIVIIVVLLSLIAIGLLLYCKAKNTPVTLSKDQLSGINNIAFSK

SEQ ID NO: 8825 - protein, 574 aa, Artificial Sequence
  derived and/or modified protein sequence (wt) from HRSV__AHY21287.1__F0
MELPIIKANAITTILIAVTFCFASSQNITEEFYQSTCSAVSKGYLSALRTGWYTSVITIELSNIKENKCNGTDAKVKLIKQELDKYKNAVTELQLLMQSTPAANNRARRELPRFMNYTLNNAKKTNVTLSKKRKRRFLGFLLGVGSAIASGIAVSKVLHLEGEVNKIKNALLSTNKAVVSLSNGVSVLTSKVLDLKNYIDKQLLPIVNKQSCSISNIETVIEFQQKNNRLLEITREFSVNAGVTTPVSTYMLTNSELLSLINDMPITNDQKKLMSNNVQIVRQQSYSIMSIIKEEVLAYVVQLPLYGVIDTPCWKLHTSPLCTTNTKEGSNICLTRTDRGWYCDNAGSVSFFPQADTCKVQSNRVFCDTMNSLTLPSEVNLCNIDIFNPKYDCKIMTSKTDVSSSVITSLGAIVSCYGKTKCTASNKNRGIIKTFSNGCDYVSNKGVDTVSVGNTLYYVNKQEGKSLYVKGEPIINFYDPLVFPSDEFDASISQVNEKINQSLAFIRKSDELLHNVNAGKSTTNIMITTIIIVIIVILLSLIAVGLLLYCKARSTPVTLSKDQLSGINNIAFSN

SEQ ID NO: 8826 - protein, 574 aa, Artificial Sequence
  derived and/or modified protein sequence (wt) from HRSV__AHY21276.1__F0
MELPIIKANAITTILIAVTFCFASSQNITEEFYQSTCSAVSKGYLSALRTGWYTSVITIELSNIKENKCNGTDAKVKLIKQELDKYKNAVTELQLLMQSTPAANNRARRELPRFMNYTLNNAKKTNVTLSKKRKRRFLGFLLGVGSAIASGIAVSKVLHLEGEVNKIKSALLSTNKAVVSLSNGVSVLTSKVLDLKNYIDKQLLPIVNKQSCSISNIETVIEFQQKNSRLLEITREFSVNAGVTTPVSTYMLTNSELLSLINDMPITNDQKKLMSNNVQIVRQQSYSIMSIIKEEVLAYVVQLPLYGVIDTPCWKLHTSPLCTTNTKEGSNICLTRTDRGWYCDNAGSVSFFPQADTCKVQSNRVFCDTMNSLTLPSEVNLCNIDIFNPKYDCKIMTSKTDVSSSVITSLGAIVSCYGKTKCTASNKNRGIIKTFSNGCDYVSNKGVDTVSVGNTLYYVNKQEGKSLYVKGEPIINFYDPLVFPSDEFDASISQVNEKINQSLAFIRKSDELLHNVNAGKSTTNIMITTIIIVIIVILLSLIAVGLLLYCKARSTPVTLSKDQLSGINNIAFSN

SEQ ID NO: 8827 - protein, 574 aa, Artificial Sequence
  derived and/or modified protein sequence (wt) from HRSV__AHY21254.1__F0
MELPILKTNAITTILAAVTLCFASSQNITEEFYQSTCSAVSKGYLSALRTGWYTSVITIELSNIKENKCNGTDAKVKLIKQELDKYKNAVTELQLLMQSTPAANNRARRELPRFMNYTLNNTKNTNVTLSKKRKRRFLGFLLGVGSAIASGIAVSKVLHLEGEVNKIKSALLSTNKAVVSLSNGVSVLTSKVLDLKNYIDKQLLPIVNKQSCSISNIETVIEFQQKNNRLLEITREFSVNAGVTTPVSTYMLTNSELLSLINDMPITNDQKKLMSNNVQIVRQQSYSIMSIIKEEVLAYVVQLPLYGVIDTPCWKLHTSPLCTTNTKEGSNICLTRTDRGWYCDNAGSVSFFPQAETCKVQSNRVFCDTMNSLTLSSEVNLCNIDIFNPKYDCKIMTSKTDVSSSVITSLGAIVSCYGKTKCTASNKNRGIIKTFSNGCDYVSNKGVDTVSVGNTLYYVNKQEGKSLYVKGEPIINFYDPLVFPSDEFDASISQVNEKINQSLAFIRKSDELLHNVNAGKSTTNIMITTIIIVIIVILLSLIAVGLLLYCKARSTPVTLSKDQLSGINNIAFSN

SEQ ID NO: 8828 - protein, 574 aa, Artificial Sequence
  derived and/or modified protein sequence (wt) from HRSV__AHY21199.1__F0
MELLIHRSSAIFLTIAINALYLTSSQNITEEFYQSTCSAVSRGYFSALRTGWYTSVITIELSNIKETKCNGTDTKVKLIKQELDKYKNAVTELQLLMQNTPATNNRARREAPQYMNYTINTTKNLNVSISKKRKRRFLGFLLGVGSAIASGIAVSKVLHLEGEVNKIKNALLSTNKAVVSLSNGVSVLTSKVLDLKNYINNQLLPIVNQQSCRISNIETVIEFQQKNSRLLEITREFSVNAGVTTPLSTYMLTNSELLSLINDMPITNDQKKLMSSNVQIVRQQSYSIMSIIKEEVLAYVVQLPIYGVIDTPCWKLHTSPLCTTNIKEGSNICLTRTDRGWYCDNAGSVSFFPQADTCKVQSNRVFCDTMNSLTLPSEVSLCNTDIFNSKYDCKIMTSKTDISSSVITSLGAIVSCYGKTKCTASNKNRGIIKTFSNGCDYVSNKGVDTVSVGNTLYYVNKLEGKNLYVKGEPIINYYDPLVFPSDEFDASISQVNEKINQSLAFIRRSDELLHNVNTGKSTTNIMITAIIIVIIVVLLSLIAIGLLLYCKAKNTPVTLSKDQLSGINNIAFSK

SEQ ID NO: 8829 - protein, 574 aa, Artificial Sequence
  derived and/or modified protein sequence (wt) from HRSV__AHY21176.1__F0
MELPILKTNAITTILAAVTLCFASSQNITEEFYQSTCSAVSKGYLSALRTGWYTSVITIELSNIKENKCNGTDAKVKLIKQELDKYKNAVTELQLLMQSTPAANNRARRELPRFMNHTLNNTKNTNVTLSKKRKRRFLGFLLGVGSAIASGIAVSKVLHLEGEVNKIKSALLSTNKAVVSLSNGVSVLTSKVLDLKNYIDKQLLPIVNKQSCSISNIETVIEFQQKNNRLLEITREFSVNAGVTTPVSTYMLTNSELLSLINDMPITNDQKKLMSNNVQIVRQQSYSIMSIIKEEVLAYVVQLPLYGVIDTPCWKLHTSPLCTTNTKEGSNICLTRTDRGWYCDNAGSVSFFPQAETCKVQSNRVFCDTMNSLTLPSEVNLCNIDIFNPKYDCKIMTSKTDVSSSVITSLGAIVSCYGKTKCTASNKNRGIIKTFSNGCDYVSNKGVDTVSVGNTLYYVNKQEGKSLYVKGEPIINFYDPLVFPSDEFDASISQVNEKINQSLAFIRKSDELLHNVNAGKSTTNIMITTIIIVIIVILLSLIAVGLLLYCKARSTPVTLSKDQLSGINNIAFSN

SEQ ID NO: 8830 - protein, 574 aa, Artificial Sequence
  derived and/or modified protein sequence (wt) from HRSV__AHX57537.1__F0
MELPILKTNAITTILAAVTLCFTSSQNITEEFYQSTCSAVSKGYLSALRTGWYTSVITIELSNIKENKCNGTDAKVKLIKQELDKYKNAVTELQLLMQSSPAANSRARRELPRFMNYTLNNTKNTNVTLSKKRKRRFLGFLLGVGSAIASGIAVSKVLHLEGEVNKIKSALLSTNKAVVSLSNGVSVLTSKVLDLKNYIDKQLLPIVNKQSCSISNIETVIEFQQKNNRLLEITREFSVNAGVTTPVSTYMLTNSELLSLINDMPITNDQKKLMSSNVQIVRQQSYSIMSIIKEEVLAYVVQLPLYGVIDTPCWKLHTSPLCTTNTKEGSNICLTRTDRGWYCDNAGSVSFFPQAETCKVQSNRVFCDTMNSLTLPSEVNLCNIDIFNPKYDCKIMTSKTDVSSSVITSLGAIVSCYGKTKCTASNKNRGIIKTFSNGCDYVSNKGVDTVSVGNTLYYVNKQEGKSLYVKGEPIINFYDPLVFPSDEFDASISQVNEKINQSLAFIRKSDELLHNVNAGKSTTNIMITTIIIVIIVILLALIAVGLLLYCKARSTPVTLSKDQLSGINNIAFSN

SEQ ID NO: 8831 - protein, 574 aa, Artificial Sequence
  derived and/or modified protein sequence (wt) from HRSV__AHX57471.1__F0
MELPILKTNAITTILAAVTLCFASSQNITEEFYQSTCSAVSKGYLSALRTGWYTSVITIELSNIKENKCNGTDAKVKLIKQELDKYKNAVTELQLLMQSSPAANSRARRELPRFMNYTLNNTKNTNVTLSKKRKRRFLGFLLGVGSAIASGIAVSKVLHLEGEVNKIKSALLSTNKAVVSLSNGVSVLTSKVLDLKNYIDKQLLPIVNKQSCSISNIETVIEFQQKNNRLLEITREFSVNAGVTTPVSTYMLTNSELLSLINDMPITNDQKKLMSSNVQIVRQQSYSIMSIIKEEVLAYVVQLPLYGVIDTPCWKLHTSPLCTTNTKEGSNICLTRTDRGWYCDNAGSVSFFPQAETCKVQSNRVFCDTMNSLTLPSEVNLCNIDIFNPKYDCKIMTSKTDVSSSVITSLGAIVSCYGKTKCTASNKNRGIIKTFSNGCDYVSNKGVDTVSVGNTLYYVNKQEGKSLYVKGEPIINFYDPLVFPSDEFDASISQVNEKINQSLAFIRKSDELLHNVNAGKSTTNIMITTIIIVIIVILLALIAVGLLLYCKARSTPVTLSKDQLSGINNIAFSN

SEQ ID NO: 8832 - protein, 574 aa, Artificial Sequence
  derived and/or modified protein sequence (wt) from HRSV__AHX57427.1__F0
MELPILKTNAITTILAAVTLCFASSQNITEEFYQSTCSAVSKGYLSALRTGWYTSVITIELSNIKENKCNGTDAKVKLIKQELDKYKNAVTELQLLMQSTPAANSRARRELPRFMNYTLNNTKNTNVTLSKKRKRRFLGFLLGVGSAIASGIAVSKVLHLEGEVNKIKSALLSTNKAVVSLSNGVSVLTSKVLDLKNYIDKQLLPIVNKQSCSISNIETVIEFQQKNNRLLEITREFSVKAGVTTPVSTYMLTNSELLSLINDMPITNDQKKLMSSNVQIVRQQSYSIMSIIKEEVLAYVVQLPLYGVIDTPCWKLHTSPLCTTNTKEGSNICLTRTDRGWYCDNAGSVSFFPQAETCKVQSNRVFCDTMNSLTLPSEVNLCNIDIFNPKYDCKIMTSKTDVSSSVITSLGAIVSCYGKTKCTASNKNRGIIKTFSNGCDYVSNKGVDTVSVGNTLYYVNKQEGKSLYVKGEPIINFYDPLVFPSDEFDASISQVNEKINQSLAFIRKSDELLHNVNAGKSTTNIMITTIIIVIIVILLALIAVGLLLYCKARSTPVTLSKDQLSGINNIAFSN

SEQ ID NO: 8833 - protein, 574 aa, Artificial Sequence
  derived and/or modified protein sequence (wt) from HRSV__AHX57042.1__F0
MELLIHRSSVIFLTLAINALYLTSSQNITEEFYQSTCSAVSRGYFSALRTGWYTSVITIELSNIKETKCNGTDTKVKLIKQELDKYKNAVTELQLLMQNIPAANNRARREAPQYMNYTINTTKNLNVSISKKRKRRFLGFLLGVGSAIASGIAVSKVLHLEGEVNKIKNALLSTNKAVVSLSNGVSVLTSKVLDLKNYINNQLLPIVNQQSCRISNIETVIEFQQKNSRLLEITREFSVNAGVTTPLSTYMLTNSELLSLINDMPITNDQKKLMSSNVQIVRQQSYSIMSIIKEEVLAYVVQLPIYGVIDTPCWKLHTSPLCTTNIKEGSNICLTRTDRGWYCDNAGSVSFFPQADTCKVQSNRVFCDTMNSLTLPSEVSLCNTDIFNSKYDCKIMTSKTDISSSVITSLGAIVSCYGKTKCTASNKNRGIIKTFSNGCDYVSNKGVDTVSVGNTLYYVNKLEGKNLYVKGEPIINYYDPLVFPSDEFDASISQVNEKINQSLAFIRRSDELLHNVNTGKSTTNIMITVIIIVIIVVLLSLIAIGLLLYCKAKNTPVTLSKDQLSGINNIAFSK

SEQ ID NO: 8834 - protein, 574 aa, Artificial Sequence
  derived and/or modified protein sequence (wt) from HRSV__AIZ95981.1__F0
MELPIIKANAITTILIAVTFCFASSQNITEEFYQSTCSAVSKGYLSALRTGWYTSVITIELSNIKENKCNGTDAKVKLIKQELDKYKNAVTELQLLMQSTPAANNRARRELPRFMNYTLNNAKKTNVTLSKKRKRRFLGFLLGVGSAIASGIAVSKVLHLEGEVNKIKSALLSTNKAVVSLSNGVSVLTSKVLDLKNYIDKQLLPIVNKQSCSISNIETVIEFQQKNNRLLEITREFSVNAGVTTPVSTYMLTNSELLSLINDMPITNDQKKLMSNNVQIVRQQSYSIMSIIKEEVLAYIVQLPLYGVIDTPCWKLHTSPLCTTNTKEGSNICLTRTDRGWYCDNAGSVSFFPQADTCKVQSNRVFCDTMNSLTLPSEVNLCNIDIFNPKYDCKIMTSKTDVSSSVITSLGAIVSCYGKTKCTASNKNRGIIKTFSNGCDYVSNKGVDTVSVGNTLYYVNKQEGKSLYVKGEPIINFYDPLVFPSNEFDASISQVNEKINQSLAFIRKSDELLHNVNAGKSTTNIMITTIIIVIIVILLSLIAVGLLLYCKARSTPVTLSKDQLSGINNIAFSN

SEQ ID NO: 8835 - protein, 574 aa, Artificial Sequence
  derived and/or modified protein sequence (wt) from HRSV__AIZ95893.1__F0
MELPILKTNAITTILAAVTLCFASSQNITEEFYQSTCSAVSKGYLSALRTGWYTSVITIELSNIKENKCNGTDAKVKLIKQELDKYKNAVTELQLLMQSTPAANNRARRELPRFMNYTLNNTKNTNVTLSKKRKRRFLGFLLGVGSAIASGIAVSKVLHLEGEVNKIKSALLSTNKAVVSLSNGVSVLTSKVLDLKNYIDKQLLPIVNKQSCSISNIETVIEFQQKNNRLLEITREFSVNAGVTTPVSTYMLTNSELLSLINDMPITNDQKKLMSNNVQIVRQQSYSIMSIIKEEVLAYVVQLPLYGVIDTPCWKLHTSPLCTTNTKEGSNICLTRTDRGWYCDNAGSVSFFPQAETCKVQSNRVFCDTMNSLTLPSEVNLCNIDIFNPKYDCKIMTSKTDVSSSVITSLGAIVSCYGKTKCTASNKNRGIIKTFSNGCDYVSNKGVDTVSVGNTLYYVNKQEGKSLYVKGEPIINFYDPLVFPSDEFDASISQVNEKINQSLAFIRKSDELLHNVNAGKSTTNVMITTIIIVIIVILLSLIAVGLLLYCKARSTPVTLSKDQLSGINNIAFSN

SEQ ID NO: 8836 - protein, 574 aa, Artificial Sequence
  derived and/or modified protein sequence (wt) from HRSV__AIZ95871.1__F0
MELLIHKSSAIFLTLAINALYLTSSQNITEEFYQSTCSAVSRGYFSALRTGWYTSVITIELSNIKETKCNGTDTKVKLIKQELDKYKNAVTELQLLMQNTPAANNRARREAPQYMNYTINTTKNLNVSISKKRKRRFLGFLLGVGSAIASGIAVSKVLHLEGEVNKIKNALLSTNKAIVSLSNGVSVLTSKVLDLKNYINNQLLPIVNQQSCRISNIETVIEFQQKNSRLLEITREFSVNAGVTTPLSTYMLTNSELLSLINDMPITNDQKKLMSSNVQIVRQQSYSIMSIIKEEVLAYVVQLPIYGVIDTPCWKLHTSPLCTTNIKEGSNICLTRTDRGWYCDNAGSVSFFPQADTCKVQSNRVFCDTMNSLTLPSEVSLCNTDIFNSKYDCKIMTSKTDISSSVITSLGAIVSCYGKTKCTASNKNRGIIKTFSNGCDYVSNKGVDTVSVGNTLYYVNKLEGKNLYVKGEPIINYYDPLVFPSDEFDASISQVNEKINQSLAFIRRSDELLHNVNTGKSTTNIMITTIIIVIIVVLLSLIAIGLLLYCKAKNTPVTLSKDQLSGINNIAFSK

SEQ ID NO: 8837 - protein, 574 aa, Artificial Sequence
  derived and/or modified protein sequence (wt) from HRSV__AIZ95816.1__F0
MELPILKTNAITIILAAVTLCFVSSQNITEEFYQSTCSAVSKGYLSALRTGWYTSVITIELSNIKENKCNGTDAKVKLIKQELDKYKNAVTELQLLMQSTPAANNRARRELPRFMNYTLNSTKNTNVTLSKKRKRRFLGFLLGVGSAIASGIAVSKVLHLEGEVNKIKSALLSTNKAVVSLSNGVSVLTSKVLDLKNYIDKQLLPIVNKQSCSISNIETVIEFQQKNNRLLEITREFSVNAGVTTPVSTYMLTNSELLSLINDMPITNDQKKLMSNNVQIVRQQSYSIMSIIKEEVLAYVVQLPLYGVIDTPCWKLHTSPLCTTNTKEGSNICLTRTDRGWYCDNAGSVSFFPQAETCKVQSNRVFCDTMNSLTLPSEVNLCNIDIFNPKYDCKIMTSKTDVSSSVITSLGAIVSCYGKTKCTASNKNRGIIKTFSNGCDYVSNKGVDTVSVGNTLYYVNKQEGKSLYVKGEPIINFYDPLVFPSDEFDASISQVNEKINQSLAFIRKSDELLHNVNVGKSTTNIMITTIIIVIIVILLLLIAVGLFLYCKARSTPVTLSKDQLSGINNIAFSN

SEQ ID NO: 8838 - protein, 574 aa, Artificial Sequence
  derived and/or modified protein sequence (wt) from HRSV__AIZ95772.1__F0
MELPILKTNAITTILAAVTLCFASSQNITEEFYQSTCSAVSKGYLSALRTGWYTSVITIELSNIKENKCNGTDAKVKLIKQELDKYKNAVTELQLLMQSTPAANNRARRELPRFMNYTLNNTKNTNVTLSKKRKRRFLGFLLGVGSAIASGIAVSKVLHLEGEVNKIKSALLSTNKAVVSLSTGVSVLTSKVLDLKNYIDKQLLPIVNKQSCSISNIETVIEFQQKNNRLLEITREFSVNAGVTTPVSTYMLTNSELLSLINDMPITNDQKKLMSNNVQIVRQQSYSIMSIIKEEVLAYVVQLPLYGVIDTPCWKLHTSPLCTTNTKEGSNICLTRTDRGWYCDNAGSVSFFPQAETCKVQSNRVFCDTMNSLTLPSEVNLCNIDIFNPKYDCKIMTSKTDVSSSVITSLGAIVSCYGKTKCTASNKNRGIIKTFSNGCDYVSNKGVDTVSVGNTLYYVNKQEGKSLYVKGEPIINFYDPLVFPSDEFDASISQVNEKINQSLAFIRKSDELLHNVNVGKSTTNIMITTIIIVIIVILLLLIAVGLFLYCKARSTPVTLSKDQLSGINNIAFSN

SEQ ID NO: 8839 - protein, 574 aa, Artificial Sequence
  derived and/or modified protein sequence (wt) from HRSV__AIZ95684.1__F0
MELLIHRSSAIFLTLAINALYLTSSQNITEEFYQSTCSAVSRGYFSALRTGWYTSVITIELSNIKETKCNGTDTKVKLIKQELDKYKNAVTELQLLMQNTPAANNRARREAPQYMNYTINTTKNLNVSISKKRKRRFLGFLLGVGSAIASGIAVSKVLHLEGEVNKIKNALLSTNKAVVSLSNGVSVLTSKVLDLKNYINNQLLPIVNQQSCRISNIETVIEFQQKNSRLLEITREFSVNAGVTTPLSTYMLTNSELLSLINDMPITNDQKKLMSSNVQIVRQQSYSIMSIIKEEVLAYVVQLPIYGVIDTPCWKLHTSPLCTTNIKEGSNICLTRTDRGWYCDNAGSVSFFPQADTCKVQSNRVFCDTMNSLTLPSEVSLCNTDIFNSKYDCKIMTSKTDISSSVITSLGAIVSCYGKTKCTASNKNRGIIKTFSNGCDYVSNKGVDTVSVGNTLYYVNKLEGKNLYVKGEPIINYYDPLVFPSDEFDASISQVNEKINQSLAFIRRSDELLHNVNTGKSTTNIMITAIIIVIIVVLLSLIAIGLLLYCKAKNTPVTLSKDQISGINNIAFSK

SEQ ID NO: 8840 - protein, 574 aa, Artificial Sequence
  derived and/or modified protein sequence (wt) from HRSV__AIZ95629.1__F0
MELLIHRSSAIFLTLAINALYFTSGQNITEEFYQSTCSAVSRGYFSALRTGWYTSVITIELSNIKETKCNGTDTKVKLIKQELDKYKNAVTELQLLMQNTPAANNRARREAPQYMNYTINTTKNLNVSTSKKRKRRFLGFLLGVGSAIASGIAVSKVLHLEGEVNKIKNALLSTNKAVVSLSNGVSVLTSKVLDLKNYINNQLLPIVNQQSCRISNIETVIEFQQKNSRLLEITREFSVNAGVTTPLSTYMLTNSELLSLINDMPITNDQKKLMSSNVQIVRQQSYSIMSIIKEEVLAYVVQLPIYGVIDTPCWKLHTSPLCTTNIKEGSNICLTRTDRGWYCDNAGSVSFFPQADTCKVQSNRVFCDTMNSLTLPSEVSLCNTDIFNSKYDCKIMTSKTDISSSVITSLGAIVSCYGKTKCTASNKNRGIIKTFSNGCDYVSNKGVDTVSVGNTLYYVNKLEGKNLYVKGEPIINYYDPLVFPSDEFDASISQVNEKINQSLAFIRRSDELLHNVNTGKSTTNIMITAIIIVIIVVLLSLIAIGLLLYCKAKNTPVTLSKDQLSGINNIAFSK

SEQ ID NO: 8841 - protein, 574 aa, Artificial Sequence
  derived and/or modified protein sequence (wt) from HRSV__AIZ95673.1__F0
MESLIHRSSAIFLTLAINALYLTSSQNITEEFYQSTCSAVSRGYFSALRTGWYTSVITIELSNIKETKCNGTDTKVKLIKQELDKYKNAVTELQLLMQNTPAANNRARREAPQYMNYTINTTKNLNVSISKKRKRRFLGFLLGVGSAIASGIAVSKVLHLEGEVNKIKNALLSTNKAVVSLSNGVSVLTSKVLDLKNYINNQLLPIVNQQSCRISNIETVIEFQQKNSRLLEITREFSVNAGVTTPLSTYMLTNSELLSLINDMPITNDQKKLMSSNVQIVRQQSYSIMSIIKEEVLAYVVQLPIYGVIDTPCWKLHTSPLCTTNIKEGSNICLTRTDRGWYCDNAGSVSFFPQADTCKVQSNRVFCDTMNSLTLPSEVSLCNTDIFNSKYDCKIMTSKTDISSSVITSLGAIVSCYGKTKCTASNKNRGIIKTFSNGCDYVSNKGVDTVSVGNTLYYVNKLEGKNLYVKGEPIINYYDPLVFPSDEFDASISQVNEKINQSLAFIRRSDELLHNVNTGKSTTNIMITTIIIVIIVVLLSLIAIGLLLYCKAKNTPVTLSKDQLSGINNIAFSK

SEQ ID NO: 8842 - protein, 574 aa, Artificial Sequence
  derived and/or modified protein sequence (wt) from HRSV__AIZ95596.1__F0
MELPILKTNAITTILAAATLCFASSQNITEEFYQSTCSAVSKGYLSALRTGWYTSVITIELSNIKENKCNGTDVKVKLIKQELDKYKNAVTELQLLMQSTPAANNRARRELPRFMNYTLNNTKNTNVTLSKKRKRRFLGFLLGVGSAIASGIAVSKVLHLEGEVNKIKSALLSTNKAVVSLSNGVSVLTSKVLDLKNYIDKQLLPIVNKQSCSISNIETVIEFQQKNNRLLEITREFSVNAGVTTPVSTYMLTNSELLSLINDMPITNDQKKLMSNNVQIVRQQSYSIMSIIKEEVLAYVVQLPLYGVIDTPCWKLHTSPLCTTNTKEGSNICLTRTDRGWYCDNAGSVSFFPQAETCKVQSNRVFCDTMNSLTLPSEVNLCNIDIFNPKYDCKIMTSKTDVSSSVITSLGAIVSCYGKTKCTASNKNRGIIKTFSNGCDYVSNKGVDTVSVGNTLYYVNKQEGKSLYVKGEPIINFYDPLVFPSDEFDASISQVNEKINQSLAFIRKSDELLHNVNAGKSTTNIMITTIIIVIIVILLSLIAVGLLLYCKARSTPVTLSKDQLSGINNIAFSN

SEQ ID NO: 8843 - protein, 574 aa, Artificial Sequence
  derived and/or modified protein sequence (wt) from HRSV__AIZ95585.1__F0
MELPILKTNAITTILAAVTLCFASSQNITEEFYQSTCSAVSKGYLSALRTGWYTSVITIELSNIKENKCNGTDAKVKLIKQELDKYKNAVTELQLLMQSTPAANNRARRELPRFMNYTLNSTKNTNVTLSKKRKRRFLGFLLGVGSAIASGIAVSKVLHLEGEVDKIKSALLSTNKAVVSLSNGVSVLTSKVLDLKNYIDKQLLPIVNKQSCSISNIETVIEFQQKNNRLLEITREFSVNAGVTTPVSTYMLTNSELLSLINDMPITNDQKKLMSNNVQIVRQQSYSIMSIIKEEVLAYVVQLPLYGVIDTPCWKLHTSPLCTTNTKEGSNICLTRTDRGWYCDNAGSVSFFPQAETCKVQSNRVFCDTMNSLTLPSEVNLCNIDIFNPKYDCKIMTSKTDVSSSVITSLGAIVSCYGKTKCTASNKNRGIIKTFSNGCDYVSNKGVDTVSVGNTLYYVNKQEGKSLYVKGEPIINFYDPLVFPSDEFDASISQVNEKINQSLAFIRKSDELLHNVNVGKSTTNIMITTIIIVIIVILLLLIAVGLFLYCKARSTPVTLSKDQLSGINNIAFSN

SEQ ID NO: 8844 - protein, 574 aa, Artificial Sequence
  derived and/or modified protein sequence (wt) from HRSV__AIZ95552.1__F0
MELPILKTNAITTILAAVTLCLASSQNITEEFYQSTCSAVSKGYLSALRTGWYTSVITIELSNIKENKCNGTDAKVKLIKQELDKYKNAVTELQLLMQSTPAANNRARRELPRFMNYTLNNTKNTNVTLSKKRKRRFLGFLLGVGSAIASGIAVSKVLHLEGEVNKIKSALLSTNKAVVSLSNGVSVLTSKVLDLKNYIDKQLLPIVNKQSCSISNIETVIEFQQKNNRLLEITREFSVNAGVTTPVSTYMLTNSELLSLINDMPITNDQKKLMSNNVQIVRQQSYSIMSIIKEEVLAYVVQLPLYGVIDTPCWKLHTSPLCTTNTKEGSNICLTRTDRGWYCDNAGSVSFFPQAETCKVQSNRVFCDTMNSLTLPSEVNLCNIDIFNPKYDCKIMTSKTDVSSSVITSLGAIVSCYGKTKCTASNKNRGIIKTFSNGCDYVSNKGVDTVSVGNTLYYVNKQEGKSLYVKGEPIINFYDPLVFPSDEFDASISQVNEKINQSLAFIRKSDELLHNVNAGKSTTNIMITTIIIVIIVILLSLIAVGLLLYCKARSTPVTLSKDQLSGINNIAFSN

SEQ ID NO: 8845 - protein, 574 aa, Artificial Sequence
  derived and/or modified protein sequence (wt) from HRSV__AHX57570.1__F0
MELPILKTNAITTILAAVTLCFASSQNITEEFYQSTCSAVSKGYLSALRTGWYTSVITIELSNIKENKCNGTDAKVKLIKQELDKYKNAVTELQLLMQSTPAANSRARRELPRFMNYTLKNTKNTNVTLSKKRKRRFLGFLLGVGSAIASGIAVSKVLHLEGEVNKIKSALLSTNKAVVSLSNGVSVLTSKVLDLKNYIDKQLLPIVNKQSCSISNIETVIEFQQKNNRLLEITREFSVNAGVTTPVSTYMLTNSELLSLINDMPITNDQKKLMSSNVQIVRQQSYSIMSIIKEEVLAYVVQLPLYGVIDTPCWKLHTSPLCTTNTKEGSNICLTRTDRGWYCDNAGSVSFFPQAETCKVQSNRVFCDTMNSLTLPSEVNLCNIDIFNPKYDCKIMTSKTDVSSSVITSLGAIVSCYGKTKCTASNKNRGIIKTFSNGCDYVSNKGVDTVSVGNTLYYVNKQEGKSLYVKGEPIINFYDPLVFPSDEFDASISQVNEKINQSLAFIRKSDELLHNVNAGKSTTNIMITTIIIVIIVILLALIAVGLLLYCKARSTPVTLSKDQLSGINNIAFSN

SEQ ID NO: 8846 - protein, 574 aa, Artificial Sequence
  derived and/or modified protein sequence (wt) from HRSV__AHX57152.1__F0
MELPILKTNAITTILAAVTLCFASSQNITEEFYQSTCSAVSKGYLSALRTGWYTSVITIELSNIKENKCNGTDAKVKLIKQELDKYKNAVTELQLLMQSTPAANSRARRELPRFMNYTLNNTKYTNVTLSKKRKRRFLGFLLGVGSAIASGIAVSKVLHLEGEVNKIKSALLSTNKAVVSLSNGVSVLTSKVLDLKNYIDKQLLPIVNKQSCSISNIETVIEFQQKNNRLLEITREFSVNAGVTTPVSTYMLTNSELLSLINDMPITNDQKKLMSSNVQIVRQQSYSIMSIIKEEVLAYVVQLPLYGVIDTPCWKLHTSPLCTTNTKEGSNICLTRTDRGWYCDNAGSVSFFPQAETCKVQSNRVFCDTMNSLTLPSEVNLCNIDIFNPKYDCKIMTSKTDVSSSVITSLGAIVSCYGKTKCTASNKNRGIIKTFSNGCDYVSNKGVDTVSVGNTLYYVNKQEGKSLYVKGEPIINFYDPLVFPSDEFDASISQVNEKINQSLAFIRKSDELLHNVNAGKSTTNIMITTIIIVIIVILLALIAVGLLLYCKARSTPVTLSKDQLSGINNIAFSN

SEQ ID NO: 8847 - protein, 574 aa, Artificial Sequence
  derived and/or modified protein sequence (wt) from HRSV__AHX57064.1__F0
MELPILKTNAITTILAAVTLCFASSQNITEEFYQSTCSAVSKGYLSALRTGWYTSVITIELSNIKENKCNGTDAKVKLIKQELDKYKNAVTELQLLMQSTPAANSRARRELPRFMNYTLNNTKNTNVTLSKKRKRRFLGFLLGVGSAIASGIAVSKVLHLEGEVNKIKSALLSTNKAVVSLSNGVSVLTSKVLDLKNYIDKQLLPIVNKQSCSISNIETVIEFQQKNNRLLEITREFSVNAGVTTPVSTYMLTNGELLSLINDMPITNDQKKLMSSNVQIVRQQSYSIMSIIKEEVLAYVVQLPLYGVIDTPCWKLHTSPLCTTNTKEGSNICLTRTDRGWYCDNAGSVSFFPQAETCKVQSNRVFCDTMNSLTLPSEVNLCNIDIFNPKYDCKIMTSKTDVSSSVITSLGAIVSCYGKTKCTASNKNRGIIKTFSNGCDYVSNKGVDTVSVGNTLYYVNKQEGKSLYVKGEPIINFYDPLVFPSDEFDASISQVNEKINQSLAFIRKSDELLYNVNAGKSTTNIMITTIIIVIIVILLALIAVGLLLYCKARSTPVTLSKDQLSGINNIAFSN

SEQ ID NO: 8848 - protein, 574 aa, Artificial Sequence
  derived and/or modified protein sequence (wt) from HRSV__AHX57020.1__F0
MELPILKTNAITTILAAVTLCFASSQNITEEFYQSTCSAVSKGYLSALRTGWYTSVITIELSNIKENKCNGTDAKVKLIKQELDKYKNAVTELQLLMQSTPAANSRARRELPRFMNYTLNNTKNTNVTLSKKRKRRFLGFLLGVGSAIASGIAVSKVLHLEGEVNKIKSALLSTNKAVVSLSNGVSVLTSKVLDLKNYIDKQLLPIVNKQSCSISNIETVIEFQQKNNRLLEITREFSVNAGVTTPVSTYMLTNSELLSLINDMPITNDQKKLMSSNVQIVRQQSYSIMSIIKEEVLAYVVQLPLYGVIDTPCWKLHTSPLCTTNTKEGSNICLTRTDRGWYCDNAGSVSFFPQAETCKVQSNRVFCDTMNSLTLPSEVNLCNIDIFNPKYDCKIMTSKTDVSSSVITSLGAIVSCYGKTKCTASNKNRGIIKTFSNGCDYVSNKGVDTVSVGNTLYYVNKQEGKSLYVKGEPIINFYDPLVFPSDEFDASISQVNEKINQSLAFIRKSDELLHNVNAGKSTTNIMITTIIIVIIVILLALIAVGLLLYCKARSTPVILSKDQLSGINNIAFSN

SEQ ID NO: 8849 - protein, 574 aa, Artificial Sequence
  derived and/or modified protein sequence (wt) from HRSV__AHX57009.1__F0
MELPILKTNAITTILAAVTLCFASSQNITEEFYQSTCSAVSKGYLSALRTGWYTSVITIELSNIKENKCNGTDAKVKLIKQELDKYKNAVTELQLLMQSTPAANSRARRELPRFMNYTLNNTKNTNVILSKKRKRRFLGFLLGVGSAIASGIAVSKVLHLEGEVNKIKSALLSTNKAVVSLSNGVSVLTSKVLDLKNYIDKQLLPIVNKQSCSISNIETVIEFQQKNNRLLEITREFSVNAGVTTPVSTYMLTNSELLSLINDMPITNDQKKLMSSNVQIVRQQSYSIMSIIKEEVLAYVVQLPLYGVIDTPCWKLHTSPLCTTNTKEGSNICLTRTDRGWYCDNAGSVSFFPQAETCKVQSNRVFCDTMNSLTLPSEVNLCNIDIFNPKYDCKIMTSKTDVSSSVITSLGAIVSCYGKTKCTASNKNRGIIKTFSNGCDYVSNKGVDTVSVGNTLYYVNKQEGKSLYVKGEPIINFYDPLVFPSDEFDASISQVNEKINQSLAFIRKSDELLHNVNAGKSTTNIMITTIIIVIIVILLALIAVGLLLYCKARSTPVTLSKDQLSGINNIAFSN

SEQ ID NO: 8850 - protein, 574 aa, Artificial Sequence
  derived and/or modified protein sequence (wt) from HRSV__AHX56987.1__F0
MELLIHRSSAIFLTLAINALYLTSSQNITEEFYQSTCSAVSRGYFSALRTGWYTSVITIELSNIKETKCNGTDTKVKLIKQELDKYKNAVTELQLLMQNTPAANNRARREAPQYMNYTINTIKNLNVSISKKRKRRFLGFLLGVGSAIASGIAVSKVLHLEGEVNKIKNALLSTNKAVVSLSNGVSVLTSKVLDLKNYINNQLLPIVNQQSCRISNIETVIEFQQKNSRLLEITREFSVNAGVTTPLSTYMLTNSELLSLINDMPITNDQKKLMSSNVQIVRQQSYSIMSIIKEEVLAYVVQLPIYGVIDTPCWKLHTSPLCTTNIKEGSNICLTRTDRGWYCDNAGSVSFFPQADTCKVQSNRVFCDTMNSLTLPSEVSLCNTDIFNSKYDCKIMTSKTDISSSVITSLGAIVSCYGKTKCTASNKNRGIIKTFSNGCDYVSNKGVDTVSVGNTLYYVNKLEGKNLYVKGEPIINYYDPLVFPSDEFDASISQVNEKINQSLAFIRRSDELLHNINTGKSTTNIMITVIIIVIIVVLLSLIAIGLLLYCKAKNTPVTLSKDQLSGINNIAFSK

SEQ ID NO: 8851 - protein, 574 aa, Artificial Sequence
  derived and/or modified protein sequence (wt) from HRSV__AHV82100.1__F0
MELPILKTNAITTILAAVTLCFASSQNITEEFYQSTCSAVSKGYLSALRTGWYTSVITIELSNIKENKCNGTDAKVKLIKQELDKYKNAVTELQLLMQSTPAANSRARRELPRFMNYTLNNTKNTNVTLSKKRKRRFLGFLLGVGSAIASGIAVSKVLHLEGEVNKIKSALLSTNKAVVSLSNGVSVLTSKVLDLKNYIDKQLLPIVNKQSCSISNIETVIEFQQKNNRLLEITREFSVNAGVTTPVSTYMLTNSELLSLINDMPITNDQKKLMSNNVQIVRQQSYSIMSIIKEEVLAYVVQLPLYGVIDTPCWKLHTSPLCTTNTKEGSNICLTRTDRGWYCDNAGSVSFFPQAETCKVQSNRVFCDTMNSLTLPSEVNLCNIDIFNPKYDCKIMTSKTDVSSSVITSLGAIVSCYGKTKCTASNKNRGIIKTFSNGCDYVSNKGVDTVSVGNTLYYVNKQEGKSLYVKGEPIINFYDPLVFPSDEFDASISQVNEKINQSLAFIRKSDELLHNVNAGKSTTNIMITTIIIVIIVILLALIAVGLLLYCKARSTPVTLSKDQLSGINNIAFSN

SEQ ID NO: 8852 - protein, 574 aa, Artificial Sequence
  derived and/or modified protein sequence (wt) from HRSV__AHV82001.1__F0
MELLIHRSSAIFLTLAINALYLTSSQNITEEFYQSTCSAVSRGYLSALRTGWYTSVITIELSNIKETKCNGTDTKVKLIKQELDKYKNAVTELQLLMQNTPAVNNRARREAPQYMNYTINTTKNLNVSISKKRKRRFLGFLLGVGSAIASGIAVSKVLHLEGEVNKIKNALLSTNKAVVSLSNGVSVLTSKVLDLKNYINNQLLPIVNQQSCRISNIETVIEFQQKNSRLLEITREFSVNAGVTTPLSTYMLTNSELLSLINDMPITNDQKKLMSSNVQIVRQQSYSIMSIIKEEVLAYVVQLPIYGVIDTPCWKLHTSPLCTTNTKEGSNICLTRTDRGWYCDNAGSVSFFPQADTCKVQSNRVFCDTMNSLTLPSEVSLCNTDIFNSKYDCKIMTSKTDISSSVITSLGAIVSCYGKTKCTASNKNRGIIKTFSNGCDYVSNKGVDTVSVGNTLYYVNKLEGKNLYVKGEPIINYYDPLVFPSDEFDASISQVNEKINQSLAFIRRSDELLHNVNTGKSTTNIMITAIIIVIIVVLLSLIAIGLLLYCKAKNTPVTLSKDQLSGINNIAFSK

SEQ ID NO: 8853 - protein, 574 aa, Artificial Sequence
  derived and/or modified protein sequence (wt) from HRSV__AHV81891.1__F0
MELPILKTNAITTILAAVTLCFTSSQNITEEFYQSTCSAVSKGYLSALRTGWYTSVITIELSNIKENKCNGTDAKVKLIKQELDKYKNAVTELQLLMQSTPAANNRARRELPRFMNYTLNNTKTTNVTLSKKRKRRFLGFLLGVGSAIASGIAVSKVLHLEGEVNKIKSALLSTNKAVVSLSNGVSVLTSKVLDLKNYIDKQLLPIVNKQSCSISNIETVIEFQQKNNRLLEITREFSVNAGVTTPVSTYMLTNSELLSLINDMPITNDQKKLMSNNVQIVRQQSYSIMSIIKEEVLAYVVQLPLYGVIDTPCWKLHTSPLCTTNTKEGSNICLTRTDRGWYCDNAGSVSFFPQAETCKVQSNRVFCDTMNSLTLPSEVNLCNIDIFNPKYDCKIMTSKTDVSSSVITSLGAIVSCYGKTKCTASNKNRGIIKTFSNGCDYVSNKGVDTVSVGNTLYYVNKQEGKSLYVKGEPIINFYDPLVFPSDEFDASISQVNEKINQSLAFIRKSDELLHNVNAGKSTTNIMITTIIIVIIVILLSLIAVGLLLYCKARSTPVTLSKDQLSGINNIAFSS

SEQ ID NO: 8854 - protein, 574 aa, Artificial Sequence
  derived and/or modified protein sequence (wt) from HRSV__AHV81880.1__F0
MDLPILKTNAITTILAAVTLCFTSSQNITEEFYQSTCSAVSKGYLSALRTGWYTSVITIELSNIKENKCNGTDAKVKLIKQELDKYKNAVTELQLLMQSTPASNNRARRELPRFMNHTLNNTKNTNVTLSKKRKRRFLGFLLGVGSAIASGIAVSKVLHLEGEVNKIKSALLSTNKAVVSLSNGVSVLTSKVLDLKNYIDKQLLPIVNKQSCSISNIETVIEFQQKNNRLLEITREFSVNAGVTTPVSTYMLTNSELLSLINDMPITNDQKKLMSNNVQIVRQQSYSIMSIIKEEVLAYVVQLPLYGVIDTPCWKLHTSPLCTTNTKEGSNICLTRTDRGWYCDNAGSVSFFPQAETCKVQSNRVFCDTMNSLTLPSEVNLCNIDIFNPKYDCKIMTSKTDVSSSVITSLGAIVSCYGKTKCTASNKNRGIIKTFSNGCDYVSNKGVDTVSVGNTLYYVNKQEGKSLYVKGEPIINFYDPLVFPSDEFDASISQVNEKINQSLAFIRKSDELLHNVNAGKSTTNIMITTIIIVIVVILLSLIAVGLLLYCKARSTPVTLSKDQLSGINNIAFSS

SEQ ID NO: 8855 - protein, 574 aa, Artificial Sequence
  derived and/or modified protein sequence (wt) from HRSV__AHV81836.1__F0
MELLIHRSSAIFLTLAINALYLTSSQNITEEFYQSTCSAVSRGYLSALRTGWYTSVITIELSNIKETKCNGTDTKVKLIKQELDKYKNAVTELQLLMQNTPAVNNRARREAPQYMNCTINTTKNLNVSISKKRKRRFLGFLLGVGSAIASGIAVSKVLHLEGEVNKIKNALLSTNKAVVSLSNGVSVLTSKVLDLKNYINNQLLPIVNQQSCRISNIETVIEFQQKNSRLLEITREFSVNAGVTTPLSTYMLTNSELLSLINDMPITNDQKKLMSSNVQIVRQQSYSIMSIIKEEVLAYVVQLPIYGVIDTPCWKLHTSPLCTTNIKEGSNICLTRTDRGWYCDNAGSVSFFPQADTCKVQSNRVFCDTMNSLTLPSEVSLCNTDIFNSKYDCKIMTSKTDISSSVITSLGAIVSCYGKTKCTASNKNRGIIKTFSNGCDYVSNKGVDTVSVGNTLYYVNKLEGKNLYVKGEPIINYYDPLVFPSDEFDASISQVNEKINQSLAFIRRSDELLHNVNTGKSTTNIMITAIIIVIIVVLLSLIAIGLLLYCKAKNTPVTLSKDQLSGINNIAFSK

SEQ ID NO: 8856 - protein, 574 aa, Artificial Sequence
  derived and/or modified protein sequence (wt) from HRSV__AHV81682.1__F0
MELPVLKTNAITTILAAVTLCFASSQNITEEFYQSTCSAVSKGYLSALRTGWYTSVITIELSNIKENKCNGTDAKVKLIKQELDKYKNAVTELQLLMQSTPAANSRARRELPRFMNYTLNNTKNTNVTLSKKRKRRFLGFLLGVGSAIASGIAVSKVLHLEGEVNKIKSALLSTNKAVVSLSNGVSVLTSKVLDLKNYIDKQLLPIVNKQSCSISNIETVIEFQQKNNRLLEITREFSVNAGVTTPVSTYMLTNSELLSLINDMPITNDQKKLMSSNVQIVRQQSYSIMSIIKEEVLAYVVQLPLYGVIDTPCWKLHTSPLCTTNTKEGSNICLTRTDRGWYCDNAGSVSFFPQAETCKVQSNRVFCDTMNSLTLPSEVNLCNIDIFNPKYDCKIMTSKTDVSSSVITSLGAIVSCYGKTKCTASNKNRGIIKTFSNGCDYVSNKGVDTVSVGNTLYYVNKQEGKSLYVKGEPIINFYDPLVFPSDEFDASISQVNEKINQSLAFIRKSDELLHNVNAGKSTTNIMITTIIIVIIVILLALIAVGLLLYCKARSTPVTLSKDQLSGINNIAFSN

SEQ ID NO: 8857 - protein, 574 aa, Artificial Sequence
  derived and/or modified protein sequence (wt) from HRSV__AHV81649.1__F0
MELPIHRSSAIFLTLAINALYLTSSQNITEEFYQSTCSAVSRGYLSALRTGWYTSVITIELSNIKETKCNGTDTKVKLIKQELDKYKNAVTELQLLMQNTPAVNNRARREAPQYMNYTINTTKNLNVSISKKRKRRFLGFLLGVGSAIASGIAVSKVLHLEGEVNKIKNALLSTNKAVVSLSNGVSVLTSKVLDLKNYINNQLLPIVNQQSCRISNIETVIEFQQKNSRLLEITREFSVNAGVTTPLSTYMLTNSELLSLINDMPITNDQKKLMSSNVQIVRQQSYSIMSIIKEEVLAYVVQLPIYGVIDTPCWKLHTSPLCTTNIKEGSNICLTRTDRGWYCDNAGSVSFFPQADTCKVQSNRVFCDTMNSLTLPSEVSLCNTDIFNSKYDCKIMTSKTDISSSVITSLGAIVSCYGKTKCTASNKNRGIIKTFSNGCDYVSNKGVDTVSVGNTLYYVNKLEGKNLYVKGEPIINYYDPLVFPSDEFDASISQVNEKINQSLAFIRRSDELLHNVNTGKSTTNIMITAIIIVIIVVLLSLIAIGLLLYCKAKNTPVTLSKDQLSGINNIAFSK

SEQ ID NO: 8858 - protein, 574 aa, Artificial Sequence
  derived and/or modified protein sequence (wt) from HRSV__AHV81484.1__F0
MELPILKTNAITTILAAVTLCFASSQNITEEFYQSTCSAVSKGYLSALRTGWYTSVITIELSNIKENKCNGTDTKVKLIKQELDKYKNAVTELQLLMQSTPAANNRARRELPRFMNYTLNNTKTTNVTLSKKRKRRFLGFLLGVGSAIASGIAVSKVLHLEGEVNKIKSALLSTNKAVVSLSNGVSVLTSKVLDLKNYIDKQLLPIVNKQSCSISNIETVIEFQQKNNRLLEITREFSVNAGVTTPVSTYMLTNSELLSLINDMPITNDQKKLMSNNVQIVRQQSYSIMSIIKEEVLAYVVQLPLYGVIDTPCWKLHTSPLCTTNTKEGSNICLTRTDRGWYCDNAGSVSFFPQAETCKVQSNRVFCDTMNSLTLPSEVNLCNVDIFNPKYDCKIMTSKTDVSSSVITSLGAIVSCYGKTKCTASNKNRGIIKTFSNGCDYVSNKGVDTVSVGNTLYYVNKQEGKSLYVKGEPIINFYDPLVFPSDEFDASISQVNEKINQSLAFIRKSDELLHNVNAGKSTTNIMITTIIIVIIVILLSLIAVGLLLYCKARSTPVTLSKDQLSGINNIAFSS

SEQ ID NO: 8859 - protein, 574 aa, Artificial Sequence
  derived and/or modified protein sequence (wt) from HRSV__AHV81462.1__F0
MELPILKTNAITTILAAVTLCFASSQNITEEFYQSTCSAVSKGYLSALRTGWYTSVITIELSNIKENKCNGTDAKVKLIKQELDRYKNAVTELQLLMQSTPAANSRARRELPRFMNYTLNNTKNTNVTLSKKRKRRFLGFLLGVGSAIASGIAVSKVLHLEGEVNKIKSALLSTNKAVVSLSNGVSVLTSKVLDLKNYIDKQLLPIVNKQSCSISNIETVIEFQQKNNRLLEITREFSVNAGVTTPVSTYMLTNSELLSLINDMPITNDQKKLMSSNVQIVRQQSYSIMSIIKEEVLAYVVQLPLYGVIDTPCWKLHTSPLCTTNTKEGSNICLTRTDRGWYCDNAGSVSFFPQAETCKVQSNRVFCDTMNSLTLPSEVNLCNIDIFNPKYDCKIMTSKTDVSSSVITSLGAIVSCYGKTKCTASNKNRGIIKTFSNGCDYVSNKGVDTVSVGNTLYYVNKQEGKSLYVKGEPIINFYDPLVFPSDEFDASISQVNEKINQSLAFIRKSDELLHNVNAGKSTTNIMITTIIIVIIVILLALIAVGLLLYCKARSTPVTLSKDQLSGINNIAFSN

SEQ ID NO: 8860 - protein, 574 aa, Artificial Sequence
  derived and/or modified protein sequence (wt) from HRSV__AHV81385.1__F0
MDLPILKTNAITTILAAVTLCFASSQNITEEFYQSTCSAVSKGYLSALRTGWYTSVITIELSNIKENKCNGTDAKVKLIKQELDKYKNAVTELQLLMQSTPASNNRARRELPRFMNHTLNNTKNTNVTLSKKRKRRFLGFLLGVGSAIASGIAVSKVLHLEGEVNKIKSALLSTNKAVVSLSNGVSVLTSKVLDLKNYIDKQLLPIVNKQSCSISNIETVIEFQQKNNRLLEITREFSVNAGVTTPVSTYMLTNSELLSLINDMPITNDQKKLMSNNVQIVRQQSYSIMSIIKEEVLAYVVQLPLYGVIDTPCWKLHTSPLCTTNTKEGSNICLTRTDRGWYCDNAGSVSFFPQAETCKVQSNRVFCDTMNSLTLPSEVNLCNIDIFNPKYDCKIMTSKTDVSSSVITSLGAIVSCYGKTKCTASNKNRGIIKTFSNGCDYVSNKGVDTVSVGNTLYYVNKQEGKSLYVKGEPIINFYDPLVFPSDEFDASISQVNEKINQSLAFIRKSDELLHNVNAGKSTTNIMITTIIIVIVVILLSLIAVGLLLYCKARSTPVTLSKDQLSGINNIAFSS

SEQ ID NO: 8861 - protein, 574 aa, Artificial Sequence
  derived and/or modified protein sequence (wt) from HRSV__AHV81363.1__F0
MELPILKTNAITTVLAAVTLCFASSQNITEEFYQSTCSAVSKGYLSALRTGWYTSVITIELSNIKENKCNGTDAKVKLIKQELDKYKNAVTELQLLMQSTPAANSRARRELPRFMNYTLNNTKNTNVTLSKKRKRRFLGFLLGVGSAIASGIAVSKVLHLEGEVNKIKSALLSTNKAVVSLSNGVSVLTSKVLDLKNYIDKQLLPIVNKQSCSISNIETVIEFQQKNNRLLEITREFSVNAGVTTPVSTYMLTNSELLSLINDMPITNDQKKLMSSNVQIVRQQSYSIMSIIKEEVLAYVVQLPLYGVIDTPCWKLHTSPLCTTNTKEGSNICLTRTDRGWYCDNAGSVSFFPQAETCKVQSNRVFCDTMNSLTLPSEVNLCNIDIFNPKYDCKIMTSKTDVSSSVITSLGAIVSCYGKTKCTASNKNRGIIKTFSNGCDYVSNKGVDTVSVGNTLYYVNKQEGKSLYVKGEPIINFYDPLVFPSDEFDASISQVNEKINQSLAFIRKSDELLHNVNAGKSTTNIMITTIIIVIIVILLALIAVGLLLYCKARSTPVTLSKDQLSGINNIAFSN

SEQ ID NO: 8862 - protein, 574 aa, Artificial Sequence
  derived and/or modified protein sequence (wt) from HRSV__AHV81330.1__F0
MELPILKTNAITTILAAVTLCFASSQNITEEFYQSTCSAVSKGFLSALRTGWYTSVITIELSNIKENKCNGTDAKVKLIKQELDKYKNAVTELQLLMQSTPAANSRARRELPRFMNYTLNNTKNTNVTLSKKRKRRFLGFLLGVGSAIASGIAVSKVLHLEGEVNKIKSALLSTNKAVVSLSNGVSVLTSKVLDLKNYIDKQLLPIVNKQSCSISNIETVIEFQQKNNRLLEITREFSVNAGVTTPVSTYMLTNSELLSLINDMPITNDQKKLMSSNVQIVRQQSYSIMSIIKEEVLAYVVQLPLYGVIDTPCWKLHTSPLCTTNTKEGSNICLTRTDRGWYCDNAGSVSFFPQAETCKVQSNRVFCDTMNSLTLPSEVNLCNIDIFNPKYDCKIMTSKTDVSSSVITSLGAIVSCYGKTKCTASNKNRGIIKTFSNGCDYVSNKGVDTVSVGNTLYYVNKQEGKSLYVKGEPIINFYDPLVFPSDEFDASISQVNEKINQSLAFIRKSDELLHNVNAGKSTTNIMITTIIIVIIVILLALIAVGLLLYCKARSTPVTLSKDQLSGINNIAFSN

SEQ ID NO: 8863 - protein, 574 aa, Artificial Sequence
  derived and/or modified protein sequence (wt) from HRSV__AHV81253.1__F0
MELPILKTNAITTILAAVTLCFASSQNITEEFYQSTCSAVSKGYLSALRTGWYTSVITIELSNIKENKCNGTDAKVKLIKQELDKYKNAVTELQLLMQSTPAANSRARRELPRFMNYTLNNTNNTNVTLSKKRKRRFLGFLLGVGSAIASGIAVSKVLHLEGEVNKIKSALLSTNKAVVSLSNGVSVLTSKVLDLKNYIDKQLLPIVNKQSCSISNIETVIEFQQKNNRLLEITREFSVNAGVTTPVSTYMLTNSELLSLINDMPITNDQKKLMSNNVQIVRQQSYSIMSIIKEEVLAYVVQLPLYGVIDTPCWKLHTSPLCTTNTKEGSNICLTRTDRGWYCDNAGSVSFFPQADTCKVQSNRVFCDTMNSLTLPSEVNLCNIDIFNPKYDCKIMTSKTDVSSSVITSLGAIVSCYGKTKCTASNKNRGIIKTFSNGCDYVSNKGVDTVSVGNTLYYVNKQEGKSLYVKGEPIINFYDPLVFPSDEFDASISQVNEKINQSLAFIRKSDELLHNVNAGKSTTNIMITTIIIVIIVILLSLIAVGLLLYCKARSTPVTLSKDQLSGINNIAFSN

SEQ ID NO: 8864 - protein, 574 aa, Artificial Sequence
  derived and/or modified protein sequence (wt) from HRSV__AHV81154.1__F0
MELPILKTNAITTILAAVTLCFASSQNITEEFYQSTCSAVSKGYLSALRTGWYTSVITIELSNIKENKCNGTDTKVKLIKQELDKYKNAVTELQLLMQSTPAANNRARRELPRFMNYTLNNTKTTNVTLSKKRKRRFLGFLLGVGSAIASGIAVSKVLHLEGEVNKIKSALLSTNKAVVSLSNGVSVLTSKVLDLKNYIDKQLLPIVNKQSCSISNIETVIEFQQKNNRLLEITREFSVNAGVTTPVSTYMLTNSELLSLINDMPITNDQKKLMSNNVQIVRQQSYSIMSIIKEEVLAYVVQLPLYGVIDTPCWKLHTSPLCTTNTKEGSNICLTRTDRGWYCDNAGSVSFFPQAETCKVQSNRVFCDTMNSLTLPSEVNLCNIDIFNPKYDCKIMTSKTDVSSSVITSLGAIVSCYGKTKCTASNKNRGIIKTFSNGCDYVSNKGVDTVSVGNTLYYVNKQEGKSLYVKGEPIINFYDPLVFPSDEFDASISQVNEKINQSLAFIRKSDELLHNVNAGKSTTNIMITTIIIVIIVILLSLIAVGLLLYCKARSTPVTLSKDQLSGINNIAFSS

SEQ ID NO: 8865 - protein, 574 aa, Artificial Sequence
  derived and/or modified protein sequence (wt) from HRSV__AHV81122.1__F0
MELPILKTNAITTILAAVTLCFASSQNITEEFYQSTCSAVSKGYLSALRTGWYTSVITIELSNIKENKCNGTDAKVKLIKQELDKYKNAVTELQLLMQSTPAANSRARRELPRFMNYTLNNTNNTNVTLSKKRKRRFLGFLLGVGSAIASGIAVSKVLHLEGEVKKIKSALLSTNKAVVSLSNGVSVLTSKVLDLKNYIDKQLLPIVNKQSCSISNIETVIEFQQKNNRLLEITREFSVNAGVTTPVSTYMLTNSELLSLINDMPITNDQKKLMSNNVQIVRQQSYSIMSIIKEEVLAYVVQLPLYGVIDTPCWKLHTSPLCTTNTKEGSNICLTRTDRGWYCDNAGSVSFFPQADTCKVQSNRVFCDTMNSLTLPSEVNLCNIDIFNPKYDCKIMTSKTDVSSSVITSLGAIVSCYGKTKCTASNKNRGIIKTFSNGCDYVSNKGVDTVSVGNTLYYVNKQEGKSLYVKGEPIINFYDPLVFPSDEFDASISQVNEKINQSLAFIRKSDELLHNVNAGKSTTNIMITTIIIVIIVILLSLIAVGLLLYCKARSTPVTLSKDQLSGINNIAFSN

SEQ ID NO: 8866 - protein, 574 aa, Artificial Sequence
  derived and/or modified protein sequence (wt) from HRSV__AHV81089.1__F0
MGLLIHGSSAVFLTLAINALYLTSSQNITEEFYQSTCSAVSRGYLSALRTGWYTSVITIELSNIKETKCNGTDTKVKLIKQELDKYKNAVTELQLLMQNTPAVNNRARREAPQYMNYTINTTKNLNVSISKKRKRRFLGFLLGVGSAIASGIAVSKVLHLEGEVNKIKNALLSTNKAVVSLSNGVSVLTSKVLDLKNYINNQLLPIVNQQSCRISNIETVIEFQQKNSRLLEITREFSVNAGVTTPLSTYMLTNSELLSLINDMPITNDQKKLMSSNVQIVRQQSYSIMSIIKEEVLAYVVQLPIYGVIDTPCWKLHTSPLCTTNIKEGSNICLTRTDRGWYCDNAGSVSFFPQADTCKVQSNRVFCDTMNSLTLPSEVSLCNTDIFNSKYDCKIMTSKTDISSSVITSLGAIVSCYGKTKCTASNKNRGIIKTFSNGCDYVSNKGVDTVSVGNTLYYVNKLEGKNLYVKGEPIINYYDPLVFPSDEFDASISQVNEKINQSLAFIRRSDELLHNVNTGKSTTNIMITAIIIVIIVVLLSLIAIGLLLYCKAKNTPVTLSKDQLSGINNIAFSK

SEQ ID NO: 8867 - protein, 574 aa, Artificial Sequence
  derived and/or modified protein sequence (wt) from HRSV__AHV81012.1__F0
MELPILKTNAITTILAAVTLCFASSQNITEEFYQSTCSAVSKGYLSALRTGWYTSVITIELSNIKENKCNGTDAKVKLIKQELDKYKNAVTELQLLMQSTPAANSRARRELPRFMNNTLNNTKNTNVTLSKKRKRRFLGFLLGVGSAIASGIAVSKVLHLEGEVNKIKSALLSTNKAVVSLSNGVSVLTSKVLDLKNYIDKQLLPIVNKQSCSISNIETVIEFQQKNNRLLEITREFSVNAGVTTPVSTYMLTNSELLSLINDMPITNDQKKLMSSNVQIVRQQSYSIMSIIKEEVLAYVVQLPLYGVIDTPCWKLHTSPLCTTNTKEGSNICLTRTDRGWYCDNAGSVSFFPQAETCKVQSNRVFCDTMNSLTLPSEVNLCNIDIFNPKYDCKIMTSKTDVSSSVITSLGAIVSCYGKTKCTASNKNRGIIKTFSNGCDYVSNKGVDTVSVGNTLYYVNKQEGKSLYVKGEPIINFYDPLVFPSDEFDASISQVNEKINQSLAFIRKSDELLHNVNAGKSTTNIMITTIIIVIIVILLALIAVGLLLYCKARSTPVTLSKDQLSGINNIAFSN

SEQ ID NO: 8868 - protein, 574 aa, Artificial Sequence
  derived and/or modified protein sequence (wt) from HRSV__AHV80957.1__F0
MELPILKTNAITTILAAVTLCFASSQNITEEFYQSTCSAVSKGYLSALRTGWYTSVITIELSNIKENKCNGTDAKVKLIKQELDKYKNAVTELQLLMQSTPAANSRARRELPRFMNHTLNNTKNTNVTLSKKRKRRFLGFLLGVGSAIASGIAVSKVLHLEGEVNKIKSALLSTNKAVVSLSNGVSVLTSKVLDLKNYIDKQLLPIVNKQSCSISNIETVIEFQQKNNRLLEITREFSVNAGVTTPVSTYMLTNSELLSLINDMPITNDQKKLMSNNVQIVRQQSYSIMSIIKEEVLAYVVQLPLYGVIDTPCWKLHTSPLCTTNTKEGSNICLTRTDRGWYCDNAGSVSFFPQADTCKVQSNRVFCDTMNSLTLPSEVNLCNTDIFNPKYDCKIMTSKTDVSSSVITSLGAIVSCYGKTKCTASNKNRGIIKTFSNGCDYVSNKGVDTVSVGNTLYYVNKQEGKSLYVKGEPIINFYDPLVFPSDEFDASISQVNEKINQSLAFIRKSDELLHNVNAGKSTTNIMITTIIIVIIVILLSLIAVGLLLYCKARSTPVTLSKDQLSGINNIAFSN

SEQ ID NO: 8869 - protein, 574 aa, Artificial Sequence
  derived and/or modified protein sequence (wt) from HRSV__AHV80880.1__F0
MELPILKTNAITTILAAVTLCFASSQNITEEFYQSTCSAVSKGYLSALRTGWYTSVITIELSNIKENKCNGTDAKVKLIKQELDKYKNAVTELQLLMQSTPAANSRARRELPRFMNYILNNTKNTNVTLSKKRKRRFLGFLLGVGSAIASGIAVSKVLHLEGEVNKIKSALLSTNKAVVSLSNGVSVLTSKVLDLKNYIDKQLLPIVNKQSCSISNIETVIEFQQKNNRLLEITREFSVNAGVTTPVSTYMLTNSELLSLINDMPITNDQKKLMSSNVQIVRQQSYSIMSIIKEEVLAYVVQLPLYGVIDTPCWKLHTSPLCTTNTKEGSNICLTRTDRGWYCDNAGSVSFFPQAETCKVQSNRVFCDTMNSLTLPSEVNLCNIDIFNPKYDCKIMTSKTDVSSSVITSLGAIVSCYGKTKCTASNKNRGIIKTFSNGCDYVSNKGVDTVSVGNTLYYVNKQEGKSLYVKGEPIINFYDPLVFPSDEFDASISQVNEKINQSLAFIRKSDELLHNVNAGKSTTNIMITTIIIVIIVILLALIAVGLLLYCKARSTPVTLSKDQLSGINNIAFSN

SEQ ID NO: 8870 - protein, 574 aa, Artificial Sequence
  derived and/or modified protein sequence (wt) from HRSV__AHV80869.1__F0
MELPILKTNAITTILAAVTLCLASSQNITEEFYQSTCSAVSKGYLSALRTGWYTSVITIELSNIKENKCNGTDAKVKLIKQELDKYKNAVTELQLLMQSTPAANSRARRELPRFRNYTLNNTKNTNVTLSKKRKRRFLGFLLGVGSAIASGIAVSKVLHLEGEVNKIKSALLSTNKAVVSLSNGVSVLTSKVLDLKNYIDKQLLPIVNKQSCSISNIETVIEFQQKNNRLLEITREFSVNAGVTTPVSTYMLTNSELLSLINDMPITNDQKKLMSNNVQIVRQQSYSIMSIIKEEVLAYVVQLPLYGVIDTPCWKLHTSPLCTTNTKEGSNICLTRTDRGWYCDNAGSVSFFPQAETCKVQSNRVFCDTMNSLTLPSEVNLCNIDIFNPKYDCKIMTSKTDVSSSVITSLGAIVSCYGKTKCTASNKNRGIIKTFSNGCDYVSNKGVDTVSVGNTLYYVNKQEGKSLYVKGEPIINFYDPLVFPSDEFDASISQVNEKINQSLAFIRKSDELLHNVNAGKSTTNIMITTIIIVIIVILLSLIAVGLLLYCKARSTPVTLSKDQLSGINNIAFSN

SEQ ID NO: 8871 - protein, 574 aa, Artificial Sequence
  derived and/or modified protein sequence (wt) from HRSV__AHV80836.1__F0
MELLIHRSSAIFLTLAINALYLTSSQNITEEFYQSTCSAVSRGYLSALRTGWYTSVITIELSNIKETKCNGTDTKVKLIKQELDKYKNAVTELQLLMQNTPAVNNRARREAPQYMNYTINTTKNLNVSISKKRKRRFLGFLLGVGSAIASGIAVSKVLHLEGEVNKIKNALLSTNKAVVSLSNGVSVLTSKVLDLKNYINNQLLPIVNQQSCRISNIETVIEFQQKNSRLLEITREFSVNAGVTTPLSTYMLTNSELLSLINDMPITNDQKKLMSSNVQIVRQQSYSIMSIIKEEVLAYVVQLPIYGVIDTPCWKLHTSPLCATNIKEGSNICLTRTDRGWYCDNAGSVSFFPQADTCKVQSNRVFCDTMNSLTLPSEVSLCNTDIFNSKYDCKIMTSKTDISSSVITSLGAIVSCYGKTKCTASNKNRGIIKTFSNGCDYVSNKGVDTVSVGNTLYYVNKLEGKNLYVKGEPIINYYDPLVFPSDEFDASISQVNEKINQSLAFIRRSDELLHNVNTGKSTTNIMITAIIIVIIVVLLSLIAIGLLLYCKAKNTPVTLSKDQLSGINNIAFSK

SEQ ID NO: 8872 - protein, 574 aa, Artificial Sequence
  derived and/or modified protein sequence (wt) from HRSV__AHV80803.1__F0
MELLIHRSSAIFLTLAINALYLTSSQNITEEFYQSTCSAVSRGYLSALRTGWYTSVITIELSNIKETKCNGTDTKVKLIKQELDKYKNAVTELQLLMQNTPAVNNRARREAPQYMNYTINTTKNLNVSISKKRKRRFLGFLLGVGSAIASGIAVSKVLHLEGEVNKIKDALLSTNKAVVSLSNGVSVLTSKVLDLKNYINNQLLPIVNQQSCRISNIETVIEFQQKNSRLLEITREFSVNAGVTTPLSTYMLTNSELLSLINDMPITNDQKKLMSSNVQIVRQQSYSIMSIIKEEVLAYVVQLPIYGVIDTPCWKLHTSPLCTTNIKEGSNICLTRTDRGWYCDNAGSVSFFPQADTCKVQSNRVFCDTMNSLTLPSEVSLCNTDIFNSKYDCKIMTSKTDISSSVITSLGAIVSCYGKTKCTASNKNRGIIKTFSNGCDYVSNKGVDTVSVGNTLYYVNKLEGKNLYVKGEPIINYYDPLVFPSDEFDASISQVNEKINQSLAFIRRSDELLHNVNTGKSTTNIMITAIIIVIIVVLLSLIAIGLLLYCKAKNTPVTLSKDQLSGINNIAFSK

SEQ ID NO: 8873 - protein, 574 aa, Artificial Sequence
  derived and/or modified protein sequence (wt) from HRSV__AGG39559.1__F0
MELLIHRSSAIFLTLAINALYLTSSQNITEEFYQSTCSAVSRGYFSALRTGWYTSVITIELSNIKETKCNGTDTKVKLIKQELDKYKNAVTELQQLMQNTPAANNRARREAPQYMNYTINTTKNLNVSISKKRKRRFLGFLLGVGSAIASGIAVSKVLHLEGEVNKIKNALLSTNKAVVSLSNGVSVLTSKVLDLKNYINNQLLPIVNQQSCRISNIETVIEFQQKNSRLLEITREFSVNAGVTTPLSTYMLTNSELLSLINDMPITNDQKKLMSSNVQIVRQQSYSIMSIIKEEVLAYVVQLPIYGVIDTPCWKLHTSPLCTTNIKEGSNICLTRTDRGWYCDNAGSVSFFPQADTCKVQSNRVFCDTMNSLTLPSEVSLCNTDIFNSKYDCKIMTSKTDISSSVITSLGAIVSCYGKTKCTASNKNRGIIKTFSNGCDYVSNKGVDTVSVGNTLYYVNKLEGKNLYVKGEPIINYYDPLVFPSDEFDASISQVNEKINQSLAFIRRSDELLHNVNTGKSTTNIMITAIIIVIIVVLLSLIAIGLLLYCKAKNTPVTLSKDQLSGINNIAFSK

SEQ ID NO: 8874 - protein, 574 aa, Artificial Sequence
  derived and/or modified protein sequence (wt) from HRSV__AGG39562.1__F0
MELLIHRSSAIFLTLAINALYLTSSQNITEEFYQSTCSAVSRGYFSALRTGWYTSVITIELSNIKETKCNGTDTKVKLIKQELDKYKNAVTELQLLMQNTPSANNRARREAPQYMNYTINTTKNLNVSISKKRKRRFLGFLLGVGSAIASGIAVSKVLHLEGEVNKIKNALLSTNKAVVSLSNGVSVLTSKVLDLKNYINNQLLPIVNQQSCRISNIETVIEFQQKNSRLLEITREFSVNAGVTTPLSTYMLTNSELLSLINDMPITNDQKKLMSSNVQIVRQQSYSIMSIIKEEVLAYVVQLPIYGVIDTPCWKLHTSPLCTTNIKEGSNICLTRTDRGWYCDNAGSVSFFPQADTCKVQSNRVFCDTMNSLTLPSEVSLCNTDIFNSKYDCKIMTSKTDISSSVITSLGAIVSCYGKTKCTASNKNRGIIKTFSNGCDYVSNKGVDTVSVGNTLYYVNKLEGKNLYVKGEPIINYYDPLVFPSDEFDASISQVNEKINQSLAFIRRSDELLHNVNAGKSTTNIMITAIIIVIIVVLLSLIAIGLLLYCKAKNTPVTLSKDQLSGINNIAFSK

SEQ ID NO: 8875 - protein, 574 aa, Artificial Sequence
  derived and/or modified protein sequence (wt) from HRSV__AGG39556.1__F0
MELLIHRSSAIFLTLAINALYLTSSQNITEEFYQSTCSAVSRGYFSALRTGWYTSVITIELSNIKETKCNGTDTKVKLIKQELDKYKNAVTELQLLMQNTPAANNRARREAPQYMNYTINTTKNLNVSISKKRKRRFLGFLLGVGSAIASGIAVSKVLHLEGEVNKIKNALLSTNKAVVSLSNGVSVLTSKVLDLKNYINNQLLPIVNQQSCRISNIETVIEFQQKNSRLLEITREFSVNAGVTTPLSTYMLTNSELLSLINDMPITNDQKKLMSSNVQIVRQQSYSIMSIMKEEVLAYVVQLPIYGVIDTPCWKLHTSPLCTTNIKEGSNICLTRTDRGWYCDNAGSVSFFPQADTCKVQSNRVFCDTMNSLTLPSEVSLCNTDIFNSKYDCKIMTSKTDISSSVITSLGAIVSCYGKTKCTASNKNRGIIKTFSNGCDYVSNKGVDTVSVGNTLYYVNKLEGKNLYVKGEPIINYYDPLVFPSDEFDASISQVNEKINQSLAFIRRSDELLHNVNTGKSTTNIMITAIIIVIIVVLLSLIAIGLLLYCKAKNTPVTLSKDQLSGINNIAFSK

SEQ ID NO: 8876 - protein, 574 aa, Artificial Sequence
  derived and/or modified protein sequence (wt) from HRSV__AGG39550.1__F0
MELLIHRSSAIFLTLAINALYLTSSQNITEEFYQSTCSAVSRGYFSALRTGWYTSVITIELSNIKETKCNGTDTKVKLIKQELDKYKNAVTELQLLMQNTPAANNRARREAPQYMNYTINTTKNLNVSISKKRKRRFLGFLLGVGSAIASGIAVSKVLHLEGEVNKIKNALLSTNKAVVSLSNGVSVLTSKVLDLKNYINNQLLPIVNQQSCRIFNIETVIEFQQKNSRLLEITREFSVNAGVTTPLSTYMLTNSELLSLINDMPITNDQKKLMSSNVQIVRQQSYSIMSIIKEEVLAYVVQLPIYGVIDTPCWKLHTSPLCTTNIKEGSNICLTRTDRGWYCDNAGSVSFFPQADTCKVQSNRVFCDTMNSLTLPSEVSLCNTDIFNSKYDCKIMTSKTDISSSVITSLGAIVSCYGKTKCTASNKNRGIIKTFSNGCDYVSNKGVDTVSVGNTLYYVNKLEGKNLYVKGEPIINYYDPLVFPSDEFDASISQVNEKINQSLAFIRRSDELLHNVNAGKSTTNIMITAIIIVIIVVLLSLIAIGLLLYCKAKNTPVTLSKDQLSGINNIAFSK

SEQ ID NO: 8877 - protein, 574 aa, Artificial Sequence
  derived and/or modified protein sequence (wt) from HRSV__AGG39547.1__F0
MELLIHRSSAIFLTLAINALYLTSSQNITEEFYQSTCSAVSRGYFSALRTGWYTSVITIELSNIKETKCNGTDTKVKLIKQELDKYKNAVTELQLLMQNTPAANNRARREAPQYMNYTINTTKNLNVSISKKRKRRFLGFLLGVGSAIASGIAVSKVLHLEGEVNKIKNALLSTNKAVVSLSNGVSVLTSKVLDLKNYINNQLLPILNQQSCRISNIETVIEFQQKNSRLLEITREFSVNAGVTTPLSTYMLTNSELLSLINDMPITNDQKKLMSSNVQIVRQQSYSIMSIIKEEVLAYVVQLPIYGVIDTPCWKLHTSPLCTTNIKEGSNICLTRTDRGWYCDNAGSVSFFPQADTCKVQSNRVFCDTMNSLTLPSEVSLCNTDIFNSKYDCKIMTSKTDISSSVITSLGAIVSCYGKTKCTASNKNRGIIKTFSNGCDYVSNKGVDTVSVGNTLYYVNKLEGKNLYVKGEPIINYYDPLVFPSDEFDASISQVNEKINQSLAFIRRSDELLHNVNAGKSTTNIMITAIIIVIIVVLLSLIAIGLLLYCKAKNTPVTLSKDQLSGINNIAFSK

SEQ ID NO: 8878 - protein, 574 aa, Artificial Sequence
  derived and/or modified protein sequence (wt) from HRSV__AGG39544.1__F0
MELLIHRSSAIFLTLAINALYLTSSQNITEEFYQSTCSAVSRGYFSALRTGWYTSVITIELSNIKETKCNGTDTKVKLIKQELDKYKNAVTELQLLMQNTPAANNRARREAPQYMNYTINTTKNLNVSISKKRKRRFLGFLLGVGSAIASGIAVSKVLHLEGEVNKIKNALLSTNKAVVSLSNGVSVLTSKVLDLKNYINNQILPIVNQQSCRISNIETVIEFQQKNSRLLEITREFSVNAGVTTPLSTYMLTNSELLSLINDMPITNDQKKLMSSNVQIVRQQSYSIMSIIKEEVLAYVVQLPIYGVIDTPCWKLHTSPLCTTNIKEGSNICLTRTDRGWYCDNAGSVSFFPQADTCKVQSNRVFCDTMNSLTLPSEVSLCNTDIFNSKYDCKIMTSKTDISSSVITSLGAIVSCYGKTKCTASNKNRGIIKTFSNGCDYVSNKGVDTVSVGNTLYYVNKLEGKNLYVKGEPIINYYDPLVFPSDEFDASISQVNEKINQSLAFIRRSDELLHNVNTGKSTTNIMITAIIIVIIVVLLSLIAIGLLLYCKAKNTPVTLSKDQLSGINNIAFSK

SEQ ID NO: 8879 - protein, 574 aa, Artificial Sequence
  derived and/or modified protein sequence (wt) from HRSV__AGG39541.1__F0
MELLIHRSSAIFLTLAINALYLTSSQNITEEFYQSTCSAVSRGYFSALRTGWYTSVITIELSNIKETKCNGTDTKVKLIKQELDKYKNAVTELQLLMQNTPAANNRARREAPQYMNYTINTTKNLNVSISKKRKRRFLGFLLGVGSAIASGIAVSKVLHLEGEVNKIKNALLSTNKAVVSLSNGVSVLTSKVLDLKNYINNQLLPIVNQQSCRIFNIETVIEFQQKNSRLLEITREFSVNAGVTTPLSTYMLTNSELLSLINDMPITNDQKKLMSSNVQIVRQQSYSIMSIIKEEVLAYVVQLPIYGVIDTPCWKLHTSPLCTTNIKEGSNICLTRTDRGWYCDNAGSVSFFPQADTCKVQSNRVFCDTMNSLTLPSEVSLCNTDIFNSKYDCKIMTSKTDISSSVITSLGAIVSCYGKTKCTASNKNRGIIKTFSNGCDYVSNKGVDTVSVGNTLYYVNKLEGKNLYVKGEPIINYYDPLVFPSDEFDASISQVNEKINQSLAFIRRSDELLHNVNTGKSTTNIMITAIIIVIIVVLLSLIAIGLLLYCKAKNTPVTLSKDQLSGINNIAFSK

SEQ ID NO: 8880 - protein, 574 aa, Artificial Sequence
  derived and/or modified protein sequence (wt) from HRSV__AGG39529.1__F0
MELLIHRSNAIFLTLAINALYLTSSQNITEEFYQSTCSAVSRGYFSALRTGWYTSVITIELSNIKETKCNGTDTKVKLIKQELDKYKNAVTELQLLMQNTPAANNRARREAPQYMNYTINTTKNLNVSISKKRKRRFLGFLLGVGSAIASGIAVSKVLHLEGEVNKIKNALLSTNKAVVSLSNGVSVLTSKVLDLKNYINNQLLPIVNQQSCRISNIETVIEFQQKNSRLLEITREFSVNAGVTTPLSTYMLTNSELLSLINDMPITNDQKKLMSSNVQIVRQQSYSIMSIIKEEVLAYVVQLPIYGVIDTPCWKLHTSPLCTTNIKEGSNICLTRTDRGWYCDNAGSVSFFPQADTCKVQSNRVFCDTMNSLTLPSEVSLCNTDIFNSKYDCKIMTSKTDISSSVITSLGAIVSCYGKTKCTASNKNRGIIKTFSNGCDYVSNKGVDTVSVGNTLYYVNKLEGKNLYVKGEPIINYYDPLVFPSDEFDASISQVNEKINQSLAFIRRSDELLHNVNAGKSTTNIMITAIIIVIIVVLLSLIAIGLLLYCKAKNTPVTLSKDQLSGINNIAFSK

SEQ ID NO: 8881 - protein, 574 aa, Artificial Sequence
  derived and/or modified protein sequence (wt) from HRSV__AGG39526.1__F0
MELLIHRSSAIFLTLAINALYLTSSQNITEEFYQSTCSAVSRGYFSALRTGWYTSVITIELSNIKETKCNGTDTKVKLIKQELNKYKNAVTELQLLMQNTPAANNRARREAPQYMNYTINTTKNLNVSISKKRKRRFLGFLLGVGSAIASGIAVSKVLHLEGEVNKIKNALLSTNKAVVSLSNGVSVLTSKVLDLKNYINNQLLPIVNQQSCRISNIETVIEFQQKNSRLLEITREFSVNAGVTTPLSTYMLTNSELLSLINDMPITNDQKKLMSSNVQIVRQQSYSIMSIIKEEVLAYVVQLPIYGVIDTPCWKLHTSPLCTTNIKEGSNICLTRTDRGWYCDNAGSVSFFPQADTCKVQSNRVFCDTMNSLTLPSEVSLCNTDIFNSKYDCKIMTSKTDISSSVITSLGAIVSCYGKTKCTASNKNRGIIKTFSNGCDYVSNKGVDTVSVGNTLYYVNKLEGKNLYVKGEPIINYYDPLVFPSDEFDASISQVNEKINQSLAFIRRSDELLHNVNAGKSTTNIMITAIIIVIIVVLLSLIAIGLLLYCKAKNTPVTLSKDQLSGINNIAFSK

SEQ ID NO: 8882 - protein, 574 aa, Artificial Sequence
  derived and/or modified protein sequence (wt) from HRSV__AGG39523.1__F0
MELLIHRSIAIFLTLAINALYLTSSQNITEEFYQSTCSAVSRGYFSALRTGWYTSVITIELSNITETKCNGTDTKVKLIKQELDKYKNAVTELQLLMQNTPAANNRARREAPQYMNYTINTTKNLNVSISKKRKRRFLGFLLGVGSAIASGIAVSKVLHLEGEVNKIKNALLSTNKAVVSLSNGVSVLTSKVLDLKNYINNQLLPIVNQQSCRISNIETVIEFQQKNSRLLEITREFSVNAGVTTPLSTYMLTNSELLSLINDMPITNDQKKLMSSNVQIVRQQSYSIMSIIKEEVLAYVVQLPIYGVIDTPCWKLHTSPLCTTNIKEGSNICLTRTDRGWYCDNAGSVSFFPQADTCKVQSNRVFCDTMNSLTLPSEVSLCNTDIFNSKYDCKIMTSKTDISSSVITSLGAIVSCYGKTKCTASNKNRGIIKTFSNGCDYVSNKGVDTVSVGNTLYYVNKLEGKNLYVKGEPIINYYDPLVFPSDEFDASISQVNEKINQSLAFIRRSDELLHNVNVGKSTTNIMITAIIIVIIVVLLSLIAIGLLLYCKAKNTPVTLSKDQLSGINNIAFSK

SEQ ID NO: 8883 - protein, 574 aa, Artificial Sequence
  derived and/or modified protein sequence (wt) from HRSV__AGG39514.1__F0
MELLIHRSSAIFLTLAINALYLTSSQNITEEFYQSTCSAVSRGYLSALRTGWYTSVITIELSNIKETKCNGTDTKVKLIKQELDKYKNAVTELQLLMQNTPVANNRARREAPQYMNYTINTTKNLNVSISKKRKRRFLGFLLGVGSAIASGIAVSKVLHLEGEVNKIKNALLSTNKAVVSLSNGVSVLTSKVLDLKNYINNQLLPIVNQQSCRISNIETVIEFQQKNSRLLEITREFSVNAGVTTPLSTYMLTNSELLSLINDMPITNDQKKLMSSNVQIVRQQSYSIMSIIKEEVLAYVVQLPIYGVIDTPCWKLHTSPLCTTNTKEGSNICLTRTDRGWYCDNAGSVSFFPQADTCKVQSNRVFCDTMYSLTLPSEVSLCNTDIFNSKYDCKIMTSKTDISSSVITSLGAIVSCYGKTKCTASNKNRGIIKTFSNGCDYVSNKGVDTVSVGNTLYYVNKLEGKNLYVKGEPIINYYDPLVFPSDEFDASISQVNEKINQSLAFIRRSDELLHNVNTGKSTTNIMITAIIIVIIVVLLSLIAIGLLLYCKAKNTPVTLSKDQLSGINNIAFSK

SEQ ID NO: 8884 - protein, 574 aa, Artificial Sequence
  derived and/or modified protein sequence (wt) from HRSV__AGG39502.1__F0
MELLVHRSSAIFLTLAINALYLTSSQNITEEFYQSTCSAVSRGYFSALRTGWYTSVITIELSNIKETKCNGTDTKVKLIKQELDKYKNAVTELQLLMQNTPAANNRARREAPQYMNYTINTTNNLNVSISKKRKRRFLGFLLGVGSAIASGIAVSKVLHLEGEVNKIKNALLSTNKAVVSLSNGVSVLTSKVLDLKNYINNQLLPIVNQQSCRISNIETVIEFQQKNSRLLEIAREFSVNAGVTTPLSTYMLTNSELLSLINDMPITNDQKKLMSSNVQIVRQQSYSIMSIIKEEVLAYVVQLPIYGVIDTPCWKLHTSPLCTTNIKEGSNICLTRTDRGWYCDNAGSVSFFPQADTCKVQSNRVFCDTMNSLTLPSEVSLCNTDIFNSKYDCKIMTSKTDISSSVITSLGAIVSCYGKTKCTASNKNRGIIKTFSNGCDYVSNKGVDTVSVGNTLYYVNKLEGKNLYVKGEPIINYYDPLVFPSDEFDASISQVNEKINQSLAFIRRSDELLHNVNTGKSTTNIMITAIIIVIIVVLLSLIAIGLLLYCKAKNTPVTLSKDQLSGINNIAFSK

SEQ ID NO: 8885 - protein, 574 aa, Artificial Sequence
  derived and/or modified protein sequence (wt) from HRSV__AGG39499.1__F0
MELLIHRSSAIFLTLAINALYLTSSQNITEEFYQSTCSAVSRGYFSALRTGWYTSVITIELSNIKETKCNGTDTKVKLIKQELDKYKNAVTELQLLMQNIPAANNRARREAPQYMNYTINTTKNLNVSISKKRKRRFLGFLLGVGSAIASGIAVSKVLHLEGEVNKIKNALLSTNKAVVSLSNGVSVLTSKVLDLKNYINNQLLPIVNQQSCRISNIETVIEFQQKNSRLLEITREFSVNAGVTTPLSTYMLTNSELLSLINDMPITNDQKKLMSSNAQIVRQQSYSIMSIIKEEVLAYVVQLPIYGVIDTPCWKLHTSPLCTTNIKEGSNICLTRTDRGWYCDNAGSVSFFPQADTCKVQSNRVFCDTMNSLTLPSEVSLCNTDIFNSKYDCKIMTSKTDISSSVITSLGAIVSCYGKTKCTASNKNRGIIKTFSNGCDYVSNKGVDTVSVGNTLYYVNKLEGKNLYVKGEPIINYYDPLVFPSDEFDASISQVNEKINQSLAFIRRSDELLHNVNTGKSTTNIMITAIIIVIIVVLLSLIAIGLLLYCKAKNTPVTLSKDQLSGINNIAFSK

SEQ ID NO: 8886 - protein, 574 aa, Artificial Sequence
  derived and/or modified protein sequence (wt) from HRSV__AGG39496.1__F0
MELLIHRSSAIFLTLAINALYLTSSQNITEEFYQSTCSAVSRGYFSALRTGWYTSVITIELSNIKETKCNGTDTKVKLIKQELDKYKNAVTELQLLMQNTPAANNRARREAPQYMNYTINTTKNLNVSISKKRKRRFLGFLLGVGSAIASGIAVSKVLHLEGEVNKIKNALLSTNKAVVSLSNGISVLTSKVLDLKNYINNQLLPIVNQQSCRITNIETVIEFQQKNSRLLEITREFSVNAGVTTPLSTYMLTNSELLSLINDMPITNDQKKLMSSNVQIVRQQSYSIMSIIKEEVLAYVVQLPIYGVIDTPCWKLHTSPLCTTNIKEGSNICLTRTDRGWYCDNAGSVSFFPQADTCKVQSNRVFCDTMNSLTLPSEVSLCNTDIFNSKYDCKIMTSKTDISSSVITSLGAIVSCYGKTKCTASNKNRGIIKTFSNGCDYVSNKGVDTVSVGNTLYYVNKLEGKNLYVKGEPIINYYDPLVFPSDEFDASISQVNEKINQSLAFIRRSDELLHNVNAGKSTTNIMITAIIIVIIVVLLSLIAIGLLLYCKAKNTPVTLSKDQLSGINNIAFSK

SEQ ID NO: 8887 - protein, 574 aa, Artificial Sequence
  derived and/or modified protein sequence (wt) from HRSV__AGG39493.1__F0
MELLIHRSSAIFLTLAINALYLTSSQNITEEFYQSTCSAVSRGYFSALRTGWYTSVITIELSNIKETKCNGTDTKVKLIKQELDKYKNAVTELQQLMQNTPAANNRARREAPQYMNYTINTTKNLNVSISKKRKRRFLGFLLGVGSAIASGIAVSKVLHLEGEVNKIKNALLSTNKAVVSLSNGVSVLTSKVLDLKNYINNQLLPIVNQQSCRISNIETVIEFQQKNSRLLEITREFSVNAGVTTPLSTYMLTNSELLSLINDMPITNDQKKLMSSNVQIVRQQSYSIMSIIKEEVLAYVVQLPIYGVIDTPCWKLHTSPLCTTNIKEGSNICLTRTDRGWYCDNAGSVSFFPQADTCKVQSNRVFCDTMNSLTLPSEVSLCNTDIFNSKYDCKIMTSKTDISSSVITSLGAIVSCYGKTKCTASNKNRGIIKTFSNGCDYVSNKGVDTVSVGNTLYYVNKLEGKNLYVKGEPIINYYDPLVFPSDEFDASISQVNEKINQSLAFIRRSDELLHNVNAGKSTTNIMITAIIIVIIVVLLSLIAIGLLLYCKAKNTPVTLSKDQLSGINNIAFSK

SEQ ID NO: 8888 - protein, 574 aa, Artificial Sequence
  derived and/or modified protein sequence (wt) from HRSV__AGG39484.1__F0
MELLIHRSSAIFLTLAINALYLTSSQNITEEFYQSTCSAVSRGYLSALRTGWYTSVITIELSNIKETKCNGTDTKVKLIKQELDKYKNAVTELQLLMQNTPAANNRARREAPQYMNYTINTTKNLNVSISKKRKRRFLGFLLGVGSAIASGIAVSKVLHLEGEVNKIKNALLSTNKAVVSLSNGVSVLTSKVLDLKNYINNQLLPIVNQQSCRITNIETVIEFQQKNSRLLEITREFSVNAGVTTPLSTYMLTNSELLSLINDMPITNDQKKLMSSNVQIVRQQSYSIMSIIKEEVLAYVVQLPIYGVIDTPCWKLHTSPLCTTNIKEGSNICLTRTDRGWYCDNAGSVSFFPQADTCKVQSNRVFCDTMNSLTLPSEVSLCNTDIFNSKYDCKIMTSKTDISSSVITSLGAIVSCYGKTKCTASNKNRGIIKTFSNGCDYVSNKGVDTVSVGNTLYYVNKLEGKNLYVKGEPIINYYDPLVFPSDEFDASISQVNEKINQSLAFIRRSDELLHNVNTGKSTTNIMITTIIIVIIVVLLSLIAIGLLLYCKAKNTPVTLSKDQLSGINNIAFSK

SEQ ID NO: 8889 - protein, 574 aa, Artificial Sequence
  derived and/or modified protein sequence (wt) from HRSV__AGG39490.1__F0
MELLIHRSSAIFLTLAINALYFTSSQNITEEFYQSTCSAVSRGYFSALRTGWYTSVITIELSNIKETKCNGTDTKVKLIKQELDKYKNAVTELQLLMQNTPAANNRARREAPQYMNYTINTTKNLNVSISKKRKRRFLGFLLGVGSAIASGIAVSKVLHLEGEVNKIKNALLSTNKAVVSLSNGVSVLTSKVLDLKNYINNQLLPIVNQQSCRISNIETVIEFQQKNSRLLEITREFSVNAGVTTPLSTYMLTNSELLSLINDMPITNDQKKLMSSNVQIVRQQSYSIMSIIKEEVLAYVVQLPIYGVIDTPCWKLHTSPLCTTNIKEGSNICLTRTDRGWYCDNAGSVSFFPQADTCKVQSNRVFCDTMNSLTLPSEVSLCNTDIFNSKYDCKIMTSKTDISSSVITSLGAIVSCYGKTKCTASNKNRGIIKTFSNGCDYVSNKGVDTVSVGNTLYYVNKLEGKNLYVKGEPIINYYDPLVFPSDEFDASISQVNEKINQSLAFIRRSDELLHNVNTGKSTTNIMITAIIIVIIVVLLSLIAIGLLLYCKAKNTPVTLSKDQLSGINNIAFSK

SEQ ID NO: 8890 - protein, 574 aa, Artificial Sequence
  derived and/or modified protein sequence (wt) from HRSV__AGG39487.1__F0
MELLIHRSSAIFLTLAVNALYLTSSQNITEEFYQSTCSAVSRGYFSALRTGWYTSVITIELSNIKETKCNGTDTKVKLIKQELDKYKNAVTELQLLMQNTPAANNRARREAPQYMNYTINTTKNLNVSISKKRKRRFLGFLLGVGSAIASGMAVSKVLHLEGEVNKIKNALLSTNKAVVSLSNGISVLTSKVLDLKNYINNRLLPIVNQQSCRISNIETVIEFQQKNSRLLEITREFSVNAGVTTPLSTYMLTNSELLSLINDMPITNDQKKLMSSNVQIVRQQSYSIMSIIKEEVLAYVVQLPIYGVIDTPCWKLHTSPLCTTNIKEGSNICLTRTDRGWYCDNAGSVSFFPQADTCKVQSNRVFCDTMNSLTLPSEVSLCNTDIFNSKYDCKIMTSKTDISSSVITSLGAIVSCYGKTKCTASNKNRGIIKTFSNGCDYVSNKGVDTVSVGNTLYYVNKLEGKNLYVKGEPIINYYDPLVFPSDEFDASISQVNEKINQSLAFIRRSDELLHNVNTGKSTTNIMITTIIIVIIVVLLSLIAIGLLLYCKAKNTPVTLSKDQLSGINNIAFSK

SEQ ID NO: 8891 - protein, 574 aa, Artificial Sequence
  derived and/or modified protein sequence (wt) from HRSV__AGG39475.1__F0
MELPILKTNAITTILAAVTLCFASSQNITEEFYQSTCSAVSKGYLSALRTGWYTSVITIELSNIKENKCNGTDAKVKLIKQELDKYKNAVTELQLLMQSTQAANNRARRELPRFMNYTLNNTKNTNVTLSKKRKRRFLGFLLGVGSAIASGIAVSKVLHLEGEVNKIKSALLSTNKAVVSLSNGVSVLTSKVLDLKNYIDKQLLPIVNKQSCSISNIETVIEFQQKNNRLLEITREFSVNAGVTTPVSTYMLTNSELLSLINDMPITNDQKKLMSNNVQIVRQQSYSIMSIIKEEVLAYVVQLPLYGVIDTPCWKLHTSPLCTTNTKEGSNICLTRTDRGWYCDNAGSVSFFPQAETCKVQSNRVFCDTMNSLTLPSEVNLCNIDIFNSKYDCKIMTSKTDVSSSVITSLGAIVSCYGKTKCTASNKNRGIIKTFSNGCDYVSNKGVDTVSVGNTLYYVNKQEGKSLYVKGEPIINFYDPLVFPSDEFDASISQVNEKINQSLAFIRKSDELLHNVNVGKSTTNIMITTIIIVIIVILLLLIAVGLFLYCKARSTPVTLSKDQLSGINNIAFSN

SEQ ID NO: 8892 - protein, 574 aa, Artificial Sequence
  derived and/or modified protein sequence (wt) from HRSV__AGG39466.1__F0
MELLILKANVIATILTAVTFCFASSQNITEEFYQSTCSAVSKGYLSALRTGWYTSVITIELSNIKENKCNGTDAKVKLIKQELDKYKNAVTELQLLMQSTSAANNRARRELPRFMNYTLNNAKKTNVTLSKKRKRRFLGFLLGVGSAIASGIAVSKVLHLEGEVNKIKSALLSTNKAVVSLSNGVSVLTSKVLDLKNYIDKQLLPIVNKQSCSISNIETVIEFQQKNNRLLEITREFSVNAGVTTPVSTYMLTNSELLSLINDMPITNDQKKLMSNNVQIVRQQSYSIMSIIKEEVLAYVVQLPLYGVIDTPCWKLHTSPLCTTNTKEGSNICLTRTDRGWYCDNAGSVSFFPQAETCKVQSNRVFCDTMNSLTLPSEVNLCNVDIFNPKYDCKIMTSKTDVSSSVITSLGAIVSCYGKTKCTASNKNRGIIKTFSNGCDYVSNKGVDTVSVGNTLYYVNKQEGKSLYVKGEPIINFYDPLVFPSDEFDASISQVNEKINQSLAFIRKSDELLHNVNAGKSTTNIMITTIIIVIIVILLSLIAVGLLLYCKARSTPVTLSKDQLSGINNIAFSN

SEQ ID NO: 8893 - protein, 574 aa, Artificial Sequence
  derived and/or modified protein sequence (wt) from HRSV__AGG39463.1__F0
MELPILKTNAITTILAAVTLCFASSQNITEEFYQSTCSAVSKGYLSALRTGWYTSVITIELSNIKENKCNGTDAKVKLIKQELDKYKNAVTELQLLMQSTPAANNRARRELPRFMNYTLNNTKNTNVTLSKKRKRRFLGFLLGVGSAIASGIAVSKVLHLEGEVNKIKSALLSTNKAVVSLSNGVSVLTSKVLDLKNYIDKQLLPIVNKQSCSISNIETVIEFQQKNNRLLEITREFSVNAGVTTPVSTYMLTNNELLSLINDMPITNDQKKLMSNNVQIVRQQSYSIMSIIKEEVLAYVVQLPLYGVIDTPCWKLHTSPLCTTNTKEGSNICLTRTDRGWYCDNAGSVSFFPQAETCKVQSNRVFCDTMNSLTLPSEVNLCNIDIFNPKYDCKIMTSKTDVSSSVITSLGAIVSCYGKTKCTASNKNRGIIKTFSNGCDYVSNKGVDTVSVGNTLYYVNKQEGKSLYVKGEPIINFYDPLVFPSDEFDASISQVNEKINQSLAFIRKSDELLHNVNVGKSTTNIMITTIIIVIIVILLLLIAVGLFLYCKARSTPVTLSKDQLSGINNIAFSN

SEQ ID NO: 8894 - protein, 574 aa, Artificial Sequence
  derived and/or modified protein sequence (wt) from HRSV__AGG39454.1__F0
MELPILKINAITTILAAVTLCFASSQNITEEFYQSTCSAVSKGYLSALRTGWYTSVITIELSNIKENKCNGTDAKVKLIKQELDKYKNAVTELQLLMQSTPAANNRARRELPRFMNYTLNNTKNTNVTVSKKRKRRFLGFLLGVGSAIASGIAVSKVLHLEGEVNKIKSALLSTNKAVVSLSNGVSVLTSKVLDLKNYIDKQLLPIVNKQSCSISNIETVIEFQQKNNRLLEITREFSVNAGVTTPVSTYMLTNSELLSLINDMPITNDQKKLMSNNVQIVRQQSYSIMSIIKEEVLAYVVQLPLYGVIDTPCWKLHTSPLCTTNTKEGSNICLTRTDRGWYCDNAGSVSFFPQAETCKVQSNRVFCDTMNSLTLPSEVNLCNIDIFNPKYDCKIMTSKTDVSSSVITSLGAIVSCYGKTKCTASNKNRGIIKTFSNGCDYVSNKGVDTVSVGNTLYYVNKQEGKSLYVKGEPIINFYDPLVFPSDEFDASISQVNEKINQSLAFIRKSDELLHNVNAGKSTTNIMITTIIIVIIVILLSLIAVGLLLYCKARSTPVTLSKDQLSGINNIAFSN

SEQ ID NO: 8895 - protein, 574 aa, Artificial Sequence
  derived and/or modified protein sequence (wt) from HRSV__AGG39442.1__F0
MELPILKTNAITTILAAVTLCFASSQNITEEFYQSTCSAVSKGYLSALRTGWYTSVITIELSSIKENKCNGTDAKVKLIKQELDKYKNAVTELQLLMQSTPAANNRARRELPRFMNYTFNNTKTTNVTLSRKRKRRFLGFLLGVGSAIASGIAVSKVLHLEGEVNKIKSALLSTNKAVVSLSNGVSVLTSKVLDLKNYIDKQLLPIVNKQSCSISNIETVIEFQQKNNRLLEITREFSVNAGVTTPVSTYMLTNSELLSLINDMPITNDQKKLMSNNVQIVRQQSYSIMSIIKEEVLAYVVQLPLYGVIDTPCWKLHTSPLCTTNTKEGSNICLTRTDRGWYCDNAGSVSFFPQAETCKVQSNRVFCDTMNSLTLPSEVNLCNIDIFNPKYDCKIMTSKTDVSSSVITSLGAIVSCYGKTKCTASNKNRGIIKTFSNGCDYVSNKGVDTVSVGNTLYYVNKQEGKSLYVKGEPIINFYDPLVFPSDEFDASISQVNEKINQSLAFIRKSDELLHNVNAGKSTTNIMITTIIIVIIVILLSLIAVGLLLYCKARSTPVTLSKDQLSGINNIAFSS

SEQ ID NO: 8896 - protein, 574 aa, Artificial Sequence
  derived and/or modified protein sequence (wt) from HRSV__AGG39439.1__F0
MELPILKTNAITTIFAAVTLCFASSQNITEEFYQSTCSAVSKGYLSALRTGWYTSVITIELSNIKENKCNGTDAKVKLIKQELDKYKNAVTELQLLMQSTPAANNRARRELPRFMNYTLNNTKNNNVTLSRKRKRRFLGFLLGVGSAIASGIAVSKVLHLEGEVNKIKSALLSTNKAVVSLSNGVSVLTSKVLDLKNYIDKQLLPIVNKQSCSISNIETVIEFQQKNNRLLEITREFSVNAGVTTPVSTYMLTNSELLSLINDMPITNDQKKLMSNNVQIVRQQSYSIMSIIKEEVLAYVVQLPLYGVIDTPCWKLHTSPLCTTNTKEGSNICLTRTDRGWYCDNAGSVSFFPQAETCKVQSNRVFCDTMNSLTLPSEVNLCNIDIFNPKYDCKIMTSKTDVSSSVITSLGAIVSCYGKTKCTASNKNRGIIKTFSNGCDYVSNKGVDTVSVGNTLYYVNKQEGKSLYVKGEPIINFYDPLVFPSDEFDASISQVNEKINQSLAFIRKSDELLHNVNVGKSTTNIMITTIIIVIIVILLLLIAVGLFLYCKARSTPVTLSKDQMSGINNIAFSN

SEQ ID NO: 8897 - protein, 574 aa, Artificial Sequence
  derived and/or modified protein sequence (wt) from HRSV__AGG39436.1__F0
MELPILKTNAITTIFAAVTLCFASSQNITEEFYQSTCSAVSKGYLSALRTGWYTSVITIELSNIKENKCNGTDAKVKLIKQELDKYKNAVTELQLLMQSTPAANNRARRELPRFMNYTFNNTKTTNVTLSKKRKRRFLGFLLGVGSAIASGIAVSKVLHLEGEVNKIKSALLSTNKAVVSLSNGVSVLTSKVLDLKNYIDKQLLPIVNKQSCSISNIETVIEFQQKNNRLLEITREFSVNAGVTTPVSTYMLTNSELLSLINDMPITNDQKKLMSNNVQIVRQQSYSIMSIIKEEVLAYVVQLPLYGVIDTPCWKLHTSPLCTTNTKEGSNICLTRTDRGWYCDNAGSVSFFPQAETCKVQSNRVFCDTMNSLTLPSEVNLCNIDIFNPKYDCKIMTSKTDVSSSVITSLGAIVSCYGKTKCTASNKNRGIIKTFSNGCDYVSNKGVDTVSVGNTLYYVNKQEGKSLYVKGEPIINFYDPLVFPSDEFDASISQVNEKINQSLAFIRKSDELLHNVNAGKSTTNIMITTIIIVIIVILLSLIAVGLLLYCKARSTPVTLSKDQLSGINNIAFSS

SEQ ID NO: 8898 - protein, 574 aa, Artificial Sequence
  derived and/or modified protein sequence (wt) from HRSV__AGG39415.1__F0
MDLPILKTNAITTILAAVLLCFASSQNITEEFYQSTCSAVSKGYLSALRTGWYTSVITIELSNIKENKCNGTDAKVKLIKQELDKYKNAVTELQLLMQSTPAANNRARRELPRFMNYTLNNTKNNNVTLSKKRKRRFLGFLLGVGSAIASGIAVSKVLHLEGEVNKIKNALLSTNKAVVSLSNGVSVLTSKVLDLKNYIDKQLLPIVNKQSCSISNIETVIEFQQKNNRLLEITREFSVNAGVTTPVSTYMLTNSELLSLINDMPITNDQKKLMSNNVQIVRQQSYSIMSIIKEEVLAYVVQLPLYGVIDTPCWKLHTSPLCTTNTKEGSNICLTRTDRGWYCDNAGSVSFFPQAETCKVQSNRVFCDTMNSLTLPSEVNLCNIDIFNPKYDCKIMTSKTDVSSSVITSLGAIVSCYGKTKCTASNKNRGIIKTFSNGCDYVSNKGVDTVSVGNTLYYVNKQEGKSLYVKGEPIINFYDPLVFPSDEFDASISQVNEKINQSLAFIRKSDELLHNVNVGKSTTNIMITTIIIVIIVILLLLIAVGLFLYCKARSTPVTLSKDQLSGINNIAFSN

SEQ ID NO: 8899 - protein, 574 aa, Artificial Sequence
  derived and/or modified protein sequence (wt) from HRSV__AGG39403.1__F0
MELPILKTNAITTILAAVTLCFASSQNITEEFYQSTCSAVSKGYLSALRTGWYTSVITIELSNIKENMCNGTDAKVKLIKQELDKYKNAVTELQLLMQSTPAANNRARRELPRFMNYTLNNTKNTNVTLSKKRKRRFLGFLLGVGSAIASGIAVSKVLHLEGEVNKIKSALLSTNKAVVSLSNGVSVLTSKVLDLKNYIDKQLLPIVNKQSCSISNIETVIEFQQKNNRLLEITREFSVNAGVTTPVSTYMLTNSELLSLINDMPITNDQKKLMSNNVQIVRQQSYSIMSIIKEEVLAYVVQLPLYGVIDTPCWKLHTSPLCTTNTKEGSNICLTRTDRGWYCDNAGSVSFFPQAETCKVQSNRVFCDTMNSLTLPSEVNLCNIDIFNPKYDCKIMTSKTDVSSSVITSLGAIVSCYGKTKCTASNKNRGIIKTFSNGCDYVSNKGVDTVSVGNTLYYVNKQEGKSLYVKGEPIINFYDPLVFPSDEFDASISQVNEKINQSLAFIRKSDELLHNVNVGKSTTNIMITTIIIVIIVILLLLIAVGLFLYCKARSTPVTLSKDQLSGINNIAFSN

SEQ ID NO: 8900 - protein, 574 aa, Artificial Sequence
  derived and/or modified protein sequence (wt) from HRSV__AGG39412.1__F0
MELPILKTNAITTILAAVTLCFASSQNITEEFYQSTCSAVSKGYLSALRTGWYTSVITIELSNIKENKCNGTDAKVKLIKQELDKYKNAVTELQLLMQSTPAANNRARRELPRFMNYTLNNTKNNNVTLSKKRKRRFLGFLLGVGSAIASGIAVSKVLHLEGEVNKIKSALLSTNKAVVSLSNGVSVLTSKVLDLKNYIDKQLLPIVNKQSCSISNIETVIEFQQKNNRLLEITREFSVNAGVTTPVSTYMLTNSELLSLINDMPITNDQKKLMSNNVQIVRQQSYSIMSIIKEEVLAYVVQLPLYGVIDTPCWKLHTSPLCTTNTKEGSNICLTRTDRGWYCDNAGSVSFFPQAETCKVQSNRVFCDTMNSLTLPSEVNLCNIDIFNPKYDCKIMTSKTDVSSSVITSLGAIVSCYGKTKCTASNKNRGIIKTFSNGCDYVSNKGVDTVSVGNTLYYVNKQEGKSLYVKGEPIINFYDPLVFPSDEFDASISQVNEKINQSLAFIRKSDELLHNVNVGKSTTNIMITTIIIVIIVILLLLIAVGLFLYCKARSTPVTLSKDQLSGINNIAFSK

SEQ ID NO: 8901 - protein, 574 aa, Artificial Sequence
  derived and/or modified protein sequence (wt) from HRSV__AGG39397.1__F0
MELPIIKANAITTILIAVTFCFASSQNITEEFYQSTCSAVSKGYLSALRTGWYTSVITIELSNIKENKCNGTDAKVKLIKQELDKYKNAVTELQLLMQSTTAANNRARRELPRFMNYTLNNAKKTNVTLSKKRKRRFLGFLLGVGSAIASGIAVSKVLHLEGEVNKIKSALLSTNKAVVSLSNGVSVLTSKVLDLKNYIDKQLLPIVNKQSCSISNIETVIEFQQKNNRLLEITREFSVNAGVTTPVSTYMLTNSELLSLINDMPITNDQKKLMSNNVQIVRQQSYSIMSIIKEEVLAYVVQLPLYGVIDTPCWKLHTSPLCTTNTKEGSNICLTRTDRGWYCDNAGSVSFFPQADTCKVQSNRVFCDTMNSLTLPSEVNLCNIDIFNPKYDCKIMTSKTDVSSSVITSLGAIVSCYGKTKCTASNKNRGIIKTFSNGCDYVSNKGVDTVSVGNTLYYVNKQEGKSLYVKGEPIINFYDPLVFPSDEFDASISQVNEKINQSLAFIRKSDELLHNVNAGKSTTNIMITTIIIVIIVILLSLIAVGLLLYCKARSTPVTLSKDQLSGINNIAFSN

SEQ ID NO: 8902 - protein, 574 aa, Artificial Sequence
  derived and/or modified protein sequence (wt) from HRSV__AGG39391.1__F0
MDLPILKTNAITAILAAVSLCFVSSQNITEEFYQSTCSAVSKGYLSALRTGWYTSVITIELSNIKENKCNGTDAKVKLIKQELDKYKNAVTELQLLMQSTPAANNRARRELPRFMNYTLNNTKNNNVTLSKKRKRRFLGFLLGVGSAIASGIAVSKVLHLEGEVNKIKSALLSTNKAVVSLSNGVSVLTSKVLDLKNYIDKQLLPIVNKQSCSISNIETVIEFQQKNNRLLEITREFSVNAGVTTPVSTYMLTNSELLSLINDMPITNDQKKLMSNNVQIVRQQSYSIMSIIKEEVLAYVVQLPLYGVIDTPCWKLHTSPLCTTNTKEGSNICLTRTDRGWYCDNAGSVSFFPQAETCKVQSNRVFCDTMNSLTLPSEVNLCNIDIFNPKYDCKIMTSKTDVSSSVITSLGAIVSCYGKTKCTASNKNRGIIKTFSNGCDYVSNKGVDTVSVGNTLYYVNKQEGKSLYVKGEPIINFYDPLVFPSDEFDASISQVNEKINQSLAFIRKSDELLHNVNVGKSTTNIMITTIIIVIIVILLLLIAVGLFLYCKARSTPVTLSKDQLSGINNIAFSN

SEQ ID NO: 8903 - protein, 574 aa, Artificial Sequence
  derived and/or modified protein sequence (wt) from HRSV__AGG39385.1__F0
MELPILKTNAITTIFAAVTLCFASSQNITEEFYQSTCSAVSKGYLSALRTGWYTSVITIELSNIKENKCNGTDAKVKLIKQELDKYKNAVTELQLLMQSTPAANNRARRELPRFMNYTLNNTKNNNVTLSRKRKRRFLGFLLGVGSAIASGIAVSKVLHLEGEVNKIKSALLSTNKAVVSLSNGVSVLTSKVLDLKNYIDKQLLPIVNKQSCSISNIETVIEFQQKNNRLLEITREFSVNAGVTTPVSTYMLTNSELLSLINDMPITNDQKKLMSNNVQIVRQQSYSIMSIIKEEVLAYVVQLPLYGVIDTPCWKLHTSPLCTTNTKEGSNICLTRTDRGWYCDNAGSVSFFPQAETCKVQSNRVFCDTMNSLTLPSEVNLCNIDIFNPKYDCKIMTSKTDVSSSVITSLGAIVSCYGKTKCTASNKNRGIIKTFSNGCDYVSNKGVDTVSVGNTLYYVNKQEGKSLYVKGEPIINFYDPLVFPSDEFDASISQVNEKINQSLAFIRKSDELLHNVNVGKSTTNIMITTIIIVIIVILLLLIAVGLFLYCKARSTPVTLSKDQLSGINNIAFSN

SEQ ID NO: 8904 - protein, 574 aa, Artificial Sequence
  derived and/or modified protein sequence (wt) from HRSV__AGG39379.1__F0
MELPILKTNAITTILAAVTLCFASSQNITEEFYQSTCSAVSKGYLSALRTGWYTSVITIELSNIKENKCNGTDAKVKLIKQELDKYKNAVTELQLLMQSTPAANNRARRELPRFMNYTLNNTKTTNVTLSKKRKRRFLGFLLGVGSAIASGIAVSKVLHLEGEVNKIKSALLSTNKAVVSLSNGVSVLTSKVLDLKNYIDKQLLPIVNKQSCSISNIETVIEFQQKNNRLLEITREFSVNAGVTTPVSTYMLTNSELLSLINDMPITNDQKKLMSNNVQIVRQQSYSIMSIIKEEVLAYVVQLPLYGVIDTPCWKLHTSPLCTTNTKEGSNICLTRTDRGWYCDNAGSVSFFPQAETCKVQSNRVFCDTMNSLTLPSEVNLCNTDIFNPKYDCKIMTSKTDVSSSVITSLGAIVSCYGKTKCTASNKNRGIIKTFSNGCDYVSNKGVDTVSVGNTLYYVNKQEGKSLYVKGEPIINFYDPLVFPSDEFDASISQVNEKINQSLAFIRKSDELLHNVNAGKSTTNIMITTIIIVIIVILLSLIAVGLLLYCKARSTPVTLSKDQLSGINNIAFSS

SEQ ID NO: 8905 - protein, 574 aa, Artificial Sequence
  derived and/or modified protein sequence (wt) from HRSV__AHL84194.1__F0
MELLILKANAITTILTAVTFCFASGQNITEEFYQSTCSAVSKGYLSALRTGWYTSVITIELSNIKKNKCNGTDAKVKLIKQELDKYKNAVTELQLLMQSTPATNNRARRELPRFMNYTLNNAKKTNVTLSKKRKRRFLGFLLGVGSAIASGVAVSKVLHLEGEVNKIKSALLSTNKAVVSLSNGVSVLTSKVLDLKNYIDKQLLPIVNKQSCSISNIETVIEFQQKNNRLLEITREFSVNAGVTTPVSTYMLTNSELLSLINDMPITNDQKKLMSNNVQIVRQQSYSIMSIIKEEVLAYVVQLPLYGVIDTPCWKLHTSPLCTTNTKEGSNICLTRTDRGWYCDNAGSVSFFPQAETCKVQSNRVFCDTMNSLTLPSEVNLCNVDIFNPKYDCKIMTSKTDVSSSVITSLGAIVSCYGKTKCTASNKNRGIIKTFSNGCDYVSNKGVDTVSVGNTLYYVNKQEGKSLYVKGEPIINFYDPLVFPSDEFDASISQVNEKINQSLAFIRKSDELLHNVNAGKSTTNIMITTIIIVIIVILLSLIAVGLLLYCKARSTPVTLSKDQLSGINNIAFSN

SEQ ID NO: 8906 - protein, 574 aa, Artificial Sequence
  derived and/or modified protein sequence (wt) from HRSV__AHA84012.1__F0
MELLIHRSSAIFLTLAINALYLTSSQNITEEFYQSTCSAVSRGYFSALRTGWYTSVITIELSNIQETKCNGTDTKVKLIKQELDKYKNAVTELQLLMQNTPAANNRARREAPQYMNHTINTTKNLNVSISKKRKRRFLGFLLGVGSAIASGIAVSKVLHLEGEVNKIKNALLSTNKAVVSLSNGVSVLTSKVLDLKNYINNQLLPIVNQQSCRISNIETVIEFQQKNSRLLEITREFSVNAGVTTPLSTYMLTNSELLSLINDMPITNDQKKLMSSNVQIVRQQSYSIMSIIKEEVLAYVVQLPIYGVIDTPCWKLHTSPLCTTNIKEGSNICLTRTDRGWYCDNAGSVSFFPQADTCKVQSNRVFCDTMNSLTLPSEVSLCNTDIFNSKYDCKIMTSKTDISSSVITSLGAIVSCYGKTKCTASNKNRGIIKTFSNGCDYVSNKGVDTVSVGNTLYYVNKLEGKNLYVKGEPIINYYDPLVFPSDEFDASISQVNEKINQSLAFIRRSDELLHNVNTGKSTTNIMMTAIIIVIIVVLLSLIAIGLLLYCKAKNTPVTLSKDQLSGINNIAFSK

SEQ ID NO: 8907 - protein, 574 aa, Artificial Sequence
  derived and/or modified protein sequence (wt) from HRSV__AHJ60043.1__F0
MELLIHRSSAIFLTLAINALYLTSSQNITEEFYQSTCSAVSRGYFSALRTGWYTSVITIELSNITETKCNGTDTKVKLIKQELDKYKNAVTELQLLMQNTPAANNRARREAPQHMNYTINTTKNLNVSISKKRKRRFLGFLLGVGSAIASGIAVSKVLHLEGEVNKIKNALLSTNKAVVSLSNGVSVLTSKVLDLKNYINNQLLPIVNQQSCRIFNIETVIEFQQKNSRLLEITREFSVNAGVTTPLSTYMLTNSELLSLINDMPITNDQKKLMSSNVQIVRQQSYSIMSIIKEEVLAYVVQLPIYGVIDTPCWKLHTSPLCTTNIKEGSNICLTRTDRGWYCDNAGSVSFFPQADTCKVQSNRVFCDTMNSLTLPSEVSLCNTDIFNSKYDCKIMTSKTDISSSVITSLGAIVSCYGKTKCTASNKNRGIIKTFSNGCDYVSNKGVDTVSVGNTLYYVNKLEGKNLYVKGEPIINYYDPLVFPSDEFDASISQVNEKINQSLAFIRKSDELLHNVNTGKSTTNIMITTIIIVIIVVLLSLIAIGLLLYCKAKNTPVTLSKDQLSGINNIAFSK

SEQ ID NO: 8908 - protein, 574 aa, Artificial Sequence
  derived and/or modified protein sequence (wt) from HRSV__BAO49770.1__F0
MELPILKTNAITTILAAVTLCFASSQNITEEFYQSTCSAVSKGYLSALRTGGYTSVITIELSNIKENKCNGTDAKVKLIKQELDKYKNAVTELQLLMQSTPAANSRARRELPRFMNYTLNNTKNTNVTLSKKRKRRFLGFLLGVGSAIASGIAVSKVLHLEGEVNKIKSAPLSTNKAVVSLSNGVSVLTSKVLDLKNYIDKQLLPIVNKQSCSISNIETVIEFQQKNNRLLEITREFSVNAGVTTPVSTYMLTNSELLSLINDMPITNDQKKLMSSNVQIVRQQSYSIMSIIKEEVLAYVVQLPLYGVIDTPCWKLHTSPLCTTNTKEGSNICLTRTDRGWYCDNAGSVSFFPQAETCKVQSNRVFCDTMNSLTLPSEVNLCNIDIFNPKYDCKIMTSKTDVSSSVITSLGAIVSCYGKTKCTASNKNRGIIKTFSNGCDYVSNKGVDTVSVGNTLYYVNKQEGKSLYVKGEPIINFYDPLVFPSDEFDASISQVNEKINQSLAFIRKSDELLHNVNAGKSTTNIMITTIIIVIIVILLALIAVGLLLYCKARSTPVTLSKDQLSGINNIAFSN

SEQ ID NO: 8909 - protein, 574 aa, Artificial Sequence
  derived and/or modified protein sequence (wt) from HRSV__BAO49766.1__F0
MELPILKTNAITTILAAVTLCFASSQNITEEFYQSTCSAVSKGYLSALRTGWYTSVITIELSNIKENKCNGPDAKVKLIKQELDKYKNAVTELQLLMQSTPAGNSRARRELPRFMNYTLNNTKNTNVTLSKKRKRRFLGFLLGVGSAIASGIAVSKVLHLEGEVNKIKSALLSTNKAVVSLSNGVSVLTSKVLDLKNYIDKQLLPIVNKQSCSISNIETVIEFQQKNNRLLEITREFSVNAGVTTPVSTYMLTNSELLSLINDMPITNDQKKLMSSNVQIVRQQSYSIMSIIKEEVLAYVVQLPLYGVIDTPCWKLHTSPLCTTNTKEGSNICLTRTDRGWYCDNAGSVSFFPQAETCKVQSNRVFCDTMNSLTLPSEVNLCNIDIFNPKYDCKIMTSKTDVSSSVITSLGAIVSCYGKTKCTASNKNRGIIKTFSNGCDYVSNKGVDTVSVGNTLYYVNKQEGKSLYVKGEPIINFYDPLVFPSDEFDASISQVNEKINQSLAFIRKSDELLHNVNAGKSTTNIMITTIIIVIIVILLALIAVGLLLYCKARSTPVTLSKDQLSGINNIAFSN

SEQ ID NO: 8910 - protein, 574 aa, Artificial Sequence
  derived and/or modified protein sequence (wt) from HRSV__BAO49767.1__F0
MELPILKTNAITTILAAVTLCFASSQNITEEFYQSTCSAVCKGYLSALRTGWYTSVITIELSNIKENKCNGTDAKVKLIKQELDKYKNAVTELQLLMQSTPAANSRARRELPRFMNYTLNNTKNTNVTLSKKRKRRFLGFLLGVGSAIASGIAVSKVLHLEGEVNKIKSALLSTNKAVVSLSNGVSVLTSKVLDLKNYIDKQLLPIVNKQSCSISNIETVIEFQQKNNRLLEITREFSVNAGVTTPVSTYMLTNSELLSLINDMPITNDQKKLMSSNVQIVRQQSYSIMSIIKEEVLAYVVQLPLYGVIDTPCWKLHTSPLCTTNTKEGSNICLTRTDRGWYCDNAGSVSFFPQAETCKVQSNRVFCDTMNSLTLPSEVNLCNIDIFNPKYDCKIMTSKTDVSSSVITSLGAIVSCYGKTKCTASNKNRGIIKTFSNGCDYVSNKGVDTVSVGNTLYYVNKQEGKSLYVKGEPIINFYDPLVFPSDEFDASISQVNEKINQSLAFIRKSDELLHNVNAGKSTTNIMITTIIIVIIVILLALIAVGLLLYCKARSTPVTLSKDQLSGINNIAFSN

SEQ ID NO: 8911 - protein, 574 aa, Artificial Sequence
  derived and/or modified protein sequence (wt) from HRSV__AHA84034.1__F0
MELPILKTNAITTILAAVTLCFASSQNITEEFYQSTCSAVSKGYLSALRTGWYTSVITIELSNIKENKCNGTDAKVKLIKQELDKYKNAVTELQLLMQSTPAANSRARRELPRFMNYTLNNTKNTNVTLSKKRKRRFLGFLLGVGSAIASGIAVSKVLHLEGEVNKIKSALLSTNKAVVSLSNGVSVLTSKVLDLKNYIDKQLLPIVNKQSCSISNIETVIEFQQKNNRLLEITREFSVNAGVTTPVSTYMLTNSELLSLINDMPITNDQKKLMSSNVQIVRQQSYSIMSIIKEEVLAYVVQLPLYGVIDTPCWKLHTSPLCTTNTKEGSNICLTRTDRGWYCDNAGSVSFFPQAETCKVQSNRVFCDTMNSLTLPSEVDLCNIDIFNPKYDCKIMTSKTDVSSSVITSLGAIVSCYGKTKCTASNKNRGIIKTFSNGCDYVSNKGVDTVSVGNTLYYVNKQEGKSLYVKGEPIINFYDPLVFPSDEFDASISQVNEKINQSLAFIRKSDELLHNVNAGKSTTNIMITTIIIVIIVILLALIAVGLLLYCKARSTPVTLSKDQLSGINNIAFSN

SEQ ID NO: 8912 - protein, 574 aa, Artificial Sequence
  derived and/or modified protein sequence (wt) from HRSV__AHA84023.1__F0
MELPILKTNAITTIFATVTLCFASSQNITEEFYQSTCSAVSKGYLSALRTGWYTSVITIELSNIKENKCNGTDAKVKLIKQELDKYKNAVTELQLLMQSTPAANNRARRELPRFMNYTLNNTKNNNVTLSKKRKRRFLGFLLGVGSAIASGIAVSKVLHLEGEVNKIKSALLSTNKAVVSLSNGVSVLTSKVLDLKNYIDKQLLPIVNKQSCSISNIETVIEFQQKNNRLLEITREFSVNAGVTTPVSTYMLTNSELLSLINDMPITNDQKKLMSNNVQIVRQQSYSIMSIIKEEVLAYVVQLPLYGVIDTPCWKLHTSPLCTTNTKEGSNICLTRTDRGWYCDNAGSVSFFPQAETCKVQSNRVFCDTMNSLTLPSEVNLCNVDIFNPKYDCKIMTSKTDVSSSVITSLGAIVSCYGKTKCTASNKNRGIIKTFSNGCDYVSNKGVDTVSVGNTLYYVNKQEGKSLYVKGEPIINFYDPLVFPSDEFDASISQVNEKINQSLAFIRKSDELLHNVNVGKSTTNIMITTIIIVIIVILLLLIAVGLFLYCKARSTPVTLSKDQLSGINNIAFSN

SEQ ID NO: 8913 - protein, 574 aa, Artificial Sequence
  derived and/or modified protein sequence (wt) from HRSV__AHA83990.1__F0
MELLIHRSSAIFLTLAINALYLTSSQNITEEFYQSTCSAVSRGYLSALRTGWYTSVITIELSNIKETKCNGTDTKVKLIKQELDKYKNAVTELQLLMQNTPAVNNRARREAPQYMNYTINTTKNLNVSISKKRKRRFLGFLLGVGSAIASGIAVSKVLHLEGEVNKIKNALLSTNKAVVSLSNGVSVLTSKVLDLKNYINNQLLPIVNQQSCRIFNIETVIEFQQKNSRLLEITREFSVNAGVTTPLSTYMLTNSELLSLINDMPITNDQKKLMSSNVQIVRQQSYSIMSIIKEEVLAYVVQLPIYGVIDTPCWKLHTSPLCTTNIKEGSNICLTRTDRGWYCDNAGSVSFFPQADTCKVQSNRVFCDTMNSLTLPSEVSLCNTDIFNSKYDCKIMTSKTDISSSVITSLGAIVSCYGKTKCTASNKNRGIIKTFSNGCDYVSNKGVDTVSVGNTLYYVNKLEGKNLYVKGEPIINYYDPLVFPSDEFDASISQVNEKINQSLAFIRRSDELLHNVNTGKSTTNIMITAIIIVIIVVLLSLIAIGLLLYCKAKNTPVTLSKDQLSGINNIAFSK

SEQ ID NO: 8914 - protein, 574 aa, Artificial Sequence
  derived and/or modified protein sequence (wt) from HRSV__AHA83957.1__F0
MELPILKTNAITTILAVVTLCFASSQNITEEFYQSTCSAVSKGYLSALRTGWYTSVITIELSNIKENKCNGTDAKVKLIKQELDKYKNAVTELQLLMQSTPASNNRARRELPRFMNYTLNNTKNTNVTLSKKRKRRFLGFLLGVGSAIASGIAVSKVLHLEGEVNKIKSALLSTNKAVVSLSNGVSVLTSKVLDLKNYIDKQLLPIVNKQSCSISNIETVIEFQQKNNRLLEITREFSVNAGVTTPVSTYMLTNSELLSLINDMPITNDQKKLMSNNVQIVRQQSYSIMSIIKEEVLAYVVQLPLYGVIDTPCWKLHTSPLCTTNTKEGSNICLTRTDRGWYCDNAGSVSFFPQAETCKVQSNRVFCDTMNSLTLPSEVNLCNIDIFNPKYDCKIMTSKTDVSSSVITSLGAIVSCYGKTKCTASNKNRGIIKTFSNGCDYVSNKGVDTVSVGNTLYYVNKQEGKSLYVKGEPIINFYDPLVFPSDEFDASISQVNEKINQSLAFIRKSDELLHNVNAGKSTTNIMITTIIIVIVVILLSLIAVGLLLYCKARSTPVTLSKDQLSGINNIAFSS

SEQ ID NO: 8915 - protein, 574 aa, Artificial Sequence
  derived and/or modified protein sequence (wt) from HRSV__AHA83924.1__F0
MELLIHRSSAIFLTLAINALYLTSSQNITEEFYQSTCSAVSRGYFSALRTGWYTSVITIELSNIKETKCNGTDTKVKLIKQELDKYKNAVTELQLLMQNIPAANNRARREAPQYMNYTINTTKNLNVSISKKRKRRFLGFLLGVGSAIASGIAVSKVLHLEGEVNKIKNALLSTNKAVVSLSNGVSVLTSKVLDLKNYINNQLLPIVNQQSCRISNIETVIEFQQKNSRLLEITREFSVNAGVTTPLSTYMLTNSELLSLINDMPITNDQKKLMSSNVQIVRQQSYSIMSIIKEEVLAYVVQLPIYGVIDTPCWKLHTSPLCTTNIKEGSNICLTRTDRGWYCDNAGSVSFFPQADTCKVQSNRVFCDTMNSLTLPSEVSLCNTDIFNSKYDCKIMTSKTDISSSVITSLGAIVSCYGKTKCTASNKNRGIIKTFSNGCDYVSNKGVDTVSVGNTLYYVNKLEGKNFYVKGEPIINYYDPLVFPSDEFDASISQVNEKINQSLAFIRRSDELLHNVNTGKSTTNIMITAIIIVIIVVLLSLIAIGLLLYCKAKNTPVTLSKDQLSGINNIAFSK

SEQ ID NO: 8916 - protein, 574 aa, Artificial Sequence
  derived and/or modified protein sequence (wt) from HRSV__AHA83891.1__F0
MELLIHRSSAIFLTLAINALYLTSSQNITEEFYQSTCSAVSRGYLSALRTGWYTSVITIELSNIKETKCNGTDTKVKLIKQELDKYKNAVTELQLLMQNTPAANNRARREAPQYMNYTINATKNLNVSISKKRKRRFLGFLLGVGSAIASGIAVSKVLHLEGEVNKIKNALLSTNKAVVSLSNGVSVLTSKVLDLKNYINNQLLPIVNQQSCRISNIETVIEFQQKNSRLLEITREFSVNAGVTTPLSTYMLTNSELLSLINDMPITNDQKKLMSSNVQIVRQQSYSIMSIIKEEVLAYVVQLPIYGVIDTPCWKLHTSPLCTTNIKEGSNICLTRTDRGWYCDNAGSVSFFPQADTCKVQSNRVFCDTMNSLTLPSEVSLCNTDIFNSKYDCKIMTSKTDISSSVITSLGAIVSCYGKTKCTASNKNRGIIKTFSNGCDYVSNKGVDTVSVGNTLYYVNKLEGKNLYVKGEPIINYYDPLVFPSDEFDASISQVNEKINQSLAFIRRSDELLHNVNTGKSTTNIMITAIIIVIIVVLLSLIAIGLLLYCKAKNTPVTLSKDQLSGINNIAFSK

SEQ ID NO: 8917 - protein, 574 aa, Artificial Sequence
  derived and/or modified protein sequence (wt) from HRSV__AHA83880.1__F0
MDLPILKINAITAILAAVSLCFASSQNITEEFYQSTCSAVSKGYLSALRTGWYTSVITIELSNIKENKCNGTDAKVKLIKQELDKYKNAVTELQLLMQSTPAANNRARRELPRFMNYTLNNTKNNNVTLSKKRKRRFLGFLLGVGSAIASGIAVSKVLHLEGEVNKIKSALLSTNKAVVSLSNGVSVLTSKVLDLKNYIDKQLLPIVNKQSCSISNIETVIEFQQKNNRLLEITREFSVNAGVTTPVSTYMLTNSELLSLINDMPITNDQKKLMSNNVQIVRQQSYSIMSIIKEEVLAYVVQLPLYGVIDTPCWKLHTSPLCTTNTKEGSNICLTRTDRGWYCDNAGSVSFFPQAETCKVQSNRVFCDTMNSLTLPSEVNLCNIDIFNPKYDCKIMTSKTDVSSSVITSLGAIVSCYGKTKCTASNKNRGIIKTFSNGCDYVSNKGVDTVSVGNTLYYVNKQEGKSLYVKGEPIINFYDPLVFPSDEFDASISQVNEKINQSLAFIRKSDELLHNVNVGKSTTNIMITTIIIVIIVILLLLIAVGLFLYCKARSTPVTLSKDQLSGINNIAFSN

SEQ ID NO: 8918 - protein, 574 aa, Artificial Sequence
  derived and/or modified protein sequence (wt) from HRSV__AHA83782.1__F0
MDLPILKTNAITAILAAVSLCFASSQNITEEFYQSTCSAVSKGYLSALRTGWYTSVITIELSNIKENKCNGTDAKVKLIKQELDKYKNAVTELQLLMQSTPAANNRARRELPRFMNYTLNNTKNNNITLSKKRKRRFLGFLLGVGSAIASGIAVSKVLHLEGEVNKIKSALLSTNKAVVSLSNGVSVLTSKVLDLKNYIDKQLLPIVNKQSCSISNIETVIEFQQKNNRLLEITREFSVNAGVTTPVSTYMLTNSELLSLINDMPITNDQKKLMSNNVQIVRQQSYSIMSIIKEEVLAYVVQLPLYGVIDTPCWKLHTSPLCTTNTKEGSNICLTRTDRGWYCDNAGSVSFFPQAETCKVQSNRVFCDTMNSLTLPSEVNLCNIDIFNPKYDCKIMTSKTDVSSSVITSLGAIVSCYGKTKCTASNKNRGIIKTFSNGCDYVSNKGVDTVSVGNTLYYVNKQEGKSLYVKGEPIINFYDPLVFPSDEFDASISQVNEKINQSLAFIRKSDELLHNVNVGKSTTNIMITTIIIVIIVILLLLIAVGLFLYCKARSTPVTLSKDQLSGINNIAFSN

SEQ ID NO: 8919 - protein, 574 aa, Artificial Sequence
  derived and/or modified protein sequence (wt) from HRSV__AHA83760.1__F0
MELPIINTNAITTILAAVTLCFASSQNITEEFYQSTCSAVSKGYLSALRTGWYTSVITIELSNIKENKCNGTDAKVKLIKQELDKYKNAVTELQLLMQSTPAANSRARRELPRFMNYTLNNTKNTNVTLSKKRKRRFLGFLLGVGSAIASGIAVSKVLHLEGEVNKIKSALLSTNKAVVSLSNGVSVLTSKVLDLKNYMDKQLLPIVNKQSCSISNIETVIEFQQKNNRLLEITREFSVNAGVTTPVSTYMLTNNELLSLINDMPITNDQKKLMSNNVQIVRQQSYSIMSIIKEEVLAYVVQLPLYGVIDTPCWKLHTSPLCTTNTKEGSNICLTRTDRGWYCDNAGSVSFFPQAETCKVQSNRVFCDTMNSLTLPSEVNLCNIDIFNPKYDCKIMTSKTDVSSSVITSLGAIVSCYGKTKCTASNKNRGIIKTFSNGCDYVSNKGVDTVSVGNTLYYVNKQEGKSLYVKGEPIINFYDPLVFPSDEFDASISQVNEKINQSLAFIRKSDELLHNVNAGKSTTNIMITTIIIVIIVILLSLIAVGLLLYCKARSTPVTLSKDQLSGINNIAFSN

SEQ ID NO: 8920 - protein, 574 aa, Artificial Sequence
  derived and/or modified protein sequence (wt) from HRSV__AHA83694.1__F0
MELPILKTNAITTILAAVTLCFASSQNITEEFYQSTCSAVSKGYLSALRTGWYTSVITIELSNIKENKCNGTDAKVKLIKQELDKYKNAVTELQLLMQSTPAANNRARRELPRFMNYTLNNTKNNNVTLSKKRKRRFLGFLLGVGSAIASGIAVSKVLHLEGEVNKIKSALLSTNKAVVSLSNGVSVLTSKVLDLKNYIDKQLLPIVNKQSCSISNIETVIEFQQKNNRLLEITREFSVNAGVTTPVSTYMLTNSELLSLINDMPITNDQKKLMSNNVQIVRQQSYSIMSIIKEEVLAYVVQLPLYGVIDTPCWKLHTSPLCTTNTKEGSNICLTRTDRGWYCDNAGSVSFFPQAETCKVQSNRVFCDTMNSLTLPSDVNLCNIDIFNPKYDCKIMTSKTDVSSSVITSLGAIVSCYGKTKCTASNKNRGIIKTFSNGCDYVSNKGVDTVSVGNTLYYVNKQEGKSLYVKGEPIINFYDPLVFPSDEFDASISQVNEKINQSLAFIRKSDELLHNVNVGKSTTNIMITTIIIVIIVILLLLIAVGLFLYCKARSTPVTLSKDQLSGINNIAFSN

SEQ ID NO: 8921 - protein, 574 aa, Artificial Sequence
  derived and/or modified protein sequence (wt) from HRSV__AGT75357.1__F0
MELLIHRSSAIFLTLAINALYLTSSQNITEEFYQSTCSAVSRGYLSALRTGWYTSVITIELSNIKETKCNGTDTKVKLIKQELDKYKNAVTELQLLMQNTPAANNRARREAPQYMNYTINTTKNLNVSISKKRKRRFLGFLLGVGSAIASGIAVSKVLHLEGEVNKIKNALLSTNKAVVSLSNGVSVLTSKVLDLKNYINNQLLPIVNQQSCRISNIETVIEFQQKNSRLLEITREFSVNAGVTIPLSTYMLTNSELLSLINDMPITNDQKKLMSSNVQIVRQQSYSIMSIIKEEVLAYVVQLPIYGVIDTPCWKLHTSPLCTTNIKEGSNICLTRTDRGWYCDNAGSVSFFPQADTCKVQSNRVFCDTMNSLTLPSEVSLCNTDIFNSKYDCKIMTSKTDISSSVITSLGAIVSCYGKTKCTASNKNRGIIKTFSNGCDYVSNKGVDTVSVGNTLYYVNKLEGKNLYVKGEPIINYYDPLVFPSDEFDASISQVNEKINQSLAFIRRSDELLHNVNTGKSTTNIMITVIIIVIIVVLLSLIAIGLLLYCKAKNTPVTLSKDQLSGINNIAFSK

SEQ ID NO: 8922 - protein, 574 aa, Artificial Sequence
  derived and/or modified protein sequence (wt) from HRSV__AGN92848.1__F0
MELPILKTNAITTILAAVTLCFASSQNITEEFYQSTCSAVSKGYLSALRTGWYTSVITIELSNIKENKCNGTDAKVKLIKQELDKYKNAVTELQLLMQSTPAANSRARRELPRFMNYTINNTKNTNVTLSKKRKRRFLGFLLGVGSAIASGIAVSKVLHLEGEVNKIKSALLSTNKAVVSLSNGVSVLTSKVLDLKNYIDKQLLPIVNKQSCSISNIETVIEFQQKNNRLLEITREFSVNAGVTTPVSTYMLTNSELLSLINDMPITNDQKKLMSSNVQIVRQQSYSIMSIIKEEVLAYVVQLPLYGVIDTPCWKLHTSPLCTTNTKEGSNICLTRTDRGWYCDNAGSVSFFPQAETCKVQSNRVFCDTMNSLTLPSEVNLCNIDIFNPKYDCKIMTSKTDVSSSVITSLGAIVSCYGKTKCTASNKNRGIIKTFSNGCDYVSNKGVDTVSVGNTLYYVNKQEGKSLYVKGEPIINFYDPLLFPSDEFDASISQVNEKINQSLAFIRKSDELLHNVNAGKSTTNIMITTIIIVIIVILLALIAVGLLLYCKARSTPVTLSKDQLSGINNIAFSN

SEQ ID NO: 8923 - protein, 574 aa, Artificial Sequence
  derived and/or modified protein sequence (wt) from HRSV__AGN28792.1__F0
MELLIHRSSAIFLTLAINALYLTSSQNITEEFYQSTCSAVSRGYFSALRTGWYTSVITIELSNIKETKCNGTDTKVKLIKQELDKYKNAVTELQLLMQNTPAANNRARREAPQYMNYTINTTKNLNVSISKKRKRRFLGFLLGVGSAIASGMAVSKVLHLEGEVNKIKNALLSTNKAVVSLSNGVSVLTSKVLDLKNYINNQLLPIVNQQSCRISNIETVIEFQQKNSRLLEITREFSVNAGVTTPLSTYMLTNSELLSLINDMPITNDQKKLMSSNVQIVRQQSYSIMSIIKEEVLAYVVQLPIYGVIDTPCWKLHTSPLCTTNIKEGSNICLTRTDRGWYCDNAGSVSFFPQADTCKVQSNRVFCDTMNSLTLPSEVSLCNTDIFNSKYDCKIMTSKTDISSSVITSLGAIVSCYGKTKCTASNKNRGIIKTFSNGCDYVSNKGVDTVSVGNTLYYVNKLEGKNLYVKGEPIINYYDPLVFPSDEFDASISQVNEKINQSLAFIRRSDELLHNVNTGKSTTNIMITAIIIVIIVVLLSLIAIGLLLYCKAKNTPVTLSKDQLSGINNIAFSK

SEQ ID NO: 8924 - protein, 574 aa, Artificial Sequence
  derived and/or modified protein sequence (wt) from HRSV__AGN28781.1__F0
MELLIHRSSAIFLTLAINALYLTSSQNITEEFYQSTCSAVSRGYFSALRTGWYTSVITIELSNIKEIKCNGTDTKVKLIKQELDKYKNAVTELQLLMQNTPAANNRARREAPQYMNYTINTTKNLNVSISKKRKRRFLGFLLGVGSAIASGIAVSKVLHLEGEVNKIKNALLSTNKAVVSLSNGVSVLTSKVLDLKNYINNQLLPIVNQQSCRISNIETVIEFQQKNSRLLEITREFSVNAGVTTPLSTYMLTNSELLSLINDMPITNDQKKLMSSNVQIVRQQSYSIMSIIKEEVLAYVVQLPIYGVIDTPCWKLHTSPLCTTNIKEGSNICLTRTDRGWYCDNAGSVSFFPQADTCKVQSNRVFCDTMNSLTLPSEVSLCNTDIFNSKYDCKIMTSKTDISSSVITSLGAIVSCYGKTKCTASNKNRGIIKTFSNGCDYVSNKGVDTVSVGNTLYYVNKLEGKNLYVKGEPIINYYDPLVFPSDEFDASISQVNEKINQSLAFIRRSDELLHNVNTGKSTTNIMITVIIIVIIVVLLSLIAIGLLLYCKAKNTPVTLSKDQLSGINNIAFSK

SEQ ID NO: 8925 - protein, 574 aa, Artificial Sequence
  derived and/or modified protein sequence (wt) from HRSV__AGN28759.1__F0
MELLIHRSSAIFLTLAINALYLTSSQNITEEFYQSTCSAVSRGYFSALRTGWYTSVITIELSNIKETKCNGTDTKVKLIKQELDKYKNAVTELQLLMQNIPAANNRARREAPQYMNYTINTTKNLNVSISKKRKRRFLGFLLGVGSAIASGIAVSKVLHLEGEVNKIKNALLSTNKAVVSLSNGVSVLTSKVLDLKNYINNQLLPIVNQQSCRISNIETVIEFQQKNSRLLEITREFSVNAGVTTPLSTYMLTNSELLSLINDMPITNDQKKLMSSNVQIVRQQSYSIMSIIKEEVLAYVVQLPIYGVIDTPCWKLHTSPLCTTNIKEGSNICLTRTDRGWYCDNAGSVSFFPQADTCKVQSNRVFCDTMNSLTLPSEVSLCNTDIFNSKYDCKIMTSKTDISSSVITSLGAIVSCYGKTKCTASNKNRGIIKTFSNGCDYVSNKGVDTVSVGNTLYYVNKLEGKNLYVKGEPIINYYDPLVFPSDEFDASISQVNEKINQSLAFIRRSDELLHNVNTGKSTTNIMITAIIIVIIVVLLSLIAIGLLLYCKAKNTPVTLSKDQLSGINNIAFSK

SEQ ID NO: 8926 - protein, 574 aa, Artificial Sequence
  derived and/or modified protein sequence (wt) from HRSV__AGN28748.1__F0
MELLIHRSSAIFLTLAINALYLTSSQNITEEFYQSTCSAVSRGYFSALRTGWYTSVITIELSNIKETKCNGTDTKVKLIKQELDKYKNAVTELQLLMQNTPAANNRARREAPQYMNYTINTTKNLNVSISKKRKRRFLGFLLGVGSAIASGIAVSKVLHLEGEVNKIKNALLSTNKAVVSLSNGVSVLTSKVLDLKNYINNQLLPIVNQQSCRISNIETVIEFQQKNSRLLEITREFSVNAGVTTPLSTYMLTNSELLSLINDMPITNDQKKLMSSNVQIVRQQSYSIMSIIKEEVLAYVVQLPIYGVIDTPCWKLHTSPLCTTNIKEGSNICLTRTDRGWYCDNAGSVSFFPQADTCKVQSNRVFCDTMNSLTLPSEVSLCNTDIFNSKYDCKIMTSKTDISSSVITSLGAIVSCYGKTKCTASNKNRGIIKTFSNGCDYVSNKGVDTVSVGNTLYYVNKLEGKNLYVKGEPIINYYDPLVFPSDEFDASISQVNEKINQSLAFIRRSDELLHNINTGKSTTNIMITAIIIVIIVVLLSLIAIGLLLYCKAKNTPVTLSKDQLSGINNIAFSK

SEQ ID NO: 8927 - protein, 574 aa, Artificial Sequence
  derived and/or modified protein sequence (wt) from HRSV__AGN28693.1__F0
MELLIHRSSAILLTLAINALYLTSSQNITEEFYQSTCSAVSRGYFSALRTGWYTSVITIELSNIKETKCNGTDTKVKLIKQELDKYKNAVTELQLLMQNTPAANNRARREAPQYMNYTINTTKKLNVSISKKRKRRFLGFLLGVGSAIASGIAVSKVLHLEGEVNKIKNALLSTNKAVVSLSNGVSVLTSKVLDLKNYINNQLLPIVNQQSCRISNIETVIEFQQKNSRLLEITREFSVNAGVTTPLSTYMLTNSELLSLINDMPITNDQKKLMSSNVQIVRQQSYSIMSIIKEEVLAYVVQLPIYGVIDTPCWKLHTSPLCTTNIKEGSNICLTRTDRGWYCDNAGSVSFFPQADTCKVQSNRVFCDTMNSLTLPSEVSLCNTDIFNSKYDCKIMTSKTDISSSVITSLGAIVSCYGKTKCTASNKNRGIIKTFSNGCDYVSNKGVDTVSVGNTLYYVNKLEGKNLYVKGEPIINYYDPLVFPSDEFDASISQVNEKINQSLAFIRRSDELLHNVNTGKSTTNIMITAIIIVIIVVLLSLIAIGLLLYCKAKNTPVTLSKDQLSGINNIAFSK

SEQ ID NO: 8928 - protein, 574 aa, Artificial Sequence
  derived and/or modified protein sequence (wt) from HRSV__AGN28638.1__F0
MELLIHRSSAIFLTLAINALYLTSSQNITEEFYQSTCSAVSRGYLSALRTGWYTSVITIELSNIKETKCNGTDTKVKLIKQELDKYKNAVTELQLLMQNTPAANNRARREAPQYMNYTINTTKNLNVSISKKRKRRFLGFLLGVGSAIASGIAVSKVLHLEGEVNKIKNALLSTNKAVVSLSNGVSVLTSKVLDLKNYINNQLLPIVNQQSCRISNIETVIEFQQKNSRLLEITREFSVNAGVTTPLSTYMLTNSELLSLINDMPITNDQKKLMSSNVQIVRQQSYSIMSIIKEEVLAYVVQLPIYGVIDTPCWKLHTSPLCTTNIKEGSNICLTRTDRGWYCDNAGSVSFFPQADTCKVQSNRVFCDTMNSLTLPSEVSLCNTDIFNSKYDCKIMTSKTDISSSVITSLGAIVSCYGKTKCTASNKNRGIIKTFSNGCDYVSNKGVDTVSVGNTLYYVNKLEGKNLYVKGEPIINYYDPLVFPSDEFDASISQVNEKINQSLAFIRRSDELLHNVNAGKSTTNIMITAIIIVIIVVLLSLIAIGLLLYCKAQNTPVTLSKDQLSGINNIAFSK

SEQ ID NO: 8929 - protein, 574 aa, Artificial Sequence
  derived and/or modified protein sequence (wt) from HRSV__AGN28627.1__F0
MELLIHRSSAIFLTLAINALYLTSSQNITEEFYQSTCSAVSRGYLSALRTGWYTSVITIELSNIKETKCNGTDTKVKLIKQELDKYKNAVTELQLLMQNTPAANNRARREAPQYMNYTINTTKNLNVSISKKRKRRFLGFLLGVGSAIASGIAVSKVLHLEGEVNKIKNALLSTNKAVVSLSNGVSVLTSKVLDLKNYINNQLLPIVNQQSCRISNIETVIEFQQKNSRLLEITREFSVNAGVTTPLSTYMLTNSELLSLINDMPITNDQKKLMSSNVQIVRQQSYSIMSIIKEEVLAYVVQLPIYGVIDTPCWKLHTSPLCTTNIREGSNICLTRTDRGWYCDNAGSVSFFPQADTCKVQSNRVFCDTMNSLTLPSEVSLCNTDIFNSKYDCKIMTSKTDISSSVITSLGAIVSCYGKTKCTASNKNRGIIKTFSNGCDYVSNKGVDTVSVGNTLYYVNKLEGKNLYVKGEPIINYYDPLVFPSDEFDASISQVNEKINQSLAFIRRSDELLHNVNTGKSTTNIMITVIIIVIIVVLLSLIAIGLLLYCKAKNTPVTLSKDQLSGINNIAFSK

SEQ ID NO: 8930 - protein, 574 aa, Artificial Sequence
  derived and/or modified protein sequence (wt) from HRSV__AGN28539.1__F0
MELLIHRSSAIFLTLAINALYITSSQNITEEFYQSTCSAVSRGYLSALRTGWYTSVITIELSNIKETKCNGTDTKVKLIKQELDKYKNAVTELQLLMQNTPAVNNRARREAPQYMNYTINTTKNPNVSISKKRKRRFLGFLLGVGSAIASGIAVSKVLHLEGEVNKIKNALLSTNKAVVSLSNGVSVLTSKVLDLKNYINNQLLPIVNQQSCRISNIETVIEFQQKNSRLLEITREFSVNAGVTTPLSTYMLTNSELLSLINDMPITNDQKKLMSSNVQIVRQQSYSIMSIIKEEVLAYVVQLPIYGVIDTPCWKLHTSPLCTTNIKEGSNICLTRTDRGWYCDNAGSVSFFPQADTCKVQSNRVFCDTMNSLTLPSEVSLCNTDIFNSKYDCKIMTSKTDISSSVITSLGAIVSCYGKTKCTASNKNRGIIKTFSNGCDYVSNKGVDTVSVGNTLYYVNKLEGKNLYVKGEPIINYYDPLVFPSDEFDASISQVNEKINQSLAFIRRSDELLHNVNTGKSTTNIMITAIIIVIIVVLLSLIAIGLLLYCKAKNTPVTLSKDQLSGINNIAFSK

SEQ ID NO: 8931 - protein, 574 aa, Artificial Sequence
  derived and/or modified protein sequence (wt) from HRSV__AGN28528.1__F0
MELLIHRSSAIFLTLAINALYLTSSQNITEEFYQSTCSAVSRGYLSALRTGWYTSVITIELSNIKETKCNGTDTKVKLIKQELDKYKNAVTELQLLMQNTPAANNRARREASQYMNYTINTTKNLNVSISKKRKRRFLGFLLGVGSAIASGIAVSKVLHLEGEVNKIKNALLSTNKAVVSLSNGVSVLTSKVLDLKNYINNQLLPIVNQQSCRISNIETVIEFQQKNSRLLEITREFSVNAGVTTPLSTYMLTNSELLSLINDMPITNDQKKLMSSNVQIVRQQSYSIMSIIKEEVLAYVVQLPIYGVIDTPCWKLHTSPLCTTNIKEGSNICLTRTDRGWYCDNAGSVSFFPQADTCKVQSNRVFCDTMNSLTLPSEVSLCNTDIFNSKYDCKIMTSKTDISSSVITSLGAIVSCYGKTKCTASNKNRGIIKTFSNGCDYVSNKGVDTVSVGNTLYYVNKLEGKNLYVKGEPIINYYDPLVFPSDEFDASISQVNEKINQSLAFIRRSDELLHNVNTGKSTTNIMITAIIIVIIVVLLSLIAIGLLLYCKAKNTPVTLSKDQLSGINNIAFSK

SEQ ID NO: 8932 - protein, 574 aa, Artificial Sequence
  derived and/or modified protein sequence (wt) from HRSV__AGN28462.1__F0
MELLIHRSSAIFLTLAINALYLTSSQNITEEFYQSTCSAVSRGYLSALRTGWYTSVITIELSNIKETKCNGTDTKVKLIKQELDKYKNAVTELQLLMQNTPAANNRARREAPQYMNYTINTTKNLNVSISKKRKRRFLGFLLGVGSAIASGIAVSKVLHLEGEVNKIKNALLSTNKAVVSLSNGVSVLTSKVLDLKNYINNQLLPIVNQQSCRISNIETVIEFQQKNSRLLEITREFSVNAGVTTPLSTYMLTNSELLSLINDMPITNDQKKLMSSNVQIVRQQSYSIMSIMKEEVLAYVVQLPIYGVIDTPCWKLHTSPLCTTNIKEGSNICLTRTDRGWYCDNAGSVSFFPQADTCKVQSNRVFCDTMNSLTLPSEVSLCNTDIFNSKYDCKIMTSKTDISSSVITSLGAIVSCYGKTKCTASNKNRGIIKTFSNGCDYVSNKGVDTVSVGNTLYYVNKLEGKNLYVKGEPIINYYDPLVFPSDEFDASISQVNEKINQSLAFIRRSDELLHNVNTGKSTTNIMITVIIIVIIVVLLSLIAIGLLLYCKAKNTPVTLSKDQLSGINNIAFSK

SEQ ID NO: 8933 - protein, 574 aa, Artificial Sequence
  derived and/or modified protein sequence (wt) from HRSV__AGL96787.1__F0
MEVPILKTNAITTILTAVTLCFASSQNITEEFYQSTCSAVSKGYLSALRTGWYTSVITIELSNIKENKCNGTDAKVKLIKQELDKYKNAVTELQLLMQSTPAANSRARRELPRFMNYTLNNTKNTNVTLSKKRKRRFLGFLLGVGSAIASGIAVSKVLHLEGEVNKIKSALLSTNKAVVSLSNGVSVLTSKVLDLKNYIDKQLLPIVNKQSCSISNIETVIEFQQKNNRLLEITREFSVNAGVTTPVSTYMLTNSELLSLINDMPITNDQKKLMSSNVQIVRQQSYSIMSIIKEEVLAYVVQLPLYGVIDTPCWKLHTSPLCTTNTKEGSNICLTRTDRGWYCDNAGSVSFFPQAETCKVQSNRVFCDTMNSLTLPSEVNLCNIDIFNPKYDCKIMTSKTDVSSSVITSLGAIVSCYGKTKCTASNKNRGIIKTFSNGCDYVSNKGVDTVSVGNTLYYVNKQEGKSLYVKGEPIINFYDPLVFPSDEFDASISQVNEKINQSLAFIRKSDELLHNVNAGKSTANIMITTIIIVIIVILLALIAVGLLLYCKARSTPVTLSKDQLSGINNIAFSN

SEQ ID NO: 8934 - protein, 574 aa, Artificial Sequence
  derived and/or modified protein sequence (wt) from HRSV__AGL96786.1__F0
MELPILKTNAITTILAAVTLCFASSQNITEEFYQSTCSAVSKGYLSALRTGWYTSVITIELSNIKENKCNGTDAKVKLIKQELDKYKNAVTELQLLMQSTPAANSRARRELPRFMNYTLNNTKNTNVTLSKKRKRRFLGFLLGVGSAIASGIAVSKVLHLEGEVNKIKSALLSTNKAVVSLSNGVSVLTSKVLDLKNYIDKQLLPIVNKQSCSISNIETVIEFQQKNNRLLEITREFSVNAGVTTPVSTYMLTNSELLSLINDMPITNDQKKLMSSNVQIVRQQSYSIMSIIKEEVLAYVVQLPLYGVIDTPCWKLHTSPLCTTNTKEGSNICLTRTDRGWYCDNAGSVSFFPQAETCKVQSNRVFCDTMNSLTLPSEVNLCNIDIFNPKYDCKIMTSKTDVSSSVITSLGAIVSCYGKTKCTASNKNRGIIKTFSNGCDYVSNKGVDTVSVGNTLYYVNKQEGKSLYVKGEPIINFYDPLVFPSDEFDASISQVNEKINQSLAFIRKTDELLHNVNAGKSTTNIMITTIIIVIIVILLALIAVGLLLYCKARSTPVTLSKDQLSGINNIAFSN

SEQ ID NO: 8935 - protein, 574 aa, Artificial Sequence
  derived and/or modified protein sequence (wt) from HRSV__AGL96784.1__F0
MELPILKTNAITAILAAVSLCFASSQNITEEFYQSTCSAVSKGYLSALRTGWYTSVITIELSNIKENKCNGTDAKVKLIKQELDKYKNAVTELQLLMQSTPAANNRARRELPRFMNYTLNNTKNNNVTLSKKRKRRFLGFLLGVGSAIASGIAVSKVLHLEGEVNKIKSALLSTNKAVVSLSNGVSVLTSKVLDLKNYIDKQLLPIVNKQSCSISNIETVIEFQQKNNRLLEITREFSVNAGVTTPVSTYMLTNSELLSLINDMPITNDQKKLMSNNVQIVRQQSYSIMSIIKEEVLAYVVQLPLYGVIDTPCWKLHTSPLCTTNTKEGSNICLTRTDRGWYCDNAGSVSFFPQTETCKVQSNRVFCDTMNSLTLPSEVNLCNIDIFNPKYDCKIMTSKTDVSSSVITSLGAIVSCYGKTKCTASNKNRGIIKTFSNGCDYVSNKGVDTVSVGNTLYYVNKQEGKSLYVKGEPIINFYDPLVFPSDEFDASISQVNEKINQSLAFIRKSDELLHNVNVGKSTTNIMITTIIIVIIVILLLLIAVGLFLYCRARSTPVTLSKDQLSGINNIAFSN

SEQ ID NO: 8936 - protein, 571 aa, Artificial Sequence
  derived and/or modified protein sequence (wt) from HRSV__AHG54517.1__F0
MELLIHRSSAIFLTLAINALYLTSSQNITEEFYQSTCSAVSKGYLSALRTGWYTSVITIELSNIKENKCNGTDAKVKLIKQELDKYKNAVTELQLLMQSTPAANSRARRELPRFMNYTLNNTKNTNVTLSKKRKRRFLGFLLGVGSAIASGIAVSKVLHLEGEVNKIKSALLSTNKAVVSLSNGVSVLTSKVLDLKNYIDKQLLPIVNKQSCSISNIETVIEFQQKNNRLLEITREFSVNAGVTTPVSTYMLTNSELLSLINDMPITNDQKKLMSSNVQIVRQQSYSIMSIIKEEVLAYVVQLPLYGVIDTPCWKLHTSPLCTTNTKEGSNICLTRTDRGWYCDNAGSVSFFPQAETCKVQSNRVFCDTMNSLTLPSEVNLCNIDIFNPKYDCKIMTSKTDVSSSVITSLGAIVSCYGKTKCTASNKNRGIIKTFSNGCDYVSNKGVDTVSVGNTLYYVNKQEGKSLYVKGEPIINFYDPLVFPSDEFDASISQVNEKINQSLAFIRKSDELLHNVNAGKSTTNIMITTIIIVIIVILLALIAVGLLLYCKARSTPVTLSKDQLSGVIAVS

SEQ ID NO: 8937 - protein, 574 aa, Artificial Sequence
  derived and/or modified protein sequence (wt) from HRSV(Memphis-37)__AIY60640.1__F0
MELPILKTNAITTILAAVTLCFASSQNITEEFYQSTCSAVSKGYLSALRTGWYTSVITIELSNIKENKCNGTDAKVKLIKQELDKYKNAVTELQLLMQSTPAANNRARRELPRFMNYTLNNTKNNNVTLSKKRKRRFLGFLLGVGSAIASGIAVSKVLHLEGEVNKIKNALLSTNKAVVSLSNGVSVLTSKVLDLKNYIDKQLLPIVNKQSCSISNIETVIEFQQKNNRLLEITREFSVNAGVTTPVSTYMLTNSELLSLINDMPITNDQKKLMSNNVQIVRQQSYSIMSIIKEEVLAYVVQLPLYGVIDTPCWKLHTSPLCTTNTKEGSNICLTRTDRGWYCDNAGSVSFFPQAETCKVQSNRVFCDTMNSLTLPSEVNLCNIDIFNPKYDCKIMTSKTDVSSSVITSLGAIVSCYGKTKCTASNKNRGIIKTFSNGCDYVSNKGVDTVSVGNTLYYVNKQEGKSLYVKGEPIINFYDPLVFPSDEFDASISQVNEKINQSLAFIRKSDELLHNVNVGKSTTNIMITTIIIVIIVILLLLIAVGLFLYCKARSTPVTLSKDQLSGINNIAFSN

SEQ ID NO: 8938 - protein, 574 aa, Artificial Sequence
  derived and/or modified protein sequence (wt) from HRSV__ABQ42594.1__F0
MELPILKANAITTILAAVTFCFASSQNITEEFYQSTCSAVSKGYLSALRTGWYTSVITIELSNIKENKCNGTDAKVKLMKQELDKYKNAVTELQLLMQSTPAANNRARRELPRFMNYTLNNTKKTNVTLSKKRKRRFLGFLLGVGSAIASGIAVSKVLHLEGEVNKIKSALLSTNKAVVSLSNGVSVLTSKVLDLKNYIDKQLLPIVNKQSCRISNIETVIEFQQKNNRLLEITREFSVNVGVTTPVSTYMLTNSELLSLINDMPITNDQKKLMSNNVQIVRQQSYSIMSIIKEEVLAYVVQLPLYGVIDTPCWKLHTSPLCTTNTKEGSNICLTRTDRGWYCDNAGSVSFFPQAETCKVQSNRVFCDTMNSLTLPSEVNLCNVDIFNPKYDCKIMTSKTDVSSSVITSLGAIVSCYGKTKCTASNKNRGIIKTFSNGCDYVSNKGVDTVSVGNTLYYVNKQEGKSLYVKGEPIINFYDPLVFPSDEFDASISQVNEKINQSLAFIRKSDELLHNVNAGKSTTNIMITTIIIVIIVILLSLIAVGLLLYCKARSTPVTLSKDQLSGINNIAFSN

SEQ ID NO: 8939 - protein, 574 aa, Artificial Sequence
  derived and/or modified protein sequence (wt) from HRSV__ACO83297.1__F0
MELPILKANAITTILAAVTFCFASSQNITEEFYQSTCSAVSKGYLSALRTGWYTSVITIELSNIKKNKCNGTDAKVKLMKQELDKYKNAVTELQLLMQSTPAANNRARRELPRFMNYTLNNTKKTNVTLSKKRKRRFLGFLLGVGSAIASGIAVSKVLHLEGEVNKIKSALLSTNKAVVSLSNGVSVLTSRVLDLKNYIDKQLLPIVNKQSCRISNIETVIEFQQKNNRLLEITREFSVNAGVTTPVSTYMLTNSELLSLINDMPITNDQKKLMSNNVQIVRQQSYSIMSIIKEEVLAYVVQLPLYGVIDTPCWKLHTSPLCTTNTKEGSNICLTRTDRGWYCDNAGSVSFFPQAEKCKVQSNRVFCDTMYSLTLPSEVNLCNVDIFNPKYDCKIMTSKTDVSSSVITSLGAIVSCYGKTKCTASNKNRGIIKTFSNGCDYVSNKGVDTVSVGNTLYYVNKQEGKSLYVKGEPIINFYDPLVFPSDEFDASISQVNEKINQSLAFIRKSDELLHNVNAGKSTTNIMITTIIIVIIVILLSLIAVGLLLYCKARSTPITLSKDQLSGINNIAFSN

SEQ ID NO: 8940 - protein, 574 aa, Artificial Sequence
  derived and/or modified protein sequence (wt) from HRSV__ACO83301.1__F0
MELLILKANAITTILTAVTFCFASGQNITEEFYQSTCSAVSKGYLSALRTGWYTSVITIELSNIKKNKCNGTDAKIKLIKQELDKYKNAVTELQLLMQSTPATNNRARRELPRFMNYTLNNAKKTNVTLSKKRKRRFLGFLLGVGSAIASGVAVSKVLHLEGEVNKIKSALLSTNKAVVSLSNGVSVLTSKVLDLKNYIDKQLLPIVNKQSCSISNIETVIEFQQKNNRLLEITREFSVNAGVTTPVSTYMLTNSELLSLINDMPITNDQKKLMSNNVQIVRQQSYSIMSIIKEEVLAYVVQLPLYGVIDTPCWKLHTSPLCTTNTKEGSNICLTRTDRGWYCDNAGSVSFFPQAETCKVQSNRVFCDTMNSLTLPSEVNLCNVDIFNPKYDCKIMTSKTDVSSSVITSLGAIVSCYGKTKCTASNKNRGIIKTFSNGCDYVSNKGVDTVSVGNTLYYVNKQEGKSLYVKGEPIINFYDPLVFPSDEFDASISQVNEKINQSLAFIRKSDELLHNVNAVKSTTNIMITTIIIVIIVILLSLIAVGLLLYCKARSTPVTLSKDQLSGINNIAFSN

SEQ ID NO: 8941 - protein, 574 aa, Artificial Sequence
  derived and/or modified protein sequence (wt) from HRSV__ADZ95775.1__F0
MELLIHRSSAIFLTLAINALYLTSSQNITEEFYQSTCSAVSRGYFSALRTGWYTSVITIELSNIQETKCNGTDTKVKLIKQELDKYKNAVTELQLLMQNTPAVNNRARREAPQYMNHTINTTKNLNVSISKKRKRRFLGFLLGVGSAIASGIAVSKVLHLEGEVNKIKNALLSTNKAVVSLSNGVSVLTSKVLDLKNYINNQLLPIVNQQSCRISNIETVIEFQQKNSRLLEITREFSVNAGVTTPLSTYMLTNSELLSLINDMPITNDQKELMSSNVQIVRQQSYSIMSIIKEEVLAYVVQLPIYGVIDTPCWKLHTSPLCTTNIKEGSNICLTRTDRGWYCDNAGSVSFFPQADTCKVQSNRVFCDTMNSLTLPSEVSLCNTDIFNSKYDCKIMTSKTDISSSVITSLGAIVSCYGKTKCTASNKNRGIIKTFSNGCDYVSNKGVDTVSVGNTLYYVNKLEGKNLYVKGEPIINYYDPLVFPSDEFDASISQVNEKINQSLAFIRRSDELLHNVNTGKSTTNIMITAIIIVIIVVLLSLIAIGLLLYCKAKNTPVTLSKDQLSGINNIAFSK

SEQ ID NO: 8942 - protein, 574 aa, Artificial Sequence
  derived and/or modified protein sequence (wt) from HRSV__ADZ95779.1__F0
MELLIHRSSAIFLTLAINALYLTSSQNITEEFYQSTCSAVSRGYFSALRTGWYTSVITIELSNIKETKCNGTDTKVKLIKQELDKYKNAVTELQLLMQNTPAANNRARREAPQYMNYTINTTKNLNVSISKKRKRRFLGFLLGVGSAIASGIAVSKVLHLEGEVNKIKNALLSTNKAVVSLSNGVSVLTSKVLDLKNYINNQLLPIVNQQSCRISNIETVIEFQQKNSRLLEITREFSVNAGVTTPLSTYMLTNSELLSLINDMPITNDQKKLMLSNVQIVRQQSYSIMSIIKEEVLAYVVQLPIYGVIDTPCWKLHTSPLCTTNIKEGSNICLTRTDRGWYCDNAGSVSFFPQADTCKVQSNRVFCDTMNSLTLPSEVSLCNTDIFNSKYDCKIMTSKTDISSSVITSLGAIVSCYGKTKCTASNKNRGIIKTFSNGCDYVSNKGVDTVSVGNTLYYVNKLEGKNLYVKGEPIINYYDPLVFPSDEFDASISQVNEKINQSLAFIRRSDELLHNVNTGKSTTNIMITAIIIVIIVVLLSLIAIGLLLYCKAKNTPVTLSKDQLSGINNIAFSK

SEQ ID NO: 8943 - protein, 574 aa, Artificial Sequence
  derived and/or modified protein sequence (wt) from HRSV__AEQ63597.1__F0
MELLIHRSSAIFLTLAINALYLTSSQNITEEFYQSTCSAVSRGYLSALRTGWYTSVITIELSNIKETKCNGTDTKVKLIKQELDKYKNAVTELQLLMQNTPAVNNRARREAPQYMNYTINTTKNLNVSISKKRKRRFLGFLLGVGSAIASGIAVSKVLHLEGEVNKIKNALLSTNKAVVSLSNGVSVLTSKVLDLKNYINNQLLPIVNQQSCRISNIETVIEFQQKNSRLLEITREFSVNAGVTTPLSTYMLTNSELLSLINDMPITNDQKKLMSSNVQIVRQQSYSIMSIIKEEVLAYVVQLPIYGVIDTPCWKLHTSPLCTTNIKEGSNICLTRTDRGWYCDNAGSVSFFPQADTCKIQSNRVFCDTMNSLTLPSEVSLCNTDIFNSKYDCKIMTSKTDISSSVITSLGAIVSCYGKTKCTASNKNRGIIKTFSNGCDYVSNKGVDTVSVGNTLYYVNKLEGKNLYVKGEPIINYYDPLVFPSDEFDASISQVNEKINQSLAFIRRSDELLHNVNTGKSTTNIMITAIIIVIIVVLLSLIAIGLLLYCKAKNTPVTLSKDQLSGINNIAFSK

SEQ ID NO: 8944 - protein, 574 aa, Artificial Sequence
  derived and/or modified protein sequence (wt) from HRSV__AEQ63608.1__F0
MELLIHRSSAIFLTLAINALYLTSSQNITEEFYQSTCSAVSRGYLSALRTGWYTSVITIELSNIKETKCNGTDTKVKLIKQELDKYKNAVTELQLLMQNTPTANNRARREAPQYMNYTINTTKNLNVSISKKRKRRFLGFLLGVGSAIASGIAVSKVLHLEGEVNKIKNALLSTNKAVVSLSNGVSVLTSKVLDLKNYINNQLLPIVNQQSCRISNIETVIEFQQKNSRLLEITREFSVNAGVTTPLSTYMLTNSELLSLINDMPITNDQKKLMSSNVQIVRQQSYSIMSIIKEEVLAYVVQLPIYGVIDTPCWKLHTSPLCTTNIKEGSNICLTRTDRGWYCDNAGSVSFFPQADTCKVQSNRVFCDTMNSLTLPSEVSLCNTDIFNSKYDCKIMTSKTDISSSVITSLGAIVSCYGKTKCTASNKNRGIIKTFSNGCDYVSNKGVDTVSVGNTLYYVNKLEGKNLYVKGEPIINYYDPLVFPSDEFDASISQVNEKINQSLAFIRRSDELLHNVNTGKSTTNIMITAIIIVIIVVLLSLIAIGLLLYCKAKNTPVTLSKDQLSGINNIAFSK

SEQ ID NO: 8945 - protein, 574 aa, Artificial Sequence
  derived and/or modified protein sequence (wt) from HRSV__AEQ63630.1__F0
MELLIHRSSAIFLTLAINALYLTSSQNITEEFYQSTCSAVSRGYLSALRTGWYTSVITIELSNIKETKCNGTDTKVKLIKQELDKYKNAVTELQLLMQNTPAVNNRARREAPQYMNYTINTTKNLNVSISKKRKRRFLGFLLGVGSAIASGIAVSKVLHLEGEVNKIKNALLSTNKAVVSLSNGVSVLTSKVLDLKNYINNQLLPIVNQQSCRISNIETVIEFQQKNSRLLEITREFSVNARVTTPLSTYMLTNSELLSLINDMPITNDQKKLMSSNVQIVRQQSYSIMSIIKEEVLAYVVQLPIYGVIDTPCWKLHTSPLCTTNIKEGSNICLTRTDRGWYCDNAGSVSFFPQADTCKVQSNRVFCDTMNSLTLPSEVSLCNTDIFNSKYDCKIMTSKTDISSSVITSLGAIVSCYGKTKCTASNKNRGIIKTFSNGCDYVSNKGVDTVSVGNTLYYVNKLEGKNLYVKGEPIINYYDPLVFPSDEFDASISQVNEKINQSLAFIRRSDELLHNVNTGKSTTNIMITAIIIVIIVVLLSLIAIGLLLYCKAKNTPVTLSKDQLSGINNIAFSK

SEQ ID NO: 8946 - protein, 574 aa, Artificial Sequence
  derived and/or modified protein sequence (wt) from HRSV__AHE57683.1__F0
MDLPILKTNAITAILAAVLLCFASSQNITEEFYQSTCSAVSKGYLSALRTGWYTSVITIELSNIKENKCNGTDAKVKLIKQELDKYKNAVTELQLLMQSTPAANNRARRELPRFMNYTLNNTKNNNVTLSKKRKRRFLGFLLGVGSAIASGIAVSKVLHLEGEVNKIKSALLSTNKAVVSLSNGVSVLTSKVLDLKNYIDKQLLPIVNKQSCSISNIETVIEFQQKNNRLLEITREFSVNAGVTTPVSTYMLTNSELLSLINDMPITNDQKKLMSNNVQIVRQQSYSIMSIIKEEVLAYVVQLPLYGVIDTPCWKLHTSPLCTTNTKEGSNICLTRTDRGWYCDNAGSVSFFPQAETCKVQSNRVFCDTMNSLTLPSEVNLCNIDIFNPKYDCKIMTSKTDVSSSVITSLGAIVSCYGKTKCTASNKNRGIIKTFSNGCDYVSNKGVDTVSVGNTLYYVNKQEGKSLYVKGEPIINFYDPLVFPSDEFDASISQVNEKINQSLAFIRKSDELLHNVNVGKSTTNIMITTIIIVIIVILLLLIAVGLFLYCKARSTPVTLSKDQLSGINNIAFSN

SEQ ID NO: 8947 - protein, 574 aa, Artificial Sequence
  derived and/or modified protein sequence (wt) from HRSV__AHE57894.1__F0
MDLPILKTNAITAILAAVLLCFASSQNITEEFYQSTCSAVSKGYLSALRTGWYTSVITIELSNIKENKCNGTDAKVKLIKQELDKYKNAVTELQLLMQSTPAANNRARRELPRFMNYTLNNTKNNNVTLSKKRKRRFLGFLLGVGSAIASGIAVSKVLHLEGEVNKIKSALLSTNKAVVSLSNGVSVLTSKVLDLKNYIDKQLLPIVNKQSCSISNIETVIEFQQKNNRLLEITREFSVNAGVTTPVSTYMLTNSELLSLINDMPITIDQKKLMSNNVQIVRQQSYSIMSIIKEEVLAYVVQLPLYGVIDTPCWKLHTSPLCTTNTKEGSNICLTRTDRGWYCDNAGSVSFFPQAETCKVQSNRVFCDTMNSLTLPSEVNLCNIDIFNPKYDCKIMTSKTDVSSSVITSLGAIVSCYGKTKCTASNKNRGIIKTFSNGCDYVSNKGVDTVSVGNTLYYVNKQEGKSLYVKGEPIINFYDPLVFPSDEFDASISQVNEKINQSLAFIRKSDELLHNVNVGKSTTNIMITTIIIVIIVILLLLIAVGLFLYCKARSTPVTLSKDQLSGINNIAFSN

SEQ ID NO: 8948 - protein, 574 aa, Artificial Sequence
  derived and/or modified protein sequence (wt) from HRSV__AHW80511.1__F0
MELPILKTNAITTILAAVTLCFASSQNITEEFYQSTCSAVSKGYLSALRTGWYTSVITIELSTIKENKCNGTDAKVKLIKQELDKYKNAVTELQLLMQSTPAANNRARRELPRFMNYTLNNAKNTNVTLSKKRKRRFLGFLLGVGSAIASGIAVSKVLHLEGEVNKIKSALLSTNKAVVSLSNGVSVLTSKVLDLKNYIDKQLLPIVNKQSCSISNIETVIEFQQKNNRLLEITREFSVNAGVTTPVSTYMLTNSELLSLINDMPITNDQKKLMSNNVQIVRQQSYSIMSIIKEEVLAYVVQLPLYGVIDTPCWKLHTSPLCTTNTKEGSNICLTRTDRGWYCDNAGSVSFFPQAETCKVQSNRVFCDTMNSLTLPSEVNLCNIDIFNPKYDCKIMTSKTDVSSSVITSLGAIVSCYGKTKCTASNKNRGIIKTFSNGCDYVSNKGVDTVSVGNTLYYVNKQEGKSLYVKGEPIINFYDPLVFPSDEFDASISQVNEKINQSLAFIRKSDELLHNVNAGKSTTKIMITTIIIVIIVILLSLIAVGLLLYCKARSTPVTLSKDQLSGINNIAFSS

SEQ ID NO: 8949 - protein, 574 aa, Artificial Sequence
  derived and/or modified protein sequence (wt) from HRSV__AHW80560.1__F0
MELPILKTNAITTILAAVTLCFASSQNITEEFYQSTCSAVSKGYLSALRTGWYTSVITIELSNIKENKCNGTDAKVKLIKQELDKYKNAVTELQLLMQSTPASNNRARRELPRFMNYTLNNTKNNNVTLSKKRKRRFLGFLLGVGSAIASGIAVSKVLHLEGEVNKIKSALLSTNKAVVSLSNGVSVLTSKVLDLKNYIDKQLLPIVNKQSCSISNIETVIEFQQKNNRLLEITREFSVNAGVTTPVSTYMLTNSELLSLINDMPITNDQKKLMSNNVQIVRQQSYSIMSIIKEEVLAYVVQLPLYGVIDTPCWKLHTSPLCTTNTKEGSNICLTRTDRGWYCDNAGSVSFFPQAETCKVQSNRVFCDTMNSLTLPSEVNLCNIDIFNPKYDCKIMTSKTDVSSSVITSLGAIVSCYGKTKCTASNKNRGIIKTFSNGCDYVSNKGVDTVSVGNTLYYVNKQEGKSLYVKGEPIINFYDPLVFPSDEFDASISQVNEKINQSLAFIRKSDELLHNVNVGKSTTNIMITTIIIVIIVILLLLIAVGLFLYCKARSTPVTLSKDQLSGINNIAFSN

SEQ ID NO: 8950 - protein, 574 aa, Artificial Sequence
  derived and/or modified protein sequence (wt) from HRSV__AHW80660.1__F0
MDLPILKTNAITAILAAVSLCLASSQNITEEFYQSTCSAVSKGYLSALRTGWYTSVITIELSNIKENKCNGTDAKVKLIKQELDKYKNAVTELQLLMQSTPAANNRARRELPRFMNYTLNNTKNNNVTLSKKRKRRFLGFLLGVGSAIASGIAVSKVLHLEGEVNKIKSALLSTNKAVVSLSNGVSVLTSKVLDLKNYIDKQLLPIVNKQSCSISNIETVIEFQQKNNRLLEITREFSVNAGVTTPVSTYMLTNSELLSLINDMPITNDQKKLMSNNVQIVRQQSYSIMSIIKEEVLAYVVQLPLYGVIDTPCWKLHTSPLCTTNTKEGSNICLTRTDRGWYCDNAGSVSFFPQAETCKVQSNRVFCDTMNSLTLPSEVNLCNIDIFNPKYDCKIMTSKTDVSSSVITSLGAIVSCYGKTKCTASNKNRGIIKTFSNGCDYVSNKGVDTVSVGNTLYYVNKQEGKSLYVKGEPIINFYDPLVFPSDEFDASISQVNEKINQSLAFIRKSDELLHNVNVGKSTTNIMITTIIIVIIVILLLLIAVGLFLYCKARSTPVTLSKDQLSGINNIAFSN

SEQ ID NO: 8951 - protein, 574 aa, Artificial Sequence
  derived and/or modified protein sequence (wt) from HRSV__AHW80670.1__F0
MELPILKTNAITTILAAVTLCFASSQNITEEFYQSTCSAVSKGYLSALRTGWYTSVITIELSNIKENKCNGTDAKVKLIKQELDKYKNAVTELQLLMQSTPASNNRARRELPRFMNYTLNNTKNNNVTLSKKRKRRFLGFLLGVGSAIASGIAVSKVLHLEGEVNKIKSALLSTNKAVVSLSNGVSVLTSKVLDLKNYIDKQLLPIVNKQSCSISNIETVIEFQQKNNRLLEITREFSVNAGVTTPVSTYMLTNSELLSLINDMPITNDQKKLMSNNVQIVRQQSYSIMSIIKEEVLAYVVQLPLYGVIDTPCWKLHTSPLCTTNTKEGSNICLTRTDRGWYCDNAGSVSFFPQAETCKVQSNRVFCDTMNSLTLPSEVNLCNIDIFNPKYDCKIMTSKTDVSSSVITSLGAIVSCYGKTKCTASNKNRGIIKTFSNGCDYVSNKGVDTVSVGNTLYYVNKQEGKSLYVKGEPIINFYDPLVFPSDEFDASISQVNEKINQSLAFIRKSDELLHNVNVGKSTTNIMITTIIIVIIVILLLLIAVGLFLYCKARSTPITLSKDQLSGINNIAFSN

SEQ ID NO: 8952 - protein, 574 aa, Artificial Sequence
  derived and/or modified protein sequence (wt) from HRSV__AHW80760.1__F0
MELPILKTNAITTILAAVTLCFASSQNITEEFYQSTCSAVSKGYLSALRTGWYTSVITIELSNIKENKCNGTDAKVKLIKQELDKYKNAVTELQLLMQSTPASNNRARRELPRFMNYTLNNTKNNNVTLSKKRKRRFLGFLLGVGSAIASGIAVSKVLHLEGEVNKIKSALLSTNKAVVSLSNGVSVLTSKVLDLKNYIDKQLLPIVNKQSCSISNIETVIEFQQKNNRLLEITREFSVNAGVTTPVSTYMLTNSELLSLINDMPITNDQKKLMSNNVQIVRQQSYSIMSIIKEEVLAYVVQLPLYGVIDTPCWKLHTSPLCTTNTKEGSNICITRTDRGWYCDNAGSVSFFPQAETCKVQSNRVFCDTMNSLTLPSEVNLCNIDIFNPKYDCKIMTSKTDVSSSVITSLGAIVSCYGKTKCTASNKNRGIIKTFSNGCDYVSNKGVDTVSVGNTLYYVNKQEGKSLYVKGEPIINFYDPLVFPSDEFDASISQVNEKINQSLAFIRKSDELLHNVNVGKSTTNIMITTIIIVIIVILLLLIAVGLFLYCKARSTPVTLSKDQLSGINNIAFSN

SEQ ID NO: 8953 - protein, 574 aa, Artificial Sequence
  derived and/or modified protein sequence (wt) from HRSV__AHW80800.1__F0
MDLPILKTNAITTILAAVTLCIASSQNITEEFYQSTCSAVSKGYLSALRTGWYTSVITIELSNIKENKCNGTDAKVKLIKQELDKYKNAVTELQLLMQSTPAANNRARRELPRFMNYTLNNTKNNNVTLSKKRKRRFLGFLLGVGSAIASGIAVSKVLHLEGEVNKIKSALLSTNKAVVSLSNGVSVLTSKVLDLKNYIDKQLLPIVNKQSCSISNIETVIEFQQKNNRLLEITREFSVNAGVTTPVSTYMLTNSELLSLINDMPITNDQKKLMSNNVQIVRQQSYSIMSIIKEEVLAYVVQLPLYGVIDTPCWKLHTSPLCTTNTKEGSNICLTRTDRGWYCDNAGSVSFFPQAETCKVQSNRVFCDTMNSLTLPSEVNLCNIDIFNPKYDCKIMTSKTDVSSSVITSLGAIVSCYGKTKCTASNKNRGIIKTFSNGCDYVSNKGVDTVSVGNTLYYVNKQEGKSLYVKGEPIINFYDPLVFPSDEFDASISQVNEKINQSLAFIRKSDELLHNVNVGKSTTNIMITTIIIVIIVILLLLIAVGLFLYCKARSTPVTLSKDQLSGINNIAFSN

SEQ ID NO: 8954 - protein, 574 aa, Artificial Sequence
  derived and/or modified protein sequence (wt) from HRSV__AHW80860.1__F0
MELPILKTNAITTILAAVTLCFASSQNITEEFYQSTCSAVSKGYLSALRTGWYTSVITIELSNIKENKCNGTDAKVKLIKQELDKYKNAVTELQLLMQSTPAANNRARRELPRLMNYTLNNTKNNNVTLSKKRKRRFLGFLLGVGSAIASGIAVSKVLHLEGEVNKIKSALLSTNKAVVSLSNGVSVLTSKVLDLKNYIDKQLLPIVNKQSCSISNIETVIEFQQKNNRLLEITREFSVNAGVTTPVSTYMLTNSELLSLINDMPITNDQKKLMSNNVQIVRQQSYSIMSIIKEEVLAYVVQLPLYGVIDTPCWKLHTSPLCTTNTKEGSNICLTRTDRGWYCDNAGSVSFFPQAETCKVQSNRVFCDTMNSLTLPSEVNLCNIDIFNPKYDCKIMTSKTDVSSSVITSLGAIVSCYGKTKCTASNKNRGIIKTFSNGCDYVSNKGVDTVSVGNTLYYVNKQEGKSLYVKGEPIINFYDPLVFPSDEFDASISQVNEKINQSLAFIRKSDELLHNVNVGKSTTNIMITTIIIVIIVILLLLIAVGLFLYCKARSTPVTLSKDQLSGINNIAFSN

SEQ ID NO: 8955 - protein, 574 aa, Artificial Sequence
  derived and/or modified protein sequence (wt) from HRSV__AHW80990.1__F0
MELPILKTNAITTILAAVTLCFASSQNITEEFYQSTCSAVSKGYLSALRTGWYTSVITIELSNIKENKCNGTDAKVKLIKQELDKYKNAVTELQLLMQSTPAANNRARRELPRFMNYTLNNTKNTNVTLSKKRKRRFLGFLLGVGSAIASGIAVSKVLHLEGEVNKLKSALLSTNKAVVSLSNGVSVLTSKVLDLKNYIDKQLLPIVNKQSCSISNIETVIEFQQKNNRLLEITREFSVNAGVTTPVSTYMLTNSELLSLINDMPITNDQKKLMSNNVQIVRQQSYSIMSIIKEEVLAYVVQLPLYGVIDTPCWKLHTSPLCTTNTKEGSNICLTRTDRGWYCDNAGSVSFFPQAETCKVQSNRVFCDTMNSLTLPSEVNLCNIDIFNPKYDCKIMTSKTDVSSSVITSLGAIVSCYGKTKCTASNKNRGIIKTFSNGCDYVSNKGVDTVSVGNTLYYVNKQEGKSLYVKGEPIINFYDPLVFPSDEFDASISQVNEKINQSLAFIRKSDELLHNVNVGKSTTNIMITTIIIVIIVILLLLIAVGLFLYCKARSTPVTLSKDQLSGINNIAFSN

SEQ ID NO: 8956 - protein, 574 aa, Artificial Sequence
  derived and/or modified protein sequence (wt) from HRSV__AHW81370.1__F0
MELPILKTNAITTILAAVALCFASSQNITEEFYQSTCSAVSKGYLSALRTGWYTSVITIELSNIKENKCNGTDAKVKLIKQELDKYKNAVTELQLLMQSTPASNNRARRELPRFMNYTLNNTKNNNVTLSKKRKRRFLGFLLGVGSAIASGIAVSKVLHLEGEVNKIKSALLSTNKAVVSLSNGVSVLTSKVLDLKNYIDKQLLPIVNKQSCSISNIETVIEFQQKNNRLLEITREFSVNAGVTTPVSTYMLTNSELLSLINDMPITNDQKKLMSNNVQIVRQQSYSIMSIIKEEVLAYVVQLPLYGVIDTPCWKLHTSPLCTTNTKEGSNICLTRTDRGWYCDNAGSVSFFPQAETCKVQSNRVFCDTMNSLTLPSEVNLCNIDIFNPKYDCKIMTSKTDVSSSVITSLGAIVSCYGKTKCTASNKNRGIIKTFSNGCDYVSNKGVDTVSVGNTLYYVNKQEGKSLYVKGEPIINFYDPLVFPSDEFDASISQVNEKINQSLAFIRKSDELLHNVNVGKSTTNIMITTIIIVIIVILLLLIAVGLFLYCKARSTPVTLSKDQLSGINNIAFSN

SEQ ID NO: 8957 - protein, 574 aa, Artificial Sequence
  derived and/or modified protein sequence (wt) from HRSV__AHX22013.1__F0
MELPILKTNAITTILAAVTLCFASSQNITEEFYQSTCSAVSKGYLSALRTGWYTSVITIELSNIKENKCNGTDAKVKLIKQELDKYKNAVTELQLLMQSTPAANNRARRELPRFMNYTLNNTKNNNVTLSKKRKRRFIGFLLGVGSAIASGIAVSKVLHLEGEVNKIKNALLSTNKAVVSLSNGVSVLTSKVLDLKNYIDKQLLPIVNKQSCSISNIETVIEFQQKNNRLLEITREFSVNAGVTTPVSTYMLTNSELLSLINDMPITNDQKKLMSNNVQIVRQQSYSIMSIIKEEVLAYVVQLPLYGVIDTPCWKLHTSPLCTTNTKEGSNICLTRTDRGWYCDNAGSVSFFPQAETCKVQSNRVFCDTMNSLTLPSEVNLCNIDIFNPKYDCKIMTSKTDVSSSVITSLGAIVSCYGKTKCTASNKNRGIIKTFSNGCDYVSNKGVDTVSVGNTLYYVNKQEGKSLYVKGEPIINFYDPLVFPSDEFDASISQVNEKINQSLAFIRKSDELLHNVNVGKSTTNIMITTIIIVIIVILLLLIAVGLFLYCKARSTPVTLSKDQLSGINNIAFSN

SEQ ID NO: 8958 - protein, 574 aa, Artificial Sequence
  derived and/or modified protein sequence (wt) from HRSV__AIA62675.1__F0
MELPILKANAITTILAAVTLCFASSQNITEEFYQSTCSAVSKGYLSALRTGWYTSVITIELSNIKENKCNGTDAKVKLIKQELDKYKNAVTELQLLMQSTPAANNRARRELPRFMNYTLNNTKNNNVTLSKKRKRRFLGFFLGVGSAIASGIAVSKVLHLEGEVNKIKNALLSTNKAVVSLSNGVSVLTSKVLDLKNYIDKQLLPIVNKQSCSISNIETVIEFQQKNNRLLEITREFSVNAGVTTPVSTYMLTNSELLSLINDMPITNDQKKLMSNNVQIVRQQSYSIMSIIKEEVLAYVVQLPLYGVIDTPCWKLHTSPLCTTNTKEGSNICLTRTDRGWYCDNAGSVSFFPQAETCKVQSNRVFCDTMNSLTLPSEVNLCNIDIFNPKYDCKIMTSKTDVSSSVITSLGAIVSCYGKTKCTASNKNRGIIKTFSNGCDYVSNKGVDTVSVGNTLYYVNKQEGKSLYVKGEPIINFYDPLVFPSDEFDASISQVNEKINQSLAFIRKSDELLHNVNVGKSTTNIMITTIIIVIIVILLLLIAVGLFLYCKARSTPVTLSKDQLSGINNIAFSN

SEQ ID NO: 8959 - protein, 574 aa, Artificial Sequence
  derived and/or modified protein sequence (wt) from HRSV__AIA62685.1__F0
MELPILKTNAITTILAAVTLCFASSQNITEEFYQSTCSAVSKGYLSALRTGWYTSVITIELSNIKENKCNGTDAKVKLIKQELDKYKNAVTELQLLMQSTPAANNRARRELPRFMNYTLNNTKNNNVTLSKKRKRRFLGFFLGVGSAIASGIAVSKVLHLEGEVNKIKNALLSTNKAVVSLSNGVSVLTSKVLDLKNYIDKQLLPIVNKQSCSISNIETVIEFQQKNNRLLEITREFSVNAGVTTPVSTYMLTNSELLSLINDMPITNDQKKLMSNNVQIVRQQSYSIMSIIKEEVLAYVVQLPLYGVIDTPCWKLHTSPLCTTNTKEGSNICLTRTDRGWYCDNAGSVSFFPQAETCKVQSNRVFCDTMNSLTLPSEVNLCNIDIFNPKYDCKIMTSKTDVSSSVITSLGAIVSCYGKTKCTASNKNRGIIKTFSNGCDYVSNKGVDTVSVGNTLYYVNKQEGKSLYVKGEPIINFYDPLVFPSDEFDASISQVNEKINQSLAFIRKSDELLHNVNVGKSTTNIMITTIIIVIIVILLLLIAVGLFLYCKARSTPVTLSKDQLSGINNIAFSN

SEQ ID NO: 8960 - protein, 574 aa, Artificial Sequence
  derived and/or modified protein sequence (wt) from HRSV__AIA63044.1__F0
MELPILKTNAITTILAAVTLCFASSQNITEEFYQSTCSAVSKGYLSALRTGWYTSVITIELSNIKENKCNGTDAKVKLIKQELDKYKNAVTELQLLMQSTPAANNRARRELPRFMNYTLNNTKNNNVTLSKKRKRRFLGFLLGVGSAIASGIAVSKVLHLEGEVNKIKNALLSTNKAVVSLSNGVSVLTSKVLDLKNYIDKQLLPIVNKQSCSISNIETVIEFQQKNNRLLEITREFSVNAGVTTPVSTYMLTNSELLSLINDMPITNDQKKLMSNNVQIVRQQSYSIMSIIKEEVLAYVVQLPLYGVIDTPCWKLHTSPLCTTNTKEGSNICLTRTDRGWYCDNAGSVSFFPQAETCKVQSNRVFCDTMNSLTLPSEVNLCNIDIFNPKYDCKIMTSKTDVSSSVITSLGAIVSCYGKTKCTASNKNRGIIKTFSNGCDYVSNKGVDTVSVGNTLYYVNKQEGKSPYVKGEPIINFYDPLVFPSDEFDASISQVNEKINQSLAFIRKSDELLHNVNVGKSTTNIMITTIIIVIIVILLLLIAVGLFLYCKARSTPVTLSKDQLSGINNIAFSN

SEQ ID NO: 8961 - protein, 574 aa, Artificial Sequence
  derived and/or modified protein sequence (wt) from HRSV__AIA63234.1__F0
MELPILKTNAITTILAAVTLCFASSQNITEEFYQSTCSAVSKGYLSALRTGWYTSVITIELSNIKENKCNGTDAKVKLIKQELDKYKNAVTELQLLMQSTPAANNRARRELPRFMNYTLNNTKNNNVTLSKKRKRRFLGFLLGVGSAIASGIAVSKVLHLEGEVNKIKNALLSTNKAVVSLSNGVSVLTSKVLDLKNYIDKQLLPIVNKQSCSISNIETVIEFQQKNNRLLEITREFSVNAGVTTPVSTYMLTNSELLSLINDMPITNDQKKLMSNNVQIVRQQSYSIMSIIKEEVLAYVVQLPLYGVIDTPCWKLHTSPLCTTNTKEGSNICLTRTDRGWYCDNAGSVSFFPQAETCKVQSNRVFCDTMNSLTLPSEVNLCNIDIFNPKYDCKIMTSKTDVSSSVITSLGAIVSCYGKTKCTASNKNRGIIKTFFNGCDYVSNKGVDTVSVGNTLYYVNKQEGKSLYVKGEPIINFYDPLVFPSDEFDASISQVNEKINQSLAFIRKSDELLHNVNVGKSTTNIMITTIIIVIIVILLLLIAVGLFLYCKARSTPVTLSKDQLSGINNIAFSN

SEQ ID NO: 8962 - protein, 574 aa, Artificial Sequence
  derived and/or modified protein sequence (wt) from HRSV__AIA63364.1__F0
MELPILKTNAITTILAAVTLCFASSQNITEEFYQSTCSAVSKGYLSALRTGWYTSVITIELSNIKENKCNGTDAKVKLIKQELDKYKNAVTELQLLMQSTPAANNRARRELPRFMNYTLNNTKNNNVTLSKKRKRRFLGFLLGVGSAIASGIAVSKVLHLEGEVNKIKNALLSTNKAVVSLSNGVSVLTSKVLDLKNYIDKQLLPIVNKQSCSISNIETVIEFQQKNNRLLEITREFSVNAGVTTPVSTYMLTNSELLSLINDMPITNDQKKLMSNNVQIVRQQSYSIMSIIKEEVLAYVVQLPLYGVIDTPCWKLHTSPLCTTNTKEGSNICLTRTDRGWYCDNAGSVSFFPQAETCKVQSNRVFCDTMNSLTLPSEVNLCNIDIFNPKYDCKIMTSITDVSSSVITSLGAIVSCYGKTKCTASNKNRGIIKTFSNGCDYVSNKGVDTVSVGNTLYYVNKQEGKSLYVKGEPIINFYDPLVFPSDEFDASISQVNEKINQSLAFIRKSDELLHNVNVGKSTTNIMITTIIIVIIVILLLLIAVGLFLYCKARSTPVTLSKDQLSGINNIAFSN

SEQ ID NO: 8963 - protein, 574 aa, Artificial Sequence
  derived and/or modified protein sequence (wt) from HRSV__AIA63604.1__F0
MELPILKTNAITTILAAVTLCFASSQNITEEFYQSTCSAVSKGYLSALRTGWYTSVITIELSNIKENKCNGTDAKVKLIKQELDKYKNAVTELQLLMQSTPAANNRARRELPRFMNYTLNNTKNNNVTLSKKRKRRFLGFLLGVGSAIASGIAVSKVLHLEGEVNKIKNALLSTNKAVVSLSNGVSVLTSKVLDLKNYIDKQLLPIVNKQSCSISNIETVIEFQQKNNRLLEITREFSVNAGVTTPVSTYMLTNSELLSLINDMPITNDQKKLMSNNVQIVRQQSYSIMSIIKEEVLAYVVQLPLYGVIDTPCWKLHTSPLCTTNTKEGSNICLTRTDRGWYCDNAGSVSFFPQAETCKVQSNRVFCDTMNSLTLPSEVNLCNIDIFNPKYDCKIMTSKTDVSSSVITSLGAIVSCYGKTKCTASNKNRGIIKTFSNGCDYVSNKGVDTVSVGNTLYYVNKQEGKSLYVKGEPIINFYDPLVFPSDEFDASISQVNEKINQSLAFIRKSDELLHNVNVGKSTTNIMITTIIIVIIVILLLLIAVGLFLYCKARSTPVTLSKDQVSGINNIAFSN

SEQ ID NO: 8964 - protein, 574 aa, Artificial Sequence
  derived and/or modified protein sequence (wt) from HRSV__AUH26189.1__F0
MDLPILKTNAITAILAAVLLCFASSQNITEEFYQSTCSAVSKGYLSALRTGWYTSVITIELSNIKENKCNGTDAKVKLIKQELDKYKNAVTELQLLMQSTPAANNRARRELPRFMNYTLNNTKNNNVTLSKKRKRRFLGFLLGVGSAIASGIAVSKVLHLEGEVNKIKSALLSTNKAVVSLSNGVSVLTSKVLDLKNYIDKRLLPIVNKQSCSISNIETVIEFQQKNNRLLEITREFSVNAGVTTPVSTYMLTNSELLSLINDMPITNDQKKLMSNNVQIVRQQSYSIMSIIKEEVLAYVVQLPLYGVIDTPCWKLHTSPLCTTNTKEGSNICLTRTDRGWYCDNAGSVSFFPQAETCKVQSNRVFCDTMNSLTLPSEVNLCNIDIFNPKYDCKIMTSKTDVSSSVITSLGAIVSCYGKTKCTASNKNRGIIKTFSNGCDYVSNKGVDTVSVGNTLYYVNKQEGKSLYVKGEPIINFYDPLVFPSDEFDASISQVNEKINQSLAFIRKSDELLHNVNVGKSTTNIMITTIIIVIIVILLLLIAVGLFLYCKARSTPVTLSKDQLSGINNIAFSN

SEQ ID NO: 8965 - protein, 574 aa, Artificial Sequence
  derived and/or modified protein sequence (wt) from HRSV__NP_044596.1__F0
MELPILKTNAITAILAAVTLCFASSQNITEEFYQTTCSAVSKGYLSALRTGWYTSVITIELSNIKENKCNGTDAKVKLIKQELDKYKSAVTELQLLMQSTPATNNRARRELPRFMNYTLNNTKNTNVTLSKKRKRRFLGFLLGVGSAIASGIAVSKVLHLEGEVNKIKSALLSTNKAVVSLSNGVSVLTSKVLDLKNYIDKQLLPIVNKQSCSISNIETVIEFQQKNNRLLEITREFSVNAGVTTPVSTYMLTNSELLSLINDMPITNDQKKLMSNNVQIVRQQSYSIMSIIKEEVLAYVVQLPLYGVIDTPCWKLHTSPLCTTNTKEGSNICLTRTDRGWYCDNAGSVSFFPLAETCKVQSNRVFCDTMNSLTLPSEVNLCNIDIFNPKYDCKIMTSKTDVSSSVITSLGAIVSCYGKTKCTASNKNRGIIKTFSNGCDYVSNKGVDTVSVGNTLYYVNKQEGKSLYVKGEPIINFYDPLVFPSDEFDASISQVNEKINQSLAFIRKSDELLHNVNAGKSTINIMITTIIIVIIVILLSLIAVGLLLYCKARSTPVTLSKDQLSGINNIAFSN

SEQ ID NO: 8966 - protein, 574 aa, Artificial Sequence
  derived and/or modified protein sequence (wt) from HRSV__1701388A__F0
MELPILKTNTITTILAAVTLCFASSQNITEEFYQSTCSAVSKGYLSALRTGWYTSVITIELSNIKENKCNGTDAKVKLIKQELDKYKNAVTELQLLMQSTPAANNRARRELPRFMNYTLNNTKNTNVTLSKKRKRRFLGFLLGVGSAIASGIAVSKVLHLEGEVNKIKSALLSTNKAVVSLSNGVSVLTSKVLDLKNYIDKQLLPIVNKQSCSISNIETVIEFQQKNNRLLEITREFSVNAGVTTPVSTYMLTNSELLSLINDMPITNDQKKLMSNNVQIVRQQSYSIMSIIKEEVLAYVVQLPLYGVIDTPCWKLHTSPLCTTNTKEGSNICLTRTDRGWYCDNAGSVSFFPQAETCKVQSNRVFCDTMNSLTLPSEVNLCNIDIFNPKYDCKIMTSKTDVSSSVITSLGAIVSCYGKTKCTASNKNRGIIKTFSNGCDYVSNKGVDTVSVGNTLYYVNKQEGKSLYVKGEPIINFYDPLVFPSDEFDASISQVNEKINQSLAFIRKSDELLHNVNAVKSTTNIMITTIIIVIIVILLSLIAVGLLLYCKARSTPVTLSKDQLSGINNIAFSN

SEQ ID NO: 8967 - protein, 574 aa, Artificial Sequence
  derived and/or modified protein sequence (wt) from HRSV__WP_079890144.1__F0
MELLILKANAITTILTAVTFCFASGQNITEEFYQSTCSAVSKGYLSALRTGWYTSVITIELSNIKKIKCNGTDAKVKLIKQELDKYKNAVTELQLLMQSTPATNNRARRELPRFMNYTLNNAKKTNVTLSKKRKRRFLGFLLGVGSAIASGVAVSKVLHLEGEVNKIKSALLSTNKAVVSLSNGVSVLTSKVLDLKNYIDKQLLPIVNKQSCSISNIETVIEFQQKNNRLLEITREFSVNVGVTTPVSTYMLTNSELLSLINDMPITNDQKKLMSNNVQIVRQQSYSIMSIIKEEVLAYVVQLPLYGVIDTPCWKLHTSPLCTTNTKEGSNICLTRTDRGWYCDNAGSVSFFPQAETCKVQSNRVFCDTMNSLTLPSEVNLCNVDIFNPKYDCKIMTSKTDVSSSVITSLGAIVSCYGKTKCTASNKNRGIIKTFSNGCDYVSNKGVDTVSVGNTLYYVNKQEGKSLYVKGEPIINFYDPLVFPSDEFDASISQVNEKINQSLAFIRKSDELLHNVNAGKSTTNIMITTIIIVIIVILLSLIAVGLLLYCKARSTPVTLSKDQLSGINNIAFSN

SEQ ID NO: 8968 - protein, 568 aa, Artificial Sequence
  derived and/or modified protein sequence (wt) from HRSV__AJF44801.1__F-del
MIPQARTKLNLGQITMELLIHRSSAIFLTLAINALYLTSSQNITEEFYQSTCSAVSRGYLSALRTGWYTSVITIELSNIKETKCNGTDTKVKLIKQELDKYKNAVTELQLLMQNTPAANNRARREAPQYMNYTINTTGSLNVSISKKRKRRFLGFLLGVGSAIASGIAVSKVLHLEGEVNKIKNALLSTNKAVVSLSNGVSVLTSKVLDLKNYINNQLLPIVNQQSCRISNIETVIEFQQKNSRLLEITREFSVNAGVTTPLSTYMLTNSELLSLINDMPITNDQKKLMSSNVQIVRQQSYSIMSIIKEEVLAYVVQLPIYGVIDTPCWKLHTSPLCTTNIKEGSNICLTRTDRGWYCDNAGSVSFFPQADTCKVQSNRVFCDTMNSLTLPSEVSLCNTDIFNSKYDCKIMTSKTDISSSVITSLGAIVSCYGKTKCTASNKNRGIIKTFSNGCDYVSNKGVDTVSVGNTLYYVNKLEGKNLYVKGEPIINYYDPLVFPSDEFDASISQVNEKINQSLAFIRRSDELLHNVNTGKSTTNIMITAIIIVIIVVLLSLIAIGLLLYCKAK

SEQ ID NO: 8969 - protein, 568 aa, Artificial Sequence
  derived and/or modified protein sequence (wt) from HRSV__AJF44759.1__F-del
MIPQARTKLNLGQITMELLIHRSSAIFLTLAINALYLTSSQNITEEFYQSTCSAVSRGYLSALRTGWYTSVITIELSNIKETKCNGTDTKVKLIKQELDKYKNAVTELQLLMQNTPAANNRARREAPQYMNYTINTTRSLNVSISKKRKRRFLGFLLGVGSAIASGIAVSKVLHLEGEVNKIKNALLSTNKAVVSLSNGVSVLTSKVLDLKNYINNQLLPIVNQQSCRISNIETVIEFQQKNSRLLEITREFSVNAGVTTPLSTYMLTNSELLSLINDMPITNDQKKLMSSNVQIVRQQSYSIMSIIKEEVLAYVVQLPIYGVIDTPCWKLHTSPLCTTNIKEGSNICLTRTDRGWYCDNAGSVSFFPQADTCKVQSNRVFCDTMNSLTLPSEVSLCNTDIFNSKYDCKIMTSKTDISSSVITSLGAIVSCYGKTKCTASNKNRGIIKTFSNGCDYVSNKGVDTVSVGNTLYYVNKLEGKNLYVKGEPIINYYDPLVFPSDEFDASISQVNEKINQSLAFIRRSDELLHNVNTGKSTTNIMITAIIIVIIVVLLSLIAIGLLLYCKAK

SEQ ID NO: 8970 - protein, 568 aa, Artificial Sequence
  derived and/or modified protein sequence (wt) from HRSV__AJF44661.1__F-del
MIPQARTELNLGQITMELLIHRSSAIFLTLAINALYLTSSQNITEEFYQSTCSAVSRGYLSALRTGWYTSVITIELSNIKETKCNGTDTKVKLIKQELDKYKNAVTELQLLMQNTPAANNRARREAPQYMNYTINTTGSLNVSISKKRKRRFLGFLLGVGSAIASGIAVSKVLHLEGEVNKIKNALLSTNKAVVSLSNGVSVLTSKVLDLKNYINNQLLPIVNQQSCRISNIETVIEFQQKNSRLLEITREFSVNAGVTTPLSTYMLTNSELLSLINDMPITNDQKKLMSSNVQIVRQQSYSIMSIIKEEVLAYVVQLPIYGVIDTPCWELHTSPLCTTNIKEGSNICLTRTDRGWYCDNAGSVSFFPQADTCKVQSNRVFCDTMNSLTLPSEVSLCNTDIFNSKYDCKIMTSKTDISSSVITSLGAIVSCYGKTKCTASNKNRGIIKTFSNGCDYVSNKGVDTVSVGNTLYYVNKLEGKNLYVKGEPIINYYDPLVFPSDEFDASISQVNEKINQSLAFIRRSDELLHNVNTGKSTTNIMITAIIIVIIVVLLSLIAIGLLLYCKAK

SEQ ID NO: 8971 - protein, 568 aa, Artificial Sequence
  derived and/or modified protein sequence (wt) from HRSV__AJF44602.1__F-del
MIPQARTELNLGQITMELLIHRSSAIFLTLAINALYLTSSQNITEEFYQSTCSAVSRGYLSALRTGWYTSVITIELSNIKETKCNGTDTKVKLIKQELDKYKNAVTELQLLMQNTPAANNRARREAPQYMNYTINTTGSLNVSISKKRKRRFLGFLLGVGSAIASGIAVSKVLHLEGEVNKIKNALLSTNKAVVSLSNGVSVLTSKVLDLKNYINNQLLPIVNQQSCRISNIETVIEFQQKNSRLLEITREFSVNAGVTTPLSTYMLTNSELLSLINDMPITNDQKKLMSSNVQIVRQQSYSIMSIIKEEVLAYVVQLPIYGVIDTPCWKLHTSPLCTTNIKEGSNICLTRTDRGWYCDNAGSVSFFPQADTCKVQSNRVFCDTMNSLTLPSEVSLCNTDIFNSKYDCKIMTSKTDISSSVITSLGAIVSCYGKTKCTASNKNRGIIKTFSNGCDYVSNKGVDTVSVGNTLYYVNKLEGKNLYVKGEPIINYYDPLVFPSDEFDASISQVNEKINQSLAFIRRSDELLHNVNTGKSTTNIMITAIIIVIIVVLLSLIAIGLLLYCKAK

SEQ ID NO: 8972 - protein, 553 aa, Artificial Sequence
  derived and/or modified protein sequence (wt) from HRSV__2207424A__F-del
MELPILKTNAITTILAAVTLCFASSQNITEEFYQSTCSAVSKGYLSALRTGWYTSVITIELSNIKENKCNGTDAKVKLIKQELDKYKNAVTELQLLMQSTPAANSRARRELPRFMNYTLNNTKNTNVTLSKKRKRRFLGFLLGVGSAIASGIAVSKVLHLEGEVNKIKSALLSTNKAVVSLSNGVSVLTSKVLDLKNYIDKQLLPIVNKQSCSISNIETVIEFQQKNNRLLEITREFSVNAGVTTPVSTYMLTNSELLSLINDMPITNDQKKLMSNNVQIVRQQSYSIMSIIKEEVLAYVVQLPLYGVIDTPCWKLHTSPLCTTNTKEGSNICLTSTDRGWYCDNAGSVSFFPQAETCKVQSNRVFCDTMNSLTLPSEVNLCNVDIFNPKYDCKIMTSKTDVSSSVITSLGAIVSCYGKTKCTASNKNRGIIKTFSNGCDYVSNKGVDTVSVGNTLYYVNKQEGKSLYVKGEPIINFYDPLVFPSDEFDASISQVNEKINQSLAFIRKSDELLHNVNAGKSTTNIMITTIIIVIIVILLLLIAVGLFLYCKAR

SEQ ID NO: 8973 - protein, 553 aa, Artificial Sequence
  derived and/or modified protein sequence (wt) from HRSV__AAB38520.1__F-del
MELPILKTNAITTILAAVTLCFASSQNITEEFYQSTCSAVSKGYLSALRTGWYTSVITIELSNIKENKCNGTDAKVKLIKQELDKYKNAVTELQLLMQSTSAANNRARRELPRFMNYTLNNTKNTNVTLSKKRKRRFLGFLLGVGSAIASGIAVSKVLHLEGEVNKIKSALLSTNKAVVSLSNGVSVLTSKVLDLKNYIDKQLLPIVNKQSCSISNIETVIEFQQKNNRLLEITREFSVNAGVTTPVSTYMLTNSELLSLINDMPITNDQKKLMSNNVQIVRQQSYSIMSIIKEEVLAYVVQLPLYGVIDTPCWKLHTSPLCTTNTKEGSNICLTRTDRGWYCDNAGSVSFFPQAETCKVQSNRVLCDTMNSLTLPSEVNLCNIDIFNPKYDCKIMTSKTDVSSSVITSLGAIVSCYGKTKCTASNKNRGIIKTFSNGCDYVSNKGVDTVSVGNTLYYVNKQEGKSLYVKGEPIINFYDPLVFPSDEFDASISQVNEKINQSLAFIRKSDELLHNVNAGKSTTNIMITTIIIVIIVILLLLIAVGLLLYCKAR

SEQ ID NO: 8974 - protein, 553 aa, Artificial Sequence
  derived and/or modified protein sequence (wt) from HRSV__AAB38517.1__F-del
MELPILKTNAITAILAAVTLCFASGQNITEEFYQSTCSAVSKGYLSALRTGWYTSVITIELSNIKENKCNGTDAKVKLIKQELDKYKSAVTELQLLTQSTPATNNRARRELPRFMNYTLNNTKNTNVTLSKKRKRRFLGFLLGVGSAIASGIAVSKVLHLEGEVNKIKSALLSTNKAVVSLSNGVSVLTSKVLDLKNYIDKQLLPIVNKQSCSISNIETVIEFQQKNNRLLEITREFSVNAGVTTPVSTYMLTNSELLSLINDMPITNDQKKLMSNNVQIVRQQSYSIMSIIKEEVLAYVVQLPLYGVIDTPCWKLHTSPLCTTNTKEGSNICLTSTDRGWYCDNAGSVSFFPLAETCKVQSNRVFCDTMNSLTLPSEVNLCNIDIFNPKYDCKIMTSKTDVSSSVITSLGAIVSCYGKTKCTASNKNRGIIKTFSNGCDYVSNKGVDTVSVGNTLYYVNKQEGKSLYVKGEPIINFYDPLVFPSDEFDASISQVNEKINQSLAFIRKSDELLHNVNAGKSTTNIMITTIIIVIIVILLSLIAVGLLLYCKAR

SEQ ID NO: 8975 - protein, 553 aa, Artificial Sequence
  derived and/or modified protein sequence (wt) from HRSV__AAB38519.1__F-del
MELPILKTNAITTILAAVTLCFASSQNITEEFYQSTCSVVSKGYLSALRIGWYTSVITIELSNIKENKCNGTDAKVKLIKQELDKYKNAVTELQLLMQSTPAANNRARRELPRFMNYTLNNTKNTNVTLSKKRKRRFLGFLLGVGSAIASGIAVSKVLHLEGEVNKIKSALLSTNKAVVSLSNGVSVLTSKVLDLKTYIDKQLLPIVNKQSCSISNIETVIEFQQKNNRLLEITREFSVNAGVTTPVSTYMLTNSELLSLINDMPITNDQKKLMSNNVQIVRQQSYSIMSIIKEEVLAYVVQLPLYGVIDTPCWKLHTSPLCTTNTKEGSNICLTRTDRGWYCDNAGSVSFFPQAETCKVQSNRVLCDTMNSLTLPSEVNLCNIDIFNPKYDCKIMTSKTDVSSSVITSLGAIVSCYGKTKCTASNKNRGIIKTFSNGCDYVSNKGVDTVSVGNTLYYVNKQEGKSLYVKGEPIINFYDPLVFPSDEFDASISQVNEKINQSLAFIRKSDELLHNVNAGKSTTNIMITTIIIVIIVILLLLIAVGLLLYCKAR

SEQ ID NO: 8976 - protein, 553 aa, Artificial Sequence
  derived and/or modified protein sequence (wt) from HRSV__AAB38518.1__F-del
MELPIIKANAITTILIAVTFCFASSQNITEEFYQSTCSAVSKGYLSALRTGWYTSVITIELSNIKENKCNGTDAKVKLIKQELDKYKNAVTELQLLMQSTPAANSRARRELPRFMNYTLNNAKKTNVTLSKKRKRRFLGFLLGVGSATASGIAVSKVLHLEGEVNKIKSALLTTNKAVVSLSNGVSVLTSKVLDLKNYIDKQLLPIVNKQSCSISNIETVIEFQQKNNRLLEITREFSVNAGVTTPVSTYMLTNSELLSLINDMPITNDQKKLMSNNVQIVRQQSYSIMSIIKEEVLAYVVQLPLYGVIDTPCWKLHTSPLCTTNTKEGSNICLTSTDRGWYCDNAGSVSFFPQADTCKVQSNRVFWDTMNSLTLPSEVNLCNIDIFNPKYDCKIMTSKTDVSSSVITSLGAIVSCYGKTKCTASNKNRGIIKTFSNGCDYVSNKGVDTVSVGNTLYYVNKQEGKSLYVKGEPIINFYDPLVFPSDEFDASISQVNEKINQSLAFIRKSDELLHNVNAGKSTTNIMITTIIIVIIVILLSLIAVGLLLYCKAR

SEQ ID NO: 8977 - protein, 553 aa, Artificial Sequence
  derived and/or modified protein sequence (wt) from HRSV__AVQ93587.1__F-del
MELLIHRSSAIFLTLAINALYLTSSQNITEEFYQSTCSAVSRGYLSALRTGWYTSVITIELSNIKETKCNGTDTKVKLIKQELDKYKNAVTELQLLMQNTPAVNNRARREAPQYMNYTINTTKNLNVSISKKRKRRFLGFLLGVGSAIASGIAVSKVLHLEGEVNKIKNALQLTNKAVVSLSNGVSVLTSKVLDLKNYINNQLLPIVNQQSCRISNIETVIEFQQKNSRLLEITREFSVNAGVTTPLSTYMLTNSELLSLINDMPITNDQKKLMSSNVQIVRQQSYSIMSIIKEEVLAYVVQLPIYGVIDTPCWKLHTSPLCTTNIKEGSNICLTRTDRGWYCDNAGSVSFFPQADTCKVQSNRVFCDTMNSLTLPSEVSLCNTDIFNSKYDCKIMTSKTDISSSVITSLGAIVSCYGKTKCTASNKNRGIIKTFSNGCDYVSNKGVDTVSVGNTLYYVNKLEGKNLYVKGEPIINYYDPLVFPSDEFDASISQVNEKINQSLAFIRRSDELLHNVNTGKSTTNIMITAIIIVIIVVLVSLIAIGLLLYCKAK

SEQ ID NO: 8978 - protein, 553 aa, Artificial Sequence
  derived and/or modified protein sequence (wt) from HRSV__AVQ93599.1__F-del
MELLIHRSSAIFLTLVINALYLTSSQNITEEFYQSTCSAVSRGYLSALRTGWYTSVITIELSNIKETKCNGTDTKVKLIKQELDKYKNAVTELQLLMQNTPAVNNRARREAPQYMNYTINTTKNLTVSISKKRKRRFLGFLLGVGSAIASGIAVSKVLHLEGEVNKIKNALQSTNKAVVSLSNGVSVLTSKVLDLKNYINSQLLPIVNKQSCRISNIETVIEFQQKNSRLLEITREFSVNAGVTTPLSTYMLTNSELLSLINDMPITNDQKKLMSSNVQIVRQQSYSIMSIIKEEVLAYVVQLPIYGVIDTPCWKLHTSPLCTTNIKEGSNICLTRTDRGWYCDNAGSVSFFPQADTCKVQSNRVFCDTMNSLTLPSEVSLCNTDIFNSKYDCKIMTSKTDISSSVITSLGAIVSCYGKTKCTASNKNRGIIKTFSNGCDYVSNKGVDTVSVGNTLYYVNKLEGKNLYVKGEPIINYYDPLVFPSDEFDASISQVNEKINQSLAFIRRSDELLHNVNTGKSTTNIMITAIIIVIIVVLLSLIAIGLLLYCKAK

SEQ ID NO: 8979 - protein, 553 aa, Artificial Sequence
  derived and/or modified protein sequence (wt) from HRSV__AVQ93571.1__F-del
MELLIHRSSAIFLTLAINALYLTSSQNITEEFYQSTCSAVSRGYLSALRTGWYTSVITIELSNIKETKCNGTDTKVKLIKQELDKYKNAVTELQLLMQNTPAVNNRARREAPQYMNYTINTTKNLNVSISKKRKRRFLGFLLGVGSAIASGIAVSKVLHLEGEVNKIKNALQLTNKAVVSLSNGVSVLTSKVLDLKNYINNQLLPIVNQQSCRISNIETVIEFQQKNSRLLEITREFSVNAGVTTPLSTYMLTNSELLSLINDMPITNDQKKFMSSNVQIVRQQSYSIMSIIKEEVLAYVVQLPIYGVIDTPCWKLHTSPLCTTNIKEGSNICLTRTDRGWYCDNAGSVSFFPQADTCKVQSNRVFCDTMNSLTLPSEVSLCNTDIFNSKYDCKIMTSKTDISSSVITSLGAIVSCYGKTKCTASNKNRGIIKTFSNGCDYVSNKGVDTVSVGNTLYYVNKLEGKNFYVKGEPIINYYDPLVFPSDEFDASISQVNEKINQSLAFIRRSDELLHNVNTGKSTTNIMITAIIIVIIVVLLSLIAIGLLLYCKAK

SEQ ID NO: 8980 - protein, 553 aa, Artificial Sequence
  derived and/or modified protein sequence (wt) from HRSV__AVQ93568.1__F-del
MELLIHRSSAIFLTLAINALYLTSSQNITEEFYQSTCSAVSRGYLSALRTGWYTSVITIELSNIKETKCNGTDTKVKLIKQELDKYKNAVTELQLLMQNTPAVNNRARREAPQYMNYTINTTKNLNVSISKKRKRRFLGFLLGVGSAIASGIAVSKVLHLEGEVNKIKNALQLTNKAVVSLSNGVSVLTSKVLDLKNYINNQLLPIVNQQSCRISNIETVIEFQQKNSRLLEITREFSVNAGVTTPLSTYMLTNSELLSLINDMPITNDQKKLMSSNVQIVRQQSYSIMSIIKEEVLAYVVQLPIYGVIDTPCWKLHTSPLCTTNIKEGSNICLTRTDRGWYCDNAGSVSFFPQADTCKVQSNRVFCDTMNSLTLPSEVSLCNTDIFNSKYDCKIMTSKTDISSSVITSLGAIVSCYGKTKCTASNKNRGIIKTFSNGCDYVSNKGVDTVSVGNTLYYVNKLEGKNLYVKGEPIINYYDPLVFPSDEFDASISQVNEKINQSLAFIRRSDELLHNVNTGKSTTNIMTTAIIIVIIVVLLSLIAIGLLLYCKAK

SEQ ID NO: 8981 - protein, 553 aa, Artificial Sequence
  derived and/or modified protein sequence (wt) from HRSV__AVQ93589.1__F-del
MELLIHRSSAIFLTLAINALYLTSSQNITEEFYQSTCSAVSRGYLSALRTGWYTSVITIELSNIKETKCNGTDTKVKLIKQELDKYKNAVTELQLLMQNTPAVNNRARREAPQYMNYTINTTKNLNVSISKKRKRRFLGFLLGVGSAIASGIAVSKVLHLEGEVNKIKNALQLTNKAVVSLSNGVSVLTSKVLDLKNYINNQLLPIVNQQSCRISNIETVIEFQQKNSRLLEITREFSVNAGVTTPLSTYMLTNSELLSLINDMPITNDQKKLVSSNVQIVRQQSYSIMSIIKEEVLAYVVQLPIYGVIDTPCWKLHTSPLCTTNIKEGSNICLTRTDRGWYCDNAGSVSFFPQADTCKVQSNRVFCDTMNSLTLPSEVSLCNTDIFNSKYDCKIMTSKTDISSSVITSLGAIVSCYGKTKCTASNKNRGIIKTFSNGCDYVSNKGVDTVSVGNTLYYVNKLEGKNLYVKGEPIINYYDPLVFPSDEFDASISQVNEKINQSLAFIRRSDELLHNVNTGKSTTNIMITAIIIVIIVVLLSLIAIGLLLYCKAK

SEQ ID NO: 8982 - protein, 553 aa, Artificial Sequence
  derived and/or modified protein sequence (wt) from HRSV__AVQ93597.1__F-del
MELLIHRSSAIFLTLAINALYLTSSQNITEEFYQSTCSAVSRGYLSALRTGWYTSVITIELSNIKETKCNGTDTKVKLIKQELDKYKNAVTELQLLMQNTPVVNNRARREAPQYMNYTINTTKNLNVSISKKRKRRFLGFLLGVGSAIASGIAVSKVLHLEGEVNKIKNALQLTNKAVVSLSNGVSVLTSKVLDLKNYINNQLLPIVNQQSCRISNIETVIEFQQKNSRLLEITREFSVNAGVTTPLSTYMLTNSELLSLINDMPITNDQKKLMSSNVQIVRQQSYSIMSIIKEEVLAYVVQLPIYGVIDTPCWKLHTSPLCTTNIKEGSNICLTRTDRGWYCDNAGSVSFFPQADTCKVQSNRVFCDTMNSLTLPSEVSLCNTDIFNSKYDCKIMTSKTDISSSVITSLGAIVSCYGKTKCTASNKNRGIIKTFSNGCDYVSNKGVDTVSVGNTLYYVNKLEGKNLYVKGEPIINYYDPLVFPSDEFDASISQVNEKINQSLAFIRRSDELLHNVNTGKSTTNIMITAIIIVIIVVLLSLIAIGLLLYCKAK

SEQ ID NO: 8983 - protein, 553 aa, Artificial Sequence
  derived and/or modified protein sequence (wt) from HRSV__AVQ93563.1__F-del
MELLIHRSSAIFLTLAINALYLTSSQNITEEFYQSTCSAVSRGYLSALRTGWYTSVITIELSNIKETKCNGTDTKVKLIKQELDKYKNAVTELQLLMQNTPAVNNRARREAPQYMNYTINTTKNLNVSISKKRKRRFLGFLLGVGSAIASGIAVSKVLHLEGEVNKIKNALQLTNKAVVSLSNGVSVLTSKVLDLKNYINNQLLPIVNQQSCRISNIETVIEFQQKNSRLLEITREFSVNACVTTPLSTYMLTNSELLSLINDMPITNDQKKLMSSNVQIVRLQSYSIMSIIKEEVLAYVVQLPIYGVIDTPCWKLHTSPLCTTNIKEGSNICLTRTDRGWYCDNAGSVSFFPQADTCKVQSNRVFCDTMNSLTLPSEVSLCNTDIFNSKYDCKIMTSKTDISSSVITSLGAIVSCYGKTKCTASNKNRGIIKTFSNGCDYVSNKGVDTVSVGNTLYYVNKLEGKNLYVKGEPIINYYDPLVFPSDEFDASISQVNEKINQSLAFIRRSDELLHNVNTGKSTTNIMITAIIIVIIVVLLSLIAIGLLLYCKAK

SEQ ID NO: 8984 - protein, 553 aa, Artificial Sequence
  derived and/or modified protein sequence (wt) from HRSV__AVQ93594.1__F-del
MELLIHRSSAIFLTLAINALYLTSSQNITEEFYQSTCSAVSRGYLSALRTGWYTSVITIELSNIKETKCNGTDTKVKLIKQELDKYKNAVTELQLLMQNTPAVNNRARREAPQYMNYTINTTKNLNVSISKKRKRRFLGFLLGVGSAIASGIAVSKVLHLEGEVNKIKNALQLTNKAVVSLSNGVSVLTSKVLDLKNYINNQLLPIVNQQSCRISNIETVIEFQQKNSRLLEITREFSVNAGVTTPLSTYMLTNSELLSLINDMPITNDQKKLMSSNVQIVRQQSYSIMSIIKEEVLAYVVQLPIYGVIDTPCWKLHTSPLCTTNIKEGSNICLTRTDRGWYCDNAGSVSFFPQADTCKVQSNRVFCDTMNSLTLPSEVSLCNTDIFNSKYDCKIMTSKTDISSSVITSLGAIVSCYGKTKCTASNKNRGIIKTFSNGCDYVSNKGVDTVSVGNTLYYVNKLEGKNLYVKGEPIINYYDPLVFPSDEFDASISQVNEKINQSLAFIRRSDELLHNVNTGKSTTNIMITAIIIVIIVVLLSLIAIGLLLYCKAK

SEQ ID NO: 8985 - protein, 553 aa, Artificial Sequence
  derived and/or modified protein sequence (wt) from HRSV__AVQ93601.1__F-del
MELLIHRSSAIFLTLAINALYPTSSQNITEEFYQSTCSAVSRGYLSALRTGWYTSVITIELSNIKETNCNGTDTKVKLIKQELDKYKNAVTELQLLMQNTPAVNNRARREAPQYMNYTINTTKNLNVSISKKRKRRFLGFLLGVGSAIASGIAVSKVLHLEGEVNKIKNALQLTNKAVVSLSNGVSVLTSKVLDLKNYINNQLLPIVNQQSCRISNIETVIEFQQKNSRLLEITREFSVNAGVTTPLSTYMLTNSELLSLINDMPITNDQKKLMSSNVQIVRQQSYSIMSIIKEEVLAYVVQLPIYGVIDTPCWKLHTSPLCTTNIKEGSNICLTRTDRGWYCDNAGSVSFFPQADTCKVQSNRVFCDTMNSLTLPSEVSLCNTDIFNSKYDCKIMTSKTDISSSVITSLGAIVSCYGKTKCTASNKNRGIIKTFSNGCDYVSNKGVDTVSVGNTLYYVNKLEGKNLYVKGEPIINYYDPLVFPSDEFDASISQVNEKINQSLAFIRRSDELLHNVNTGKSTTNIMITAIIIVIIVVLLSLIAIGLLLYCKAK

SEQ ID NO: 8986 - protein, 553 aa, Artificial Sequence
  derived and/or modified protein sequence (wt) from HRSV__AVQ93562.1__F-del
MELLIHRSSAIFLTFAINALYFTSSQNITEEFYQSTCSAVSRGYLSALRTGWYTSVITIELSNIKETKCNGTDTKVKLIKQELDKYKNAVTELQLLMQNTPAVNNRARREAPQYMDYTINTSKNLNVSISKKRKRRFLGFLLGVGSAIASGIAVSKVLHLEGEVNKIKNALQLTNKAVVSLSNGVSVLTSKVLDLKNYINNQLLPIVNQQSCRISNIETVIEFQQKNSRLLEITREFSVNAGVTTPLSTYMLTNSELLSLINDMPITNDQKKLMSSNVQIVRQQSYSIMSIIKEGVLAYVVQLPIYGVIDTPCWKLHTSPLCTTNIKEGSNICLTRTDRGWYCDNAGSVSFFPQADTCKVQSNRVFCDTMNSLTLPSEVSLCNTDIFNSKYDCKIMTSKTDISSSVITSLGAIVSCYGKTKCTASNKNRGIIKTFSNGCDYVSNKGVDTVSVGNTLYYVNKLEGKNLYVKGEPIINYYDPLVFPSDEFDASISQVNEKINQSLAFIRRSDELLHNVNTGKSTTNIMITAIIIVIIVVLLSLIAIGLMLYCKAK

SEQ ID NO: 8987 - protein, 553 aa, Artificial Sequence
  derived and/or modified protein sequence (wt) from HRSV__AVQ93561.1__F-del
MELLIHRSSAIFLTLAINALYLTSSQNITEEFYQSTCSAVSRGYLSALRTGWYTSVITIELSNIKETKCNGTDTKVKLIKQELDKYKNAVTELQLLMQNTPAVNNRARREAPQYMNYTINTTKNLNVSISKKRKRRFLGFLLGVGSAIASGIAVSKVLHLEGEVNKIKNALQLTNKAVVSLSNGVSVLTSKVLDLKNYINNQLLPIVNQQSCRISNIETVIEFQQKNSRLLEITREFSVNAGVTTPLSTYMLTNSELLSLINDMPITNDQKKLMSSNVQIVRQQGYSIMSIIKEEVLAYVVQLPIYGVIDTPCWKLHTSPLCTTNIKEGSNICLTRTDRGWYCDNAGSVSFFPQADTCKVQSNRVFCDTMNSLTLPSEVSLCNTDIFNSKYDCKIMTSKTDISSSVITSLGAIVSCYGKTKCTASNKNRGIIKTFSNGCDYVSNKGVDTVSVGNTLYYVNKLEGKNLYVKGEPIINYYDPLVFPSDEFDASISQVNEKINQSLAFIRRSDELLHNVNTGKSTTNIMITAIIIVIIVVLLSLIAIGLLLYCKAK

SEQ ID NO: 8988 - protein, 553 aa, Artificial Sequence
  derived and/or modified protein sequence (wt) from HRSV__AVQ93607.1__F-del
MELLIHRSSAIFLTLAINALYPTSSQNITEEFYQSTCSAVSRGYLSALRTGWYTSVITIELSNIKETKCNGTDTKVKLIKQELDKYKNAVTELQLLMQNTPAVNNRARREAPQYMNYTINTTKNLNVSISKKRKRRFLGFLLGVGSAIASGIAVSKVLHLEGEVNKIKNALQLTNKAVVSLSNGVSVLTSKVLDLKNYINNQLLPIVNQQSCRISNIETVIEFQQKNSRLLEITREFSVNAGVTTPLSTYMLTNSELLSLINDMPITNDQKKLMSSNVQIVRQQSYSIMSIIKEEVLAYVVQLPIYGVIDTPCWKLHTSPLCTTNIKEGSNICLTRTDRGWYCDNAGSVSFFPQADTCKVQSNRVFCDTMNSLTLPSEVSLCNTDIFNSKYDCKIMTSKTDISSSVITSLGAIVSCYGKTKCTASNKNRGIIKTFSNGCNYVSNKGVDTVSVGNTLYYVNKLEGKNLYVKGEPIINYYDPLVFPSDEFDASISQVNEKINQSLAFIRRSDELLHNVNTGKSTTNIMITAIIIVIIVVLLSLIAIGLLLYCKAK

SEQ ID NO: 8989 - protein, 553 aa, Artificial Sequence
  derived and/or modified protein sequence (wt) from HRSV__AVQ93588.1__F-del
MELLIHRSSAIFLTLAINALYLTSSQNITEEFYQSTCSAVSRGYLSALRTGWYTSVITIELSNIKETKCNGTDTKVKLIKQELDKYKNAVTELQLLMQNTPAVNNRARREAPQYMNYTINTTKNLNVSISKKRKRRFLGFLLGVGSAIASGIAVSKVLHLEGEVNKIKNALQLTNKAVVSLSNGVSVLTSKVLDLKNYINNQLLPIVNQQSCRISNIETVIEFQQKNSRLLEITREFSVNAGVTTPLSTYMLTNSELLSLINDMPITNDQKKLMSSNVQIVRQQSYSIMSIIKEEVLAYVVQLPIYGVIDTPCWKLHTSPLCTTNIKEGSNICLTRTDRGWYCDNAGSVSFFPQADTCKVQSNRVFCDTMNSLTLPSEVSLCNTDIFNSKYDCKIMTSKTDISSSVITSLGAIVSCYGKTKCTASNKNRGIIKTFSNGCDYVSNKGVDTVSVGNTLYYVNKLEGKNLYVKGEPIINYYDPLVFPSDEFDASISQVNEKINQSLAFIRRSDELLHNVNTGKSTTNIMITAIIIVIIVVLLSLIAVGLLLYCKAK

SEQ ID NO: 8990 - protein, 553 aa, Artificial Sequence
  derived and/or modified protein sequence (wt) from HRSV__AVQ93575.1__F-del
MELLIHRSSAIFLTLAINALYLTSSQNITEEFYQSTCSAVSRGYLSALRTGWYTSVITIELSNIKETKCNGTDTKVKLIKQELDKYKNAVTELQLLMQNTPAVNNRARREAPQYMNYTINTTKNLNVSISKKRKRRFLGFLLGVGSAIASGIAVSKVLHLEGEVNKIKNALQLTNKAVVSLSNGVSVLTSKVLDLKNYINNQLLPIVNQQSCRISNIETVIEFQQKNSRLLEITREFSVNAGVTTPLSTYMLTNSELLSLINDMPITNDQKKLMSSNVQIVRQQSYSIMSIIKEEVLAYVVQLPIYGVIDTPCWKLHTSPLCTTNIKEGSNICLTRTDRGWYCDNAGSVSFFPQADTCKVQSNRVFCDTMNSLTLPSEVSLCNTDIFNSKYDCKIMTSKTDISSSVITSLGAIVSCYGKTKCTASNKNRGIIKTFSNGCDYVSNKGVDTVSVGNTLYYVNKLEGKNLYVKGEPIINYYDPLVFPSDEFDASISQVNEKINQSLAFIRRSDELLHNVNTGKSTTNIMITAIIIVIIVVLLSLIAIGLLLYCKVK

SEQ ID NO: 8991 - protein, 553 aa, Artificial Sequence
  derived and/or modified protein sequence (wt) from HRSV__AVQ93468.1__F-del
MELPILKTNAITPILAAVTLCFAFSQNITEEFIQSTCSAVSKGYLSALRTGWYTSVITIELSNIKENKCNGTDAKVKLIKQELDKYKNAVTELQLLMQSTPAANSRARRELPRFMNYTLNNTKNTNVTLSKKRKRRFLGFLLGVGSAIASGIAVSKVLHLEGEVNKIKSALLSTNKAVVSLSNGVSVLTSKVLDLKNYIDKQLLPIVNKQSCSISNIETVIEFQQKNNRLLEITREFSVNAGVTTPVSTYMLTNSELLSLINDMPITNDQKKLMSSNVQIVRQQSYSIMSIIKEEVLAYVVQLPLYGVIDTPCWKLHTSPLCTTNTKEGSNICLTRTDRGWYCDNAGSVSFFPQAETCKVQSNRVFCDTMNSLTLPSEVNLCNIDIFNPKYDCKIMTSKTDVSSSVITSLGAIVSCYGKTKCTASNKNRGIIKTFSNGCDYVSNKGVDTVSVGNTLYYVNKQEGKSLYVKGEPIINFYDPLVFPSDEFDASISQVNEKINQSLAFIRKSDELLHNVNAGKSTTNIMITTIIIVIIVILLALIAVGLLLYCKAR

SEQ ID NO: 8992 - protein, 553 aa, Artificial Sequence
  derived and/or modified protein sequence (wt) from HRSV__AVQ93467.1__F-del
MELPILKTNAITTILAAVTLCFASSQNITEEFYQSTCSAVSKGYLSALRTGWYTSVITIELSNIKENKCNGTDAKVKLIKQELDKYKNAVTELQLLMQSTPAANSRARRELPRFMNYTLNNTKNTNVTLSKKRKRRFLGFLLGVGSAIASGIAVSKVLHLEGEVNKIKSALLSTNKAVVSLSNGVSVLTSKVLDLKNYIDKQLLPIVNKQSCSISNIETVIEFQQKNNRLLEITREFSVNAGVTTPVSTYMLTNSELLSLINDMPITNDQKKLMSSNVQIVRQQSYSIMSIIKEEVLAYVVQLPLYGVIDTPCWKLHTSPLCTTNTKEGSNICLTRTDRGWYCENAGSVSFFPQAETCKVQSNRVFCDTMNSLTLPSEVNLCNIDIFNPKYDCKIMTSKTDVSSSVITSLGAIVSCYGKTKCTASNKNRGIIKTFSNGCDYVSNKGVDTVSVGNTLYYVNKQEGKSLYVKGEPIINFYDPLVFPSDEFDASISQVNEKINQSLAFIRKSDELLHNVNAGKSTTNIMITTIIIVIIVILLALIAVGLLLYCKAR

SEQ ID NO: 8993 - protein, 553 aa, Artificial Sequence
  derived and/or modified protein sequence (wt) from HRSV__AVQ93590.1__F-del
MELLIHRSSAIFLTFAINALYLTSSQNITEEFYQSTCSAVSRGYLSALRTGWYTSVITIELSNIKETKCNGTDTKVKLIKQELDKYKNAVTELQLLMQNTPAVNNRARREAPQYMDYTINTTKNLNVSISKKRKRRFLGFLLGVGSAIASGIAVSKVLHLEGEVNKIKNALQLTNKAVVSLSNGVSVLTSKVLDLKNYINNQLLPIVNQQSCRISNIETVIEFQQKNSRLLEITREFSVNAGVTTPLSTYMLTNSELLSLINDMPITNDQKKLMSSNVQIVRQQSYSIMSIIKEEVLAYVVQLPIYGVIDTPCWKLHTSPLCTTNIKEGSNICLTRTDRGWYCDNAGSVSFFPQADTCKVQSNRVFCDTMNSLTLPSEVSLCNTDIFNSKYDCKIMTSKTDISSSVITSLGAIVSCYGKTKCTASNKNRGIIKTFSNGCDYVSNKGVDTVSVGNTLYYVNKLEGKNLYVKGEPIINYYDPLVFPSDEFDASISQVNEKINQSLAFIRRSDELLHNVNTGKSTTNIMITAIIIVIIVVLLSLIAIGLLLYCKAK

SEQ ID NO: 8994 - protein, 553 aa, Artificial Sequence
  derived and/or modified protein sequence (wt) from HRSV__AVQ93552.1__F-del
MELLIHRSSAIFLTLAINALYPTSSQNITEEFYQSTCSAVSRGYLSALRTGWYTSVITIELSNIKETKCNGTDTKVKLIKQELDKYKNAVTELQLLMQNTPAVNNRARREALQYMNYTINTTKNLNVSISKKRKRRFLGFLLGVGSAIASGIAVSKVLHLEGEVNKIKNALQLTNKAVVSLSNGVSVLTSKVLDLKNYINNQLLPIVNQQSCRISNIETVIEFQQKNSRLLEITREFSVNAGVTTPLSTYMLTNSELLSLINDMPITNDQKKLMSSNVQIVRQQSYSIMSIIKEEVLAYVVQLPIYGVIDTPCWKLHTSPLCTTNIKEGSNICLTRTDRGWYCDNAGSVSFFPQADTCKVQSNRVFCDTMNSLTLPSEVSLCNTDIFNSKYDCKIMTSKTDISSSVITSLGAIVSCYGKTKCTASNKNRGIIKTFSNGCDYVSNKGVDTVSVGNTLYYVNKLEGKNLYVKGEPIINYYDPLVFPSDEFDASISQVNEKINQSLAFIRRSDELLHNVNTGKSTTNIMITAIIIVIIVVLLSLIAIGLLLYCKAK

SEQ ID NO: 8995 - protein, 553 aa, Artificial Sequence
  derived and/or modified protein sequence (wt) from HRSV__AVQ93556.1__F-del
MELLIHRSSAIFLTLAINALYLTSSQNITEEFYQSTCSAVSRGYLSALRTGWYTSVITIELSNIKETKCNGTDTKVKLIKQELDKYKNAVTELQLLMQNTPAVNNRARREAPQYMNYTINTTKNLNVSISKKRKRRFLGFLLGVGSAIASGIAVSKVLHLEGEVNKIKNALQLTNKAVVSLSNGVSVLTSKVLDLKNYINNQLLPIVNQQSCRISNIETVIEFQQKNSRLLEITREFSVNAGVTTPLSTYMLTNSELLSLINDMPITNDQKKLMSSNVQIVRQQSYSIMSIIKEEVLAYVVQLPIYGVIDTPCWKLHTSPLCTTNIKEGSNICLTRTDRGWYCDNAGSVSFFPQADTCKVQSNRVFCDTMNSLTLPSEVSLCNTDIFNSKYDCKIMTSKTDISSSVITSLGAIVSCYGKTKCTASNKNRGIIKTFSNGCDYVSNKGVNTVSVGNTLYYVNKLEGKNLYVKGEPIINYYDPLVFPSDEFDASISQVNEKINQSLAFIRRSDELLHNVNTGKSTTNIMITAIIIVIIVVLLSLIAIGLLLYCKAK

SEQ ID NO: 8996 - protein, 553 aa, Artificial Sequence
  derived and/or modified protein sequence (wt) from HRSV__AVQ93471.1__F-del
MELPIFKTNAITTILAAVTLCFASSQNITEEFYQSTCSAVSKGYLSALRTGWYTSVITIELSNIKENKCNGTDAKVKLIKQELDKYKNAVTELQLLMQSTPAANSRARRELPRFMNYTLNNTRNTNVTLSKKRKRRFLGFLLGVGSAIASGIAVSKVLHLEGEVNKIKSALLSTNKAVVSLSNGVSVLTSKVLDLKNYIDKQLLPIVNKQSCSISNIETVIEFQQKNNRLLEITREFSVNAGVTTPVSTYMLTNSELLSLINDMPITNDQKKLMSSNVQIVRQQSYSIMSIIKEEVLAYVVQLPLYGVIDTPCWKLHTSPLCTTNTKEGSNICLTRTDRGWYCDNAGSVSFFPQAETCKVQSNRVFCDTMNSLTLPSEVNLCNIDIFNPKYDCKIMTSKTDVSSSVITSLGAIVSCYGKTKCTASNKNRGIIKTFSNGCDYVSNKGVDTVSVGNTLYYVNKQEGKSLYVKGEPIINFYDPLVFPSDEFDASISQVNEKINQSLAFIRKSDELLHNVNAGKSTTNIMITTIIIVIIVILLALIAVGLLLYCKAR

SEQ ID NO: 8997 - protein, 553 aa, Artificial Sequence
  derived and/or modified protein sequence (wt) from HRSV__AVQ93458.1__F-del
MELPIFKTNAITTILAAVTLCFASSQNITEEFYQSTCSAVSKGYLSALRTGWYTSVITIELSNIKENKCNGTDAKVKLIKQELDKYKNAVTELQLLMQSTPAANSRARRELPRFMNYTLNNAKNTNVTLSKKRKRRFLGFLLGVGSAIASGIAVSKVLHLEGEVNKIKSALLSTNKAVVSLSNGVSVLTSKVLDLKNYIDKQLLPIVNKQSCSISNIETVIEFQQKNNRLLEITREFSVNAGVTTPVSTYMLTNSELLSLINDMPITNDQKKLMSSNVQIVRQQSYSIMSIIKEEVLAYVVQLPLYGVIDTPCWKLHTSPLCTTNTKEGSNICLTRTDRGWYCDNAGSVSFFPQAETCKVQSNRVFCDTMNSLTLPSEVNLCNIDIFNPKYDCKIMTSKTDVSSSVITSLGAIVSCYGKTKCTASNKNRGIIKTFSNGCDYVSNKGVDTVSVGNTLYYVNKQEGKSLYVKGEPIINFYDPLVFPSDEFDASISQVNEKINQSLAFIRKSDELLHNVNAGKSTTNIMITTIIIVIIVILLALIAVGLLLYCKAR

SEQ ID NO: 8998 - protein, 553 aa, Artificial Sequence
  derived and/or modified protein sequence (wt) from HRSV__AVQ93494.1__F-del
MELPILKTNAITTILAAVTLCFASSQNITEEFYQSTCSAVSKGYLSALRTGWYTSVITIELSNIKENKCNGTDAKVKLIKQELDKYKNAVTELQLLMQSTPAANSRARRELPRFMNYTLNNTKNTNVTLSKIRKRRFLGFLLGVGSAIASGIAVSKVLHLEGEVNKIKSALLSTNKAVVSLSNGISVLTSKVLDLKNYIDKQLLPIVNKQSCSISNIETVIEFQQKNNRLLEITREFSVNAGVTTPVSTYMLTNSELLSLINDMPITNDQKKLMSSNVQIVRQQSYSIMSIIKEEVLAYVVQLPLYGVIDTPCWKLHTSPLCTTNTKEGSNICLTRTDRGWYCDNAGSVSFFPQAETCKVQSNRVFCDTMNSLTLPSEVNLCNIDIFNPKYDCKIMTSKTDVSSSVITSLGAIVSCYGKTKCTASNKNRGIIKTFSNGCDYVSNKGVDTVSVGNTLYYVNKQEGKSLYVKGEPIINFYDPLVFPSDEFDASISQVNEKINQSLAFIRKSDELLHNVNAGKSTTNIMITTIIIVIIVILLALIAVGLLLYCKAR

SEQ ID NO: 8999 - protein, 553 aa, Artificial Sequence
  derived and/or modified protein sequence (wt) from HRSV__AVQ93470.1__F-del
MELPILKTNAITTILAAVTLCFASSQNITEEFYQSTCSAVSKGYLSALRTGWYTSVITIELSNIKENKCNGTDAKVKLIKQELDKYKNAVTELQLLMQSTPAANSRARRELPRFMNYTLNNTKNTNVTLSKKRKRRFLGFLLGVGSAIASGIAVSKVLHLEGEVSKIKSALLSTNKAVVSLSNGVSVLTSKVLDLKNYIDKQLLPIVNKQSCSISNIETVIEFQQKNNRLLEITREFSVNAGVTTPVSTYMLTNSELLSLINDMPITNDQKKLMSSNVQIVRQQSYSIMSIIKEEVLAYVVQLPLYGVIDTPCWKLHTSPLCTTNTKEGSNICLTRTDRGWYCDNAGSVSFFPQAETCKVQSNRVFCDTMNSLTLPSEVNLCNIDIFNPKYDCKIMTSKTDVSSSVITSLGAIVSCYGKTKCTASNKNRGIIKTFSNGCDYVSNKGVDTVSVGNTLYYVNKQEGKSLYVKGEPIINFYDPLVFPSDEFDASISQVNEKINQSLAFIRKSDELLHNVNAGKSTANIMITTIIIVIIVILLALIAVGLLLYCKAR

SEQ ID NO: 9000 - protein, 553 aa, Artificial Sequence
  derived and/or modified protein sequence (wt) from HRSV__AVQ93489.1__F-del
MELPILKTNAITTILAAVTLCFASSQNITEEFYQSTCSAVSKGYLSALRTGWYTSVITIELSNIKENKCNGTDAKVKLIKQELDKYKNAVTELQLLMQSTPAANSRARRELPRFMNYTLNNTKNTNVTLSKKRKRRFLGFLLGVGSAIASGIAVSKVLHLEGEVNKIKSALLSTNKAVVSLSNGVSVLTSKVLDLKNYIDKQLLPVVNKQSCSISNIETVIEFQQKNNRLLEITREFSVNAGVTTPVSTYMLTNSELLSLINDMPITNDQKKLMSSNVQIVRQQSYSIMSIIKEEVLAYVVQLPLYGVIDTPCWKLHTSPLCTTNTKEGSNICLTRTDRGWYCDNAGSVSFFPQAETCKVQSNRVFCDTMNSLTLPSEVNLCNIDIFNPKYDCKIMTSKTDVSSSVITSLGAIVSCYGKTKCTASNKNRGIIKTFSNGCDYVSNKGVDTVSVGNTLYYVNKQEGKSLYVKGEPIINFYDPLVFPSDEFDASISQVNEKINQSLAFIRKSDELLHNVNAGKSTTNIMITTIIIVIIVILLALIAVGLLLYCKAR

SEQ ID NO: 9001 - protein, 553 aa, Artificial Sequence
  derived and/or modified protein sequence (wt) from HRSV__AVQ93542.1__F-del
MELLIHRSSAIFLTLAINALYLTSSQNITEEFYQSTCSAVSRGYLSALRTGWYTSVITIELSNIKETKCNGTDTKVKLIKQELDKYKNAVTELQLLMQNTPAVNSRARREAPQYMNYTINTTKNLNVSISKKRKRRFLGFLLGVGSAIASGIAVSKVLHLEGEVNKIKNALQLTNKAVVSLSNGVSVLTSKVLDLKNYINNQLLPIVNQQSCRISNIETVIEFQQKNSRLLEITREFSVNAGVTTPLSTYMLTNSELLSLINDMPITNDQKKLMSSNVQIVRQQSYSIMSIIKEEVLAYVVQLPIYGVIDTPCWKLHTSPLCTTNIKEGSNICLTRTDRGWYCDNAGSVSFFPQADTCKVQSNRVFCDTMNSLTLPSEVSLCNTDIFNSKYDCKIMTSKTDISSSVITSLGAIVSCYGKTKCTASNKNRGIIKTFSNGCDYVSNKGVDTVSVGNTLYYVNKLEGKNLYVKGEPIINYYDPLVFPSDEFDASISQVNEKINQSLAFIRRSDELLHNVNTGKSTTNIMITAIIIVIIVVLLSLIAIGLLLYCKAK

SEQ ID NO: 9002 - protein, 553 aa, Artificial Sequence
  derived and/or modified protein sequence (wt) from HRSV__AVQ93472.1__F-del
MELPILKTNAITTIFAAVTLCFSSSQNITEKFYQSTCSAVSKGYLSALRTGWYTSVITIKLSNIKENKCNGTDAKVKLIKQELHKYKNAVTELQLLMQSTPPANNRARRELPRFMNYTLNNTKNNNVTLIKKRKRTFLGFLLGVGSAIASGIAVSKVLHLQGEVNKIKSALLSTNKAVVSLSNGVSVLTSKVLDLKNYIDKQLLPIVNKQSCSISNIETVIEFQQKNNRLLEITREFSVNAGVTTPVSTYMLTNSELLSLINDMPITNDQKKLMSNNVQIVRQQSYSIMSIIKEEVLAYVVQLPLYGVIDTPCWKLHTSPLCTTNTKEGSNICLTRTDRGWYCDNAGSVSFFPQAETCKVQSNRVFCDTMNSLTLPSEVNLCNIDIFNPKYDCKIMTSKTDVSSSVITSLGAIVSCYGKTKCTASNKNRGIIKTFSNGCDYVSNKGVDTVSVGNTLYYVNKQEGKSLYVKGEPIINFYDPLVFPSDEFDASISQVNEKINQSLAFIRKSDELLHNVNVGKSTTNIMITTIIIVIIVILLLLIAVGLFLYCKAR

SEQ ID NO: 9003 - protein, 553 aa, Artificial Sequence
  derived and/or modified protein sequence (wt) from HRSV__AVQ93514.1__F-del
MELPILKTNAITTILAAVTLCFASSQNITEEFYQSTCSAVSKGYLSALRTGWYTSVITIELSNIKENKCNGTDAKVKLIKQELDKYKNAVTELQLLMQSTPAANSRARRELPRFMNYTLNNTKNTNVTLSKKRKRRFLGFLLGVGSAIASGIAVSKVLHLEGEVNKIKSALLSTNKAVVSLSNGVSVLTSKVLDLKNYIDKQLLPIVNKQSCSISNIETVIEFQQKNSRLLEITREFSVNAGVTTPVSTYMLTNSELLSLINDMPITNDQKKLMSSNVQIVRQQSYSIMSIIKEEVLAYVVQLPLYGVIDTPCWKLHTSPLCTTNTKEGSNICLTRTDRGWYCDNAGSVSFFPQAETCKVQSNRVFCDTMNSLTLPSEVNLCNIDIFNPKYDCKIMTSKTDVSSSVITSLGAIVSCYGKTKCTASNKNRGIIKTFSNGCDYVSNKGVDTVSVGNTLYYVNKQEGKSLYVKGEPIINFYDPLVFPSDEFDASISQVNEKINQSLAFIRKSDELLHNVNAGKSTTNIMITTIIIVIIVILLALIAVGLLLYCKAR

SEQ ID NO: 9004 - protein, 553 aa, Artificial Sequence
  derived and/or modified protein sequence (wt) from HRSV__AVQ93485.1__F-del
MELPILKTNAITTILAAVTLCFASSQNITEEFYQSTCSAVSKGYLSALRTGWYTSVITIELSNIKENKCNGTDAKVKLIKQELDKYKNAVTKLQLLMQSTPAANSRARRELPRFMNYTLNNTKNTNVTLSKKRKRRFLGFLLGVGSAIASGIAVSKVLHLEGEVNKIKSALLSTNKAVVSLSNGVSVLTSKVLDLKNYIDKQLLPIVNKQSCSISNIETVIEFQQKNNRLLEITREFSVNAGVTTPVSTYMLTNSELLSLINDMPITNDQKKLMSSNVQIVRQQSYSIMSIIKEEVLAYVVQLPLYGVIDTPCWKLHTSPLCTTNTNEGSNICLTRTDRGWYCDNAGSVSFFPQAETCKVQSNRVFCDTMNSLTLPSEVNLCNIDIFNPKYDCKIMTSKTDVSSSVITSLGAIVSCYGKTKCTASNKNRGIIKTFSNGCDYVSNKGVDTVSVGNTLYYVNKQEGKSLYVKGEPIINFYDPLVFPSDEFDASISQVNEKINQSLAFIRKSDELLHNVNAGKSTTNIMITTIIIVIIVILLALIAVGLLLYCKAR

SEQ ID NO: 9005 - protein, 553 aa, Artificial Sequence
  derived and/or modified protein sequence (wt) from HRSV__AVQ93533.1__F-del
MELPILKTNAITTILAAVTLCFASSQNITEEFYQSTCSAVSKGYLSALRTGWYTSVITIELSNIKENKCNGTDAKVKLIKQELDKYKNAVTELQLLMQSTPAANSRARRELPRFMNYTLNNTKNTNVTLSKKRKRRFLGFLLGVGSAIASGIAVSKVLHLEGEVNKIKSALLSTNKAVVSLSNGVSVLTSKVLDLKNYIDKQLLPIVNKQSCSISNIETVIEFQQKNNRLLEITREFSVNAGVTTPVSTYMLTNSELLSLINDMPITNDQKKLMSSNVQIVRQQSYSIMSIIKEEVLAYVVQLPLYGVIDTPCWKIHTSPLCTTNTKEGSNICLTRTDRGWYCDNAGSVSFFPQAETCKVQSNRVFCDTMNSLTLPSEVNLCNIDIFNPKYDCKIMTSKTDVSSSVITSLGAIVSCYGKTKCTASNKNRGIIKTFSNGCDYVSNKGVDTVSVGNTLYYVNKQEGKSLYVKGEPIINFYDPLVFPSDEFDASISQVNEKINQSLAFIRKSDELLHNVNAGKSTTNIMITTIIIVIIVILLALIAVGLLLYCKAR

SEQ ID NO: 9006 - protein, 553 aa, Artificial Sequence
  derived and/or modified protein sequence (wt) from HRSV__AVQ93481.1__F-del
MELPILKTNAITTILAAVTLCFASSQNITEEFYQSTCSAVSKGYLSALRTGWYTSVITIELSNIKENKCNGTDAKVKLIKQELDKYKNAVTELQLLMQSTPAANSRARRELPRFMNYTLNNTKNTNVTLSKKRKRRFLGFLLGVGSAIASGIAVSKVLHLEGEVNKIKSALLSTNKAVVSLSNGVSVLTSKVLDLKNYIDKQLLPIVNKQSCSISNIETVIEFQQKNNRLLEITREFSVNAGVTTPVSTYMLTNSELLSLINDMPITNDQKKLMSSNVQIVRQQSYSIMSIIKEEVLAYVVQLPLYGVIDTPCWKLHTSPLCTTNTKEGSNICLTRTDRGWYCDNAGSVSFFPQAETCKVQSNRVFCDTMNSLTLPSEVNLCNIDIFNPKYDCTIMTSKTDVSSSVITSIGAIVSWYGKTKCTASNKNRGIIKTFCNGCDYVSNKGVDTVSVGNTLYYVNKQEGKSLYVKGEPIINFYDPLVFPSDEFDASISQVNEKINQSLAFIRKSDELLHNVNVGKSTTNIMITTIIIVIIVILLALIAVGLLISCKAR

SEQ ID NO: 9007 - protein, 553 aa, Artificial Sequence
  derived and/or modified protein sequence (wt) from HRSV__AVQ93546.1__F-del
MELLIHRSNAIFLTLAINALYLTSSQNITEEFYQSTCSAVSRGYLSALRTGWYTSVITIELSNIKETKCNGTDTKVKLIKQELDKYKNAVTELQLLMQNTPAVNNRARREAPQYMNYTINTTKNLNVSISKKRKRRFLGFLLGVGSAIASGIAVSKVLHLEGEVNKIKNALQLTNKAVVSLSNGVSVLTSKVLDLKNYINNQLLPIVNQQSCRISNIETVIEFQQKNSRLLEITREFSVNAGVTTPLSTYMLTNSELLSLINDMPITNDQKKLMSSNVQIVRQQSYSIMSIIKEEVLAYVVQLPIYGVIDTPCWKLHTSPLCTTNIKEGSNICLTRTDRGWYCDNAGSVSFFPQADTCKVQSNRVFCDTMNSLTLPSEVSLCNTDIFNSKYDCKIMTSKTDISSSVITSLGAIVSCYGKTKCTASNKNRGIIKTFSNGCDYVSNKGVDTVSVGNTLYYVNKLEGKNLYVKGEPIINYYDPLVFPSDEFDASISQVNEKINQSLAFIRRSDELLHNVNTGKSTTNIMITAIIIVIIVVLLSLIAIGLLLYCKAK

SEQ ID NO: 9008 - protein, 553 aa, Artificial Sequence
  derived and/or modified protein sequence (wt) from HRSV__AVQ93512.1__F-del
MELPILKTNAITTILAAVTFCFASSQNITEEFYQSTCSAVSKGYLSALRTGWYTSVITIELSNIKENKCNGTDAKVKLIKQELDKYKNAVTELQLLMQSTPAANSRARRELPRFMNYTLNNTKNTNVTLSKKRKRRFLGFLLGVGSAIASGIAVSKVLHLEGEVNKIKSALLSTNKAVVSLSNGVSVLTSKVLDLKNYIDKQLLPIVNKQSCSISNIETVIEFQQKNNRLLEITREFSVNAGVTTPVSTYMLTNSELLSLINDMPITNDQKKLMSSNVQIVRQQSYSIMSIIKEEVLAYVVQLPLYGVIDTPCWKLHTSPLCTTNTKEGSNICLTRTDRGWYCDNAGSVSFFPQAETCKVQSNRVFCDTMNSLTLPSEVNLCNIDIFNPKYDCKIMTSKTDVSSSVITSLGAIVSCYGKTKCTASNKNRGIIKTFSNGCDYVSNKGVDTVSVGNTLYYVNKQEGKSLYVKGEPIINLYDPLVFPSDEFDASISQVNEKINQSLAFIRKSDELLHNVNAGKSTTNIMITTIIIVIIVILLALIAVGLLLYCKAR

SEQ ID NO: 9009 - protein, 553 aa, Artificial Sequence
  derived and/or modified protein sequence (wt) from HRSV__AVQ93554.1__F-del
MELLIHRSSAIFLTFAINALYLTSSQNITEEFYQSTCSAVSRGYLSALRTGWYTSVITIELSNIKETKCNGTDTKVKLIKQELDKYKNAVTELQLLMQNTPAVNNRARREAPQYMDYTINTTKNLNVSISKKRKRRFLGFLLGVGSAIASGIAVSKVLHLEGEVNKIKNALQLTNKAVVSLSNGVSVLTSKVLDLKNYINNQLLPIVNQQSCRISNIETVIEFQQKNSRLLEITREFSVNAGVTTPLSTYMLTNSELLSLINDMPITNDQKKLMSSNVQIVRQQSYSIMSIIKEEVLAYVVQLPIYGVIDTPCWKLHTSPLCTTNIKEGSNICLTRTDRGWYCDNAGSVSFFPQADTCKVQSNRVFCDTMNSLTLPSEVSLCNTDIFNSKYDCKIMTSKTDISSSVITSLGAIVSCYGKTKCTASNKNRGIIKTFSNGCDYVSNKGVDTVSVGNTLYYVNKLEGKNLYVKGEPIINYYDPLVFPSDEFDASISQVNEKINQSLAFIRRSDELLHNVNTGKSTTNIMITAIIIVIIVVLLSLIAIGLMLYCKAK

SEQ ID NO: 9010 - protein, 553 aa, Artificial Sequence
  derived and/or modified protein sequence (wt) from HRSV__AVQ93551.1__F-del
MELLIHRSSAIFLTLAINALYPTSSQNITEEFYQSTCSAVSRGYLSALRTGWYTSVITIELSNIKETKCNGTDTKVKLIKQELDKYKNAVTELQLLMQNTPAVNNRARREAPQYMNYTINTTKNLNVSISKKRKRRFLGFLLGVGSAIASGIAVSKVLHLEGEVNKIKNALQLTNKAVVSLSNGVSVLTSKVLDLKNYINNQLLPIVNQQSCRISNIETVIEFQQKNSRLLEITREFSVNAGVTTPLSTYMLTNSELLSLINDMPITNDQKKLMSSNVQIVRQQSYSIMSIIKEEVLAYVVQLPIYGVIDTPCWKLHTSPLCTTNIKEGSNICLTRTDRGWYCDNAGSVSFFPQADTCKVQSNRVFCDTMNSLTLPSEVSLCNTDIFNSKYDCKIMTSKTDISSSVITSLGAIVSCYGKTKCTASNKNRGIIKTFSNGCDYVSNKGVDTVSVGNTLYYVNKLEGKNLYVKGEPIINYYDPLVFPSDEFDASISQVNEKINQSLAFIRRSDELLHNVNTGKSTTNIMITAIIIVIIVVLLSLIAIGLLLYCKAK

SEQ ID NO: 9011 - protein, 553 aa, Artificial Sequence
  derived and/or modified protein sequence (wt) from HRSV__AVQ93547.1__F-del
MELLIHRSSAIFLTLAINALYLTSSQNITEEFYQSTCSAVSRGYLSALRTGWYTSVITIELSNIKETKCNGTDTKVKLIKQELDKYKNAVTELQLLMQNTPAINNRARREAPQYMNYTINTTKNLNVSISKKRKRRFLGFLLGVGSAIASGIAVSKVLHLEGEVNKIKNALQLTNKAVVSLSNGVSVLTSKVLDLKNYINNQLLPIVNQQSCRISNIETVIEFQQKNSRLLEITREFSVNAGVTTPLSTYMLTNSELLSLINDMPITNDQKKLMSSNVQIVRQQSYSIMSIIKEEVLAYVVQLPIYGVIDTPCWKLHTSPLCTTNIKEGSNICLTRTDRGWYCDNAGSVSFFPQADTCKVQSNRVFCDTMNSLTLPSEVSLCNTDIFNSKYDCKIMTSKTDISSSVITSLGAIVSCYGKTKCTASNKNRGIIKTFSNGCDYVSNKGVDTVSVGNTLYYVNKLEGKNLYVKGEPIINYYDPLVFPSDEFDASISQVNEKINQSLAFIRRSDELLHNVNTGKSTTNIMITAIIIVIIVVLLSLIAIGLLLYCKAK

SEQ ID NO: 9012 - protein, 553 aa, Artificial Sequence
  derived and/or modified protein sequence (wt) from HRSV__AVQ93558.1__F-del
MELLIHRSSAIFLTLAINALYLTSSQNITEEFYQSTCSAVSRGYLSALRTGWYTSVITIELSNIKETKCNGTDTKVKLIKQELDKYKNAVTELQLLMQNTPAVNNRARREAPQYMNYTINTTKNLYVSISKKRKRRFLGFLLGVGSAIASGIAVSKVLHLEGEVNKIKNALQSTNKAVVSLSNGVSVLTSKVLDLKNYINSQLLPIVNKQSCRISNIETVIEFQQKNSRLLEITREFSVNAGVTTPLSTYMLTNSELLSLIIDMPITNDQKKLMSSNVQIVRQQSYSIMSIIKEEVLAYVVQLPIYGVIDTPCWKLHTSPLCTTNIKEGSNICLTRTDRGWYCDNAGSVSFFPQADTCKVQSNRVFCDTMNSLTLPSEVSLCNTDIFNSKYDCKIMTSKTDISSSVITSLGAIVSCYGKTKCTASNKNRGIIKTFSNGCDYVSNKGVDTVSVGNTLYYVNKLEGKNLYVKGEPIINYYDPLVFPSDEFDASISQVNEKINQSLAFIRRSDELLHNVNTGKSTTNIMITAIIIVIIVVLLSLIAIGLLLYCKAK

SEQ ID NO: 9013 - protein, 553 aa, Artificial Sequence
  derived and/or modified protein sequence (wt) from HRSV__AVQ93461.1__F-del
MESPILKTNAITTILAAVTLCFASSQNITEEFYQSTCSAVSKGYLSALRTGWYTSVITIELSNIKENKCNGTDAKVKLIKQELDKYKNAVTELQLLMQSTPAANSRARRELPRFMNYTLNNAKNTNVTLSKKRKRRFLGFLLGVGSAIASGIAVSKVLHLEGEVNKIKSALLSTNKAVVSLSNGVSVLTSKVLDLKNYIDKQLLPIVNKQSCSISNIETVIEFQQKNNRLLEITREFSVNAGVTTPVSTYMLTNSELLSLINDMPITNDQKKLMSSNVQIVRQQSYSIMSIIKEEVLAYVVQLPLYGVIDTPCWKLHTSPLCTTNTKEGSNICLTRTDRGWYCDNAGSVSFFPQAETCKVQSNRVFCDTMNSLTLPSEVNLCNIDIFNPKYDCKIMTSKTDVSSSVITSLGAIVSCYGKTKCTASNKNRGIIKTFSNGCDYVSNKGVDTVSVGNTLYYVNKQEGKSLYVKGEPIINFYDPLVFPSDEFDASISQVNEKINQSLAFIRKSDELLHNVNAGKSTTNIMITTIIIVIIVILLALIAVGLLLYCKAR

SEQ ID NO: 9014 - protein, 553 aa, Artificial Sequence
  derived and/or modified protein sequence (wt) from HRSV__AVQ93500.1__F-del
MELPILKTNAITTILAAVTLCFASSQNITEEFYQSTCSAVSKGYLSALRTGWYTSVITIELSNIKENKCNGTDAKVKLIKQELDKYKNAVTELQLLMQSTPATNSRARRELPRFMNYTLNNTKNTNVTLSKKRKRRFLGFLLGVGSAIASGIAVSKVLHLEGEVNKIKSALLSTNKAVVSLSNGVSVLTSKVLDLKNYIDKQLLPIVNKQSCSISNIETVIEFQQKNNRLLEITREFSVNAGVTTPVSTYMLTNSELLSLINDMPITNDQKKLMSSNVQIVRQQSYSIMSIIKEEVLAYVVQLPLYGVIDTPCWKLHTSPLCTTNTKEGSNICLTRTDRGWYCDNAGSISFFPQAETCKVQSNRVFCDTMNSLTLPSEVNLCNIDIFNPKYDCKIMTSKTDVSSSVITSLGAIVSCYGKTKCTASNKNRGIIKTFSNGCDYVSNKGVDTVSVGNTLYYVNKQEGKSLYVKGEPIINFYDPLVFPSDEFDASISQVNEKINQSLAFIRKSDELLHNVNAGKSTTNIMITTIIIVIIVILLALIAVGLLLYCKAR

SEQ ID NO: 9015 - protein, 553 aa, Artificial Sequence
  derived and/or modified protein sequence (wt) from HRSV__AVQ93426.1__F-del
MELPILKTNAITTILAAVTLCFASSQNITEEFYQSTCSAVSKGYLSALRTGWYTSVITIELSNIKENKCNGTDAKVKLIKQELDKYKNAVTELQLLMQSTPAANSRARRELPRFMNYTLNNTKNTNVTLSKKRKRRFLGFLLGVGSAIASGIAVSKVLHLEGEVNKIKSALLSTNKAVVSLSNGVSVLTSKVLDLKNYIDKQLLPIVNKQSCSISNIETVIEFQQKNNRLLEITREFSVNAGVTTPVSTYMLTNSELLSLINDMPITNDQKKLMSSNVQIVRQQSYSIMSIIKEEVLAYVVQLPLYGVIDTPCWKLHTSPLCTTNTKEGSNICLTRTDRGWYCDNAGSVSFFPQAETCKVQSNRVFCDTMNSLTLPSEVNLCNIDIFNPKYDCKIMTSKTDVSSSVITSLGAIVSCYGKTKCTASNKNRGIIKTFSNGCDYVSNKGVDTVSVGNTLYYVNKQEGKSLYVKGEPIINFYDPLVFPSDEFDASISQVNEKINQSLAFIRKSDELLYNVNAGKSTTNIMITTIIIVIIVILLALIAVGLLLYCKAR

SEQ ID NO: 9016 - protein, 553 aa, Artificial Sequence
  derived and/or modified protein sequence (wt) from HRSV__AVQ93398.1__F-del
MELPILKINAITTILAAVTLCFASSQNITEEFYQSTCSAVSKGYLSALRTGWYTSVITIELSNIKENKCNGTDAKVKLIKQELDKYKNAVTELQLLMQSTPAANSRARRELPRFMNYTLNNTKNTNVTLSKKRKRRFLGFLLGVGSAIASGIAVSKVLHLEGEVNKIKSALLSTNKAVVSLSNGVSVLTSKVLDLKNYIDKQLLPIVNKQSCSISNIETVIEFQQKNNRLLEITREFSVNAGVTTPVSTYMLTNSELLSLINDMPITNDQKKLMSSNVQIVRQQSYSIMSIIKEEVLAYVVQLPLYGVIDTPCWKLHTSPLCTTNTKEGSNICLTRTDRGWYCDNAGSVSFFPQAETCKVQSNRVFCDTMNSLTLPSEVNLCNIDIFNPKYDCKIMTSKTDVSSSVITSLGAIVSCYGKTKCTASNKNRGIIKTFSNGCDYVSNKGVDTVSVGNTLYYVNKQEGKSLYVKGEPIINFYDPLVFPSDEFDASISQVNEKINQSLAFIRKSDELLHNVNAGKSTTNIMITTIIIVIIVILLALIAVGLLLYCKAR

SEQ ID NO: 9017 - protein, 553 aa, Artificial Sequence
  derived and/or modified protein sequence (wt) from HRSV__AVQ93401.1__F-del
MELPILKTNAITTILAAVTLYFASSQNITEEFYQSTCSAVSKGYLSALRTGWYTSVITIELSNIKENKCNGTDAKVKLIKQELDKYKNAVTELQLLMQSTPAANSRARRELPRFMNYTLNNTKNTNVTLSKKRKRRFLGFLLGVGSAIASGIAVSKVLHLEGEVNKIKSALLSTNKAVVSLSNGVSVLTSKVLDLKNYIDKQLLPIVNKQSCSISNIETVIEFQQKNNRLLEITREFSVNAGVTTPVSTYMLTNSELLSLINDMPITNDQKKLMSSNVQIVRQQSYSIMSIIKEEVLAYVVQLPLYGVIDTPCWKLHTSPLCTTNTKEGSNICLTRTDRGWYCDNAGSVSFFPQAETCKVQSNRVFCDTMNSLTLPSEVNLCNIDIFNPKYDCKIMTSKTDVSSSVITSLGAIVSCYGKTKCTASNKNRGIIKTFSNGCDYVSNKGVDTVSVGNTLYYVNKQEGKSLYVKGEPIINFYDPLVFPSDEFDASISQVNEKINQSLAFIRKSDELLHNVNAGKSTTNIMITTIIIVIIVILLALIAVGLLLYCKAR

SEQ ID NO: 9018 - protein, 553 aa, Artificial Sequence
  derived and/or modified protein sequence (wt) from HRSV__AVQ93361.1__F-del
MELPILKTNAITTILAAVTLCFASSQNITEEFYQSTCSAVSKGYLSALRTGWYTSVITIELSNIKENKCNGTDAKVKLIKQELDKYKNAVTELQLLMQSAPAANSRARRELPRFMNYTLNNTKNTNVTLSKKRKRRFLGFLLGVGSAIASGIAVSKVLHLEGEVNKIKSALLSTNKAVVSLSNGVSVLTSKVLDLKNYIDKQLLPIVNKQSCSISNIETVIEFQQKNNRLLEITREFSVNAGVTTPVSTYMLTNSELLSLINDMPITNDQKKLMSSNVQIVRQQSYSIMSIIKEEVLAYVVQLPLYGVIDTPCWKLHTSPLCTTNTKEGSNICLTRTDRGWYCDNAGSVSFFPQAETCKVQSNRVFCDTMNSLTLPSEVNLCNIDIFNPKYDCKIMTSKTDVSSSVITSLGAIVSCYGKTKCTASNKNRGIIKTFSNGCDYVSNKGVDTVSVGNTLYYVNKQEGKSLYVKGEPIINFYDPLVFPSDEFDASISQVNEKINQSLAFIRKSDELLHNVNAGKSTTNIMITTIIIVIIVILLALIAVGLLLYCKAR

SEQ ID NO: 9019 - protein, 553 aa, Artificial Sequence
  derived and/or modified protein sequence (wt) from HRSV__AVQ93408.1__F-del
MELPISKTNAITTILAAITLCFASSQNITEEFYQSTCSAVSKGYLSALRTGWYTSVITIELSNIKENKCNGTDAKVKLIKQELDKYKNAVTELQLLMQSTPAANSRARRELPRFMNYTLNNTKNTNVTLSKKRKRRFLGFLLGVGSAIASGIAVSKVLHLEGEVNKIKSALLSTNKAVVSLSNGVSVLTSKVLDLKNYIDKQLLPIVNKQSCSISNIETVIEFQQKNNRLLEITREFSVNAGVTTPVSTYMLTNSELLSLINDMPITNDQKKLMSSNVQIVRQQSYSIMSIIKEEVLAYVVQLPLYGVIDTPCWKLHTSPLCTTNTKEGSNICLTRTDRGWYCDNAGSVSFFPQAETCKVQSNRVFCDTMNSLTLPSEVNLCNIDIFNPKYDCKIMTSKTDVSSSVITSLGAIVSCYGKTKCTASNKNRGIIKTFSNGCDYVSNKGVDTVSVGNTLYYVNKQEGKSLYVKGEPIINFYNPLVFPSDEFDASISQVNEKINQSLAFIRKSDELLHNVNAGKSTTNIMITTIIIVIIVILLALIAVGLLLYCKAR

SEQ ID NO: 9020 - protein, 553 aa, Artificial Sequence
  derived and/or modified protein sequence (wt) from HRSV__AVQ93443.1__F-del
MELPILKTNAITTILAAVTLCFASSQNITEEFYQSTCSAVSKGYLSALRTGWYTSVITIELSNIKENKCNGTDAKVKLIKQELDKYKNAVTELQLLMQSTPAANSRARRELPRFMNYTLNNTKTTNVTLSKKRKRRFLGFLLGVGSAIASGIAVSKVLHLEGEVNKIKSALLSTNKAVVSLSNGVSVLTSKVLDLKNYIDKQLLPIVNKQSCSISNIETVIEFQQKNNRLLEITREFSVNAGVTTPVSTYMLTNSELLSLINDMPITNDQKKLMSSNVQIVRQQSYSIMSIIKEEVLAYVVQLPLYGVIDTPCWKLHTSPLCTTNTKEGSNICLTRTDRGWYCDNAGSVSFFPQAETCKVQSNRVFCDTMNSLTLPSEVNLCNIDIFNPKYDCKIMTSKTDVSSSVITSLGAIVSCYGKTKCTASNKNRGIIKTFSNGCDYVSNKGVDTVSVGNTLYYVNKQEGKSLYVKGEPIINFYDPLVFPSDEFDASISQVNEKINQSLAFIRKSDELLHNVNAGKSTTNIMITTIIIVIIVILLALIAVGLLLYCKAR

SEQ ID NO: 9021 - protein, 553 aa, Artificial Sequence
  derived and/or modified protein sequence (wt) from HRSV__AVQ93429.1__F-del
MELPILKTNAITTILAAVTLCFASSQNITEEFYQSTCSAVSKGYLSALRTGWYTSVITIELSNIKENKCNGTDAKVKLIKQELDKYKNAVTELQLLMQSTPAANSRARRELPRFMNYTLNNTKNTNVTLSKKRKRRFLGFLLGVGSAIASGIAVSKVLHLEGEVNKIKSALLSTNKAVVSLSNGVSVLTSKVLDLKNYIDKQLLPIVNKQSCSISNIETVIEFQQKNNRLLEITREFSVNAGVTTPVSTYMLTNSELLSLINDMPITNDQKKLMSSNVQIVRQQSYSIMSIIKEEVLAYVVQLPLYGVIDTPCWKLHTSPLCTTNTKEGSNICLTRTDRGWYCDNAGSVSFFPQAETCKVQSNRVFCDTMNSLTLPSEVNLCNIDIFNPKYDCKIMTSKTDVSSSVITSLGAIVSCYGKTKCTASNKNRGIIKTFSNGCDYVSNKGVDTVSVGNTLYYVNKQEGKNLYVKGEPIINFYDPLVFPSDEFDASISQVNEKINQSLAFIRKSDELLHNVNAGKSTTNIMITTIIIVIIVILLALIAVGLLLYCKAR

SEQ ID NO: 9022 - protein, 553 aa, Artificial Sequence
  derived and/or modified protein sequence (wt) from HRSV__AVQ93359.1__F-del
MELPILKTNAITTIFAAVTLCFASSQNITEEFYQSTCSAVSKGYLSALRTGWYTSVITIELSNIKENKCNGTDAKVKLIKQELDKYKNAVTELQLLMQSTPAANNRARRELPRFMNYTLNNTKNNNVTLSKKRKRRFLGFLLGVGSAIASGIAVSKVLHLEGEVNKIKSALLSTNKAVVSLSNGVSVLTSKVLDLKNYIDKQLLPIVNKQSCSISNIETVIEFQQKNNRLLEITREFSVNAGVTTPVSTYMLTNSELLSLINDMPITNDQKKLMSNNVQIVRQQSYSIMSIIKEEVLAYVVQLPLYGVIDTPCWKLHTSPLCTTNTKEGSNICLTRTDRGWYCDNAGSVSFFPQAETCKVQSNRVFCDTMNSLTLPSEVNLCNIDIFNPKYDCKIMTSKTDVSSSVITSLGAIVSCYGKTKCTASNKNRGIIKTFSNGCDYVSNKGVDTVSVGNTLYYVNKQEGKNLYVKGEPIINFYDPLVFPSDEFDASISQVNEKINQSLAFIRKSDELLHNVNVGKSTTNIMITTIIIVIIVILLLLIAVGLFLYCKAR

SEQ ID NO: 9023 - protein, 553 aa, Artificial Sequence
  derived and/or modified protein sequence (wt) from HRSV__AVQ93365.1__F-del
MELPILKTNAITTILAAVTLCFASSQNITEEFYQSTCSAVSKGYLSALRTGWYTSVITIELSNIKENKCNGTDAKVKLIKQELDKYKNAVTELQLLMQSTPAVNSRARRELPRFMNYTLNNTKNTNVTLSKKRKRRFLGFLLGVGSAIASGIAVSKVLHLEGEVNKIKSALLSTNKAVVSLSNGVSVLTSKVLDLKNYIDKQLLPIVNKQSCSISNIETVIEFQQKNNRLLEITREFSVNAGVTTPVSTYMLTNSELLSLINDMPITNDQKKLMSSNVQIVRQQSYSIMSIIKEEVLAYVVQLPLYGVIDTPCWKLHTSPLCTTNTKEGSNICLTRTDRGWYCDNAGSVSFFPQAETCKVQSNRVFCDTMNSLTLPSEVNLCNIDIFNPKYDCKIMTSKTDVSSSVITSLGAIVSCYGKTKCTASNKNRGIIKTFSNGCDYVSNKGVDTVSVGNTLYYVNKQEGKSLYVKGEPIINFYDPLVFPSDEFDASISQVNEKINQSLAFIRKSDELLHNVNAGKSTTNIMITTIIIVIIVILLALIAVGLLLYCKAR

SEQ ID NO: 9024 - protein, 553 aa, Artificial Sequence
  derived and/or modified protein sequence (wt) from HRSV__AVQ93366.1__F-del
MELPILKTNAITTILAAVTLCFASSQNITEEFYQSTCSAVSKGYLSALRTGWYTSVITIELSNIKENKCNGTDAKVKLIKQELDKYKNAVTELQLLMQSTPAANSRARRELPRFMNYTLNNTKNTNVTLSKKRKRRFLGFLLGVGSAIASGIAVSKVLHLEGEVNKIKSALLSTNKAVVSLSNGVSVLTSKVLDLKNYIDKQLLPIVNKQSCSISNIETVIEFQQKNNRLLEITREFSVNAGVTTPVSTYMLTNSELLSLINDMPITNDQKKLMSSNVQIIRQQSYSIMSIIKEEVLAYVVQLPLYGVIDTPCWKLHTSPLCTTNTKEGSNICLTRTDRGWYCDNAGSVSFFPQAETCKVQSNRVFCDTMNSLTLPSEVNLCNIDIFNPKYDCKIMTSKTDVSSSVITSLGAIVSCYGKTKCTASNKNRGIIKTFSNGCDYVSNKGVDTVSVGNTLYYVNKQEGKSLYVKGEPIINFYDPLVFPSDEFDASISQVNEKINQSLAFIRKSDELLHNVNAGKSTTNIMITTIIIVIIVILLALIAVGLLLYCKAR

SEQ ID NO: 9025 - protein, 553 aa, Artificial Sequence
  derived and/or modified protein sequence (wt) from HRSV__AVQ93402.1__F-del
MELPILKTNTITTILAAVTLCFASSQNITEEFYQSTCSAVSKGYLIALRTGWYTNVITIELSNIKENKCNGTDAKVKLIKQELDKYKNAVTELQLLMQSTPAANSRARRELPRFMNYTLNNTKNTNVTLSKKRKRRFLGFLLGVGSAIASGIAVSKVLHLEGEVNKIKSALLSTNKAVVSLSNGVSVLTSKVLDLKNYIDKQLLPIVNKQSCSISNIETVIEFQQKNNRLLEITREFSVNAGVTTPVSTYMLTNSELLSLINDMPITNDQKKLMSSNVQIVRQQSYSIMSIIKEEVLAYVVQLPLYGVIDTPCWKLHTSPLCTTNTKEGSNICLTRTDRGWYCDNAGSVSFFPQAETCKVQSNRVFCDTMNSLTLPSEVNLCNIDIFNPKYDCKIMTSKTDVSSSVITSLGAIVSCYGKTKCTASNKNRGIIKTFSNGCDYVSNKGVDTVSVGNTLYYVNKQEGKSLYVKGEPIINFYDPLVFPSDEFDASISQVNEKINQSLAFIRKSDELLHNVNAGKSTTNIMITTIIIVIIVILLALIAVGLLLYCKAR

SEQ ID NO: 9026 - protein, 553 aa, Artificial Sequence
  derived and/or modified protein sequence (wt) from HRSV__AVQ93377.1__F-del
MELPILKTNAITTILAAVTLCFASSQNITEEFYQSTCSAVSKGYLSALRTGWYTSVITIELSNIKENKCNGTDAKVKLIKQELDKYKNAVTELQLLMQSTPAANSRARRELPRFMNYTLNNTKNTNVTLSKKRKRRFLGFLLGVGSAIASGIAVSKVLHLEGEVNKIKSALLSTNKAVVSLSNGVSVLTSKVLDLKNYIDKQLLPIVNKQSCSISNIETVIEFQQKNNRLLEITREFSVNAGVTTPVSTYMLTNSELLSLINDMPITNDQKKLMSSNVQIVRQQSYSIMSIIKEEVLAYVVQLPLYGVIDTPCWKLHTSPLCTTNTKEGSNICLTRTDRGWYCDNAGSVSFFPQAETCKVQSNRVFCDTMNSLTLPSEVNLCNIDIFNPKYDCKIMTSKTDVSSSVITSLGAIVSCYGKTKCTASNKNRGIIKTFSNGCDYVSNKGVDTVSVGNTLYYVNKQEGKSLYVKGEPIINFYDPLVFPSDEFDASISQVNEKINQSLAFIRKSDELLHNVNAGKSTTNIMITTIIIVIIVILLALIAVGLFLYCKAR

SEQ ID NO: 9027 - protein, 553 aa, Artificial Sequence
  derived and/or modified protein sequence (wt) from HRSV__AVQ93412.1__F-del
MELPILKTNAITIILAAVTLCFASSQNITEEFYQSTCSAVSKGYLSALRTGWYTSVITIELSNIKENKCNGTDAKVKLIKQELDKYKNAVTELQLLMQSTPAANSRARRELPRFMNYTLNNTKNTSVTLSKKRKRRFLGFLLGVGSAIASGIAVSKVLHLEGEVNKIKSALLSTNKAVVSLSNGVSVLTSKVLDLKNYIDKQLLPIVNKQSCSISNIETVIEFQQKNNRLLEITREFSVNAGVTTPVSTYMLTNSELLSLINDMPITNDQKKLMSSNVQIVRQQSYSIMSIIKEEVLAYVVQLPLYGVIDTPCWKLHTSPLCTTNTKEGSNICLTRTDRGWYCDNAGSVSFFPQAETCKVQSNRVFCDTMNSLTLPSEVNLCNINIFNPKYDCKIMTSKTDVSSSVITSLGAIVSCYGKTKCTASNKNRGIIKTFSNGCDYVSNKGVDTVSVGNTLYYVNKQEGKSLYVKGEPIINFYDPLVFPSDEFDASISQVNEKINQSLAFIRKSDELLHNVNAGKSTTNIMITTIIIVIIVILLALIAVGLLLYCKAR

SEQ ID NO: 9028 - protein, 553 aa, Artificial Sequence
  derived and/or modified protein sequence (wt) from HRSV__AVQ93391.1__F-del
MELPILKTNAITTILAAVTLCFASSQNITEEFYQSTCSAVSKGYLSALRTGWYTSVITIELSNIKENKCNGTDAKVKLIKQELDKYKNAVTELQLLMQSTPAANSRARRELPRFMNYTLNNAKNTNVTLSKKRKRRFLGFLLGVGSAIASGIAVSKVLHLEGEVNKIKSALLSTNKAVVSLSNGVSVLTSKVLDLKNYIDKQLLPIVNKQSCSISNIETVIEFQQKNNRLLEITREFSVNAGVTTPVSTYMLTNSELLSLINDMPITNDQKKLMSSNVQIVRQQSYSIMSIIKEEVLAYVVQLPLYGVIDTPCWKLHTSPLCTTNTKEGSNICLTRTDRGWYCDNAGSVSFFPQAETCKVQSNRVFCDTMNSLTLPSEVNLCNIDIFNPKYDCKIMTSKTDVSSSVITSLGAIVSCYGKTKCTASNKNRGIIKTFSNGCDYVSNKGVDTVSVGNTLYYVNKQEGKSLYVKGEPIINFYDPLVFPSDEFDASISQVNEKINQSLAFIRKSDELLHNVNAGKSTTNIMITTIIIVIIVILLALIAVGLLLYCKAR

SEQ ID NO: 9029 - protein, 553 aa, Artificial Sequence
  derived and/or modified protein sequence (wt) from HRSV__AVQ93457.1__F-del
MELPILKTNAITTILAAVTLCIASSQNITEEFYQSTCSAVSKGYLSALRTGWYTSVITIELSNIKENKCNGTDAKVKLIKQELDKYKNAVTELQLLMQSTPAANNRARRELPRFMNYTLNNTKNTNVTLSKKRKRRFLGFLLGVGSAIASGIAVSKVLHLEGEVNKIKSALLSTNKAVVSLSNGVSVLTSKVLDLKNYIDKQLLPIVNKQSCSISNIETVIEFQQKNNRLLEITREFSVNAGVTTPVSTYMLTNSELLSLINDMPITNDQKKLMSSNVQIVRQQSYSIMSIIKEEVLAYVVQLPLYGVIDTPCWKLHTSPLCTTNTKEGSNICLTRTDRGWYCDNAGSVSFFPQAETCKVQSNRVFCDTMNSLTLPSEVNLCNIDIFNPKYDCKIMTSKTDVSSSVITSLGAIVSCYGKTKCTASNKNRGIIKTFSNGCDYVSNKGVDTVSVGNTLYYVNKQEGKSLYVKGEPIINFYDPLVFPSDEFDASISQVNEKINQSLAFIRKSDELLHNVNAGKSTTNIMITTIIIVIIVILLALIAVGLLLYCKAR

SEQ ID NO: 9030 - protein, 553 aa, Artificial Sequence
  derived and/or modified protein sequence (wt) from HRSV__AVQ93372.1__F-del
MELPILKTNAITTILAAVTLCFASSQNITEEFYQSTCSAVSKGYLSALRTGWYTSVITIELSNIKENKCNGTDAKVKLIKQELDKYKNAVTELQLLMQSTPAANSRARRELPRFMNYTLNNTKNTNVTLSKKRKRRFLGFLLGVGSAIASGIAVSKVLHLEGEVNKIKSALLSTNKAVVSLSNGVSVLTSKVLDLKNYIDKQLLPIVNKQSCSISNIETVIEFQQKNNRLLEITREFSVNAGVTTPVSTYMLTNSELLSLINDMPITNDQKKLMSSNVQIVRQQSYSIMSIIKEEVLAYVVQLPLYGVIDTPCWKLHTSPLCTTNTKEGSNICLTRTDRGWYCDNAGSVSFFPQAETCKVQSNRVFCDTMNSLTLPSEVNLCNIDIFNPKYDCKIMTSKTDVSSSVITSLGAIVSCYGKTKCTASNKNRGIIKTFSNGCDYVSNKGVDTVSVGNTLYYVNKQEGKSLYVKGEPIINFYNPLVFPSDEFDASISQVNEKINQSLAFIRKSDELLHNVNAGKSTTNIMITTIIIVIIVILLALIAVGLLLYCKAR

SEQ ID NO: 9031 - protein, 553 aa, Artificial Sequence
  derived and/or modified protein sequence (wt) from HRSV__AVQ93455.1__F-del
MELPIFKTNAITTILAAVTLCFASSQNITEEFYQSTCSAVSKGYLSALRTGWYTSVITIELSNIKENKCNGTDTKVKLIKQELDKYKNAVTELQLLMQSTPAANSRARRELPRFMNYTLNNAKNTNVTLSKKRKRRFLGFLLGVGSAIASGIAVSKVLHLEGEVNKIKSALLSTNKAVVSLSNGVSVLTSKVLDLKNYIDKQLLPIVNKQSCSISNIETVIEFQQKNNRLLEITREFSVNAGVTTPVSTYMLTNSELLSLINDMPITNDQKKLMSSNVQIVRQQSYSIMSIIKEEVLAYVVQLPLYGVIDTPCWKLHTSPLCTTNTKEGSNICLTRTDRGWYCDNAGSVSFFPQAETCKVQSNRVFCDTMNSLTLPSEVNLCNIDIFNPKYDCKIMTSKTDVSSSVITSLGAIVSCYGKTKCTASNKNRGIIKTFSNGCDYVSNKGVDTVSVGNTLYYVNKQEGKSLYVKGEPIINFYDPLVFPSDEFDASISQVNEKINQSLAFIRKSDELLHNVNAGKSTTNIMITTIIIVIIVILLALIAVGLLLYCKAR

SEQ ID NO: 9032 - protein, 553 aa, Artificial Sequence
  derived and/or modified protein sequence (wt) from HRSV__AVQ93364.1__F-del
MELPILKTNAITTILAVVTLCFASSQNITEEFYQSTCSAVSKGYLSALRTGWYTSVITIELSNIKENKCNGTDAKVKLIKQELDKYKNAVTELQLLMQSTPAANSRARRELPRFMNYTLNNTKNTNVTLSKKRKRRFLGFLLGVGSAIASGIAVSKVLHLEGEVNKIKSALLSTNKAVVSLSNGVSVLTSKVLDLKNYIDKQLLPIVNKQSCSISNIETVIEFQQKNNRLLEITREFSVNAGVTTPVSTYMLTNSELLSLINDMPITNDQKKLMSSNVQIIRQQSYSIMSIIKEEVLAYVVQLPLYGVIDTPCWKLHTSPLCTTNTKEGSNICLTRTDRGWYCDNAGSVSFFPQAETCKVQSNRVFCDTMNSLTLPSEVNLCNIDIFNPKYDCKIMTSKTDVSSSVITSLGAIVSCYGKTKCTASNKNRGIIKTFSNGCDYVSNKGVDTVSVGNTLYYVNKQEGKSLYVKGEPIINFYDPLVFPSDEFDASISQVNEKINQSLAFIRKSDELLHNVNAGKSTTNIMITTIIIVIIVILLALIAVGLLLYCKAR

SEQ ID NO: 9033 - protein, 553 aa, Artificial Sequence
  derived and/or modified protein sequence (wt) from HRSV__AVQ93378.1__F-del
MQLPILKIYAITSILAAVTLYFASSQNITEEFYQSTCSAVSKGYLSALRTGWYTSVITIELSNIKENKCNGTDAKVKLIKQELDKYKNAVTELQLLMQSTPAANSRARRELPRFMNYTLNNTKNTNVTLSKKRKRRFLGFLLGVGSAIASGIAVSKVLHLEGEVNKIKSALLSTNKAVVSLSNGVSVLTSKVLDLKNYIDKQLLPIVNKQSCSISNIETVIEFQQKNNRLLEITREFSVNAGVTTPVSTYMLTNSELLSLINDMPITNDQKKLMSSNVQIVRQQSYSIMSIIKEEVLAYVVQLPLYGVIDTPCWKLHTSPLCTTNTKEGSNICLTRTDRGWYCDNAGSVSFFPQAETCKVQSNRVFCDTMNSLTLPSEVNLCNIDIFNPKYDCKIMTSKTDVSSSVITSLGAIVSCYGKTKCTASNKNRGIIKTFSNGCDYVSNKGVDTVSVGNTLYYVNKQEGKSLYVKGEPIINFYDPLVFPSDEFDASISQVNEKINQSLAFIRKSDELLHNVNAGKSTTNIMITTIIIVIIVILLALIAVGLLLYCKAR

SEQ ID NO: 9034 - protein, 553 aa, Artificial Sequence
  derived and/or modified protein sequence (wt) from HRSV__AVQ93393.1__F-del
MELPILKTNAITTILAAVTLCFASSQNITEEFYQSTCSAVSKGYLSALRTGWYTSVITIELSNIKENKCNGTDAKVKLIKQELDKYKNAVTELQLLMQSTPAANSRARRELPRFMNYTLNNAKNTNVTLSKKRKRRFLGFLLGVGSAIASGIAVSKVLHLEGEVNKIKSALLSTNKAVVSLSNGVSVLTSKVLDLKNYIDKQLLPIVNKQSCSISNIETVIEFQQKNNRLLEITREFSVNAGVTTPVSTYMLTNSELLSLINDMPITNDQKKLMSSNVQIVRQQSYSIMSIIKEEVLAYVVQLPLYGVIDTPCWKLHTSPLCTTNTKEGSNICLTRTDRGWYCDNAGSVSFFPQAETCKVQSNRVFCDTMNSLTLPSEVNLCNIDIFNPKYDCKIMTSKTDVSSSVITSLGAIVSCYGKTKCTASNKNRGIIKTFSNGCDYVSNKGVDTVSVGNTLYYVNKQEGKSLYVKGKPIINFYDPLVFPSDEFDASISQVNEKINQSLAFIRKSDELLHNVNAGKSTTNIMITTIIIVIIVILLALIAVGLLLYCKAR

SEQ ID NO: 9035 - protein, 553 aa, Artificial Sequence
  derived and/or modified protein sequence (wt) from HRSV__AVQ93362.1__F-del
MELPILKTNAITTILAAVTLCFASSQNITEEFYQSTCSAVSKGYLSALRTGWYTSVITIELSNIKENKCNGTDAKVKLIKQELDKYKNAVTELQLLMQSTPAANSRARRELPRFMNYTLNNTKNTNVTLSKKRKRRFLGFLLGVGSAIASGIAVSKVLHLEGEVNKIKSALLSTNKAVVSLSNGVSVLTSKVLDLKNYIDKQLLPIVNKQSCSISNIETVIEFQQKNNRLLEITREFSVNAGVTTPVSTYMLTNSELLSLINDMPITNDQKKLMSSNVQIVRQQSYSIMSIIKEEVLAYVVQLPLYGVIDTPCWKLHTSPLCTTNTKEGSNICLTRTDRGWYCDNAGSVSFFPQAETCKVQLNRVFCDTMNSLTLPSEVNLCNIDIFNPKYDCKIMTSKTDVSSSVITSLGAIVSCYGKTKCTASNKNRGIIKTFSNGCDYVSNKGVDTVSVGNTLYYVNKQEGKSLYVKGEPIINFYDPLVFPSDEFDASISQVNEKINQSLAFIRKSDELLHNVNAGKSTTNIMITTIIIVIIVILLALIAVGLLLYCKAR

SEQ ID NO: 9036 - protein, 553 aa, Artificial Sequence
  derived and/or modified protein sequence (wt) from HRSV__AVQ93585.1__F-del
MELLIHRSSAIFLTLVINALYLTSSQNITEEFYQSTCSAVSRGYLSALRTGWYTSVITIELSNIKETKCNGTDTKVKLIKQELDKYKNAVTELQLLMQNTPAVNNRARREAPQYMNYTINTTKNLNVSISKKRKRRFLGFLLGVGSAIASGIAVSKVLHLEGEVNKIKNALQLTNKAVVSLSNGVSVLTSKVLDLKNYINNQLLPIVNQQSCRISNIETVIEFQQKNSRLLEITREFSVNAGVTTPLSTYMLTNSELLSLINDMPITNDQKKLMSSNVQIVRQQSYSIMSIIKEEVLAYVVQLPIYGVIDTPCWKLHTSPLCTTNIKEGSNICLTRTDRGWYCDNAGSVSFFPQADTCKVQSNRVFCDTMNSLTLPSEVSLCNTDIFNSKYDCKIMTSKTDISSSVITSLGAIVSCYGKTKCTASNKNRGIIKTFSNGCDYVSNKGVDTVSVGNTLYYVNKLEGKNLYVKGEPIINYYDPLVFPSDEFDASISQVNEKINQSLAFIRRSDELLHNVNTGKSTTNIMITAIIIVIIVVLLSLIAIGLLLYCKAK

SEQ ID NO: 9037 - protein, 553 aa, Artificial Sequence
  derived and/or modified protein sequence (wt) from HRSV__ART28504.1__F-del
MELPILKTNAITTILAAVTLCFASSQNITEEFYQSTCSAVSKGYLSALRTGWYTSVITIELSNIKENKCNGTDAKVKLIKQELDKYKNAVTELQLLMQSTPATNSRARRELPRFMNYTLNNTKNTNVTLSKKRKRRFLGFLLGVGSAIASGIAVSKVLHLEGEVNKIKSALLSTNKAVVSLSNGVSVLTSKVLDLKNYIDKQLLPIVNKQSCSISNIETVIEFQQKNNRLLEITREFSVNAGVTTPVSTYMLTNSELLSLINDMPITNDQKKLMSSNVQIVRQQSYSIMSIIKEEVLAYVVQLPLYGVIDTPCWKLHTSPLCTTNTKEGSNICLTRTDRGWYCDNAGSVSFFPQAETCKVQSNRVFCDTMNSLTLPSEVNLCNIDIFNPKYDCKIMTSKTDVSSSVITSLGAIVSCYGKTKCTASNKNRGIIKTFSNGCDYVSNKGVDTVSVGNTLYYVNKQEGKSLYVKGEPIINFYDPLVFPSDEFDASISQVNEKINQSLAFIRKSDELLHNVNAGKSTTNIMITTIIIVIIVILLALIAVGLLLYCKAR

SEQ ID NO: 9038 - protein, 553 aa, Artificial Sequence
  derived and/or modified protein sequence (wt) from HRSV__AVQ93404.1__F-del
MELPISKTNAITTILAAITLCFASSQNITEEFYQSTCSAVSKGYLSALRTGWYTSVITIELSNIKENKCNGTDAKVKLIKQELDKYKNAVTELQLLMQSTPAANSRARRELPRFMNYTLNNTKNTNVTLSKKRKRRFLGFLLGVGSAIASGIAVSKVLHLEGEVNKIKSALLSTNKAVVSLSNGVSVLTSKVLDLKNYIDKQLLPIVNKQSCSISNIETVIEFQQKNNRLLEITREFSVNAGVTTPVSTYMLTNSELLSLINDMPITNDQKKLMSSNVQIVRQQSYSIMSIIKEEVLAYVVQLPLYGVIDTPCWKLHTSPLCTTNTKEGSNICLTRTDRGWYCDNAGSVSFFPQAETCKVQSNRVFCDTMNSLTLPSEVNLCNIDIFNPKYDCKIMTSKTDVSSSVITSLGAIVSCYGKTKCTASNKNRGIIKTFSNGCDYVSNKGVDTVSVGNTLYYVNKQEGKSLYVKGEPIINFYDPLVFPSDEFDASISQVNEKINQSLAFIRKSDELLHNVNAGKSTTNIMITTIIIVIIVILLALIAVGLLLYCKAR

SEQ ID NO: 9039 - protein, 553 aa, Artificial Sequence
  derived and/or modified protein sequence (wt) from HRSV__AOS49123.1__F-del
MELPILKTNTITTILAAVTLCFASSQNITEEFYQSTCSAVSKGYLSALRTGWYTSVITIELSNIKENKCNGTDAKVKLIKQELDKYKNAVTELQLLMQSTPAANSRARRELPRFMNYTLNNTKNTNVTLSKKRKRRFLGFLLGVGSAIASGIAVSKVLHLEGEVNKIKSALLSTNKAVVSLSNGVSVLTSKVLDLKNYIDKQLLPIVNKQSCSISNIETVIEFQQKNNRLLEITREFSVNAGVTTPVSTYMLTNSELLSLINDMPITNDQKKLMSSNVQIVRQQSYSIMSIIKEEVLAYVVQLPLYGVIDTPCWKLHTSPLCTTNTKEGSNICLTRTDRGWYCDNAGSVSFFPQAETCKVQSNRVFCDTMNSLTLPSEVNLCNIDIFNPKYDCKIMTSKTDVSSSVITSLGAIVSCYGKTKCTASNKNRGIIKTFSNGCDYVSNKGVDTVSVGNTLYYVNKQEGKSLYVKGEPIINFYDPLVFPSDEFDASISQVNEKINQSLAFIRKSDELLHNVNAGKSTTNIMITTIIIVIIVILLALIAVGLLLYCKAR

SEQ ID NO: 9040 - protein, 553 aa, Artificial Sequence
  derived and/or modified protein sequence (wt) from HRSV__AOS48496.1__F-del
MELPILKTNAITTILAAVTLCFASSQNITEEFYQSTCSAVSKGYLSALRTGWYTSVITIELSNIKENKCNGTDAKVKLIKQELDKYKNAVTELQLLMQSTPAANSRARRELPRFMNYTLNNTKNTNVTLSKKRKRRFLGFLLGVGSAIASGIAVSKVLHLEGEVNKIKSALLSTNKAVVSLSNGVSVLTSKVLDLKNYIDKQLLPIVNKQSCSISNIETVIEFQQKNNRLLEITREFSVNAGVTTPVSTYMLTNSELLSLINDMPITNDQKKLMSSNVQIVRQQSYSIMSIIKEEVLAYVVQLPLYGVIDTPCWKLHTSPLCTTNTKEGSNICLTRTDRGWYCDNAGSVSFFPQAETCKVQSNRVFCDTMNSLTLPNEVNLCNIDIFNPKYDCKIMTSKTDVSSSVITSLGAIVSCYGKTKCTASNKNRGIIKTFSNGCDYVSNKGVDTVSVGNTLYYVNKQEGKSLYVKGEPIINFYDPLVFPSDEFDASISQVNEKINQSLAFIRKSDELLHNVNAGKSTTNIMITTIIIVIIVILLALIAVGLLLYCKAR

SEQ ID NO: 9041 - protein, 553 aa, Artificial Sequence
  derived and/or modified protein sequence (wt) from HRSV__AMT78271.1__F-del
MELPILKTNAITTILAAVTFCFASSQNITEEFYQSTCSAVSKGYLSALRTGWYTSVITIELSNIKENKCNGTDAKVKLIKQELDKYKNAVTELQLLMQSTPAANSRARRELPRFMNYTLNNTKNTNVTLSKKRKRRFLGFLLGVGSAIASGIAVSKVLHLEGEVNKIKSALLSTNKAVVSLSNGVSVLTSKVLDLKNYIDKQLLPIVNKQSCSISNIETVIEFQQKNNRLLEITREFSVNAGVTTPVSTYMLTNSELLSLINDMPITNDQKKLMSSNVQIVRQQSYSIMSIIKEEVLAYVVQLPLYGVIDTPCWKLHTSPLCTTNTKEGSNICLTRTDRGWYCDNAGSVSFFPQAETCKVQSNRVFCDTMNSLTLPSEVNLCNIDIFNPKYDCKIMTSKTDVSSSVITSLGAIVSCYGKTKCTASNKNRGIIKTFSNGCDYVSNKGVDTVSVGNTLYYVNKQEGKSLYVKGEPIINFYDPLVFPSDEFDASISQVNEKINQSLAFIRKSDELLHNVNAGKSTTNIMITTIIIVIIVILLALIAVGLLLYCKAR

SEQ ID NO: 9042 - protein, 553 aa, Artificial Sequence
  derived and/or modified protein sequence (wt) from HRSV__AHX57174.1__F-del
MELPILKTNAITTILAAVTLCFASSQNITEEFYQSTCSAVSKGYLSALRTGWYTSVITIELSNIKENKCNGTDAKVKLIKQELDKYKNAVTELQLLMQSTPAANSRARRELPRFMNYTLNNTKNTNVTLSKKRKRRFLGFLLGVGSAIASGIAVSKVLHLEGEVNKIKSALLSTNKAVVSLSNGVSVLTSKVLDLKNYIDKQLLPIVNKQSCSISNIETVIEFQQKNNRLLEITREFSVNAGVTTPVSTYMLTNSELLSLINDMPITNDQKKLMSSNVQIVRQQSYSIMSIIKEEVLAYVVQLPLYGVIDTPCWKLHTSPLCTTNTKEGSNICLTRTDRGWYCDNAGSVSFFPQAETCKVQSNRVFCDTMNSLTLPSEVNLCNIDIFNPKYDCKIMTSKTDVSSSVITSLGAIVSCYGKTKCTASNKNRGIIKTFSNGCDYVSNKGVDTVSVGNTLYYVNKQEGKSLYVKGKPIINFYDPLVFPSDEFDASISQVNEKINQSLAFIRKSDELLHNVNAGKSTTNIMITTIIIVIIVILLALIAVGLLLYCKAR

SEQ ID NO: 9043 - protein, 553 aa, Artificial Sequence
  derived and/or modified protein sequence (wt) from HRSV__AHW81390.1__F-del
MELPIFKTNAITTILAAVTLCFASSQNITEEFYQSTCSAVSKGYLSALRTGWYTSVITIELSNIKENKCNGTDAKVKLIKQELDKYKNAVTELQLLMQSTPAANSRARRELPRFMNYTLNNTKNTNVTLSKKRKRRFLGFLLGVGSAIASGIAVSKVLHLEGEVNKIKSALLSTNKAVVSLSNGVSVLTSKVLDLKNYIDKQLLPIVNKQSCSISNIETVIEFQQKNNRLLEITREFSVNAGVTTPVSTYMLTNSELLSLINDMPITNDQKKLMSSNVQIVRQQSYSIMSIIKEEVLAYVVQLPLYGVIDTPCWKLHTSPLCTTNTKEGSNICLTRTDRGWYCDNAGSVSFFPQAETCKVQSNRVFCDTMNSLTLPSEVNLCNIDIFNPKYDCKIMTSKTDVSSSVITSLGAIVSCYGKTKCTASNKNRGIIKTFSNGCDYVSNKGVDTVSVGNTLYYVNKQEGKSLYVKGEPIINFYDPLVFPSDEFDASISQVNEKINQSLAFIRKSDELLHNVNAGKSTTNIMITTIIIVIIVILLALIAVGLLLYCKAR

SEQ ID NO: 9044 - protein, 553 aa, Artificial Sequence
  derived and/or modified protein sequence (wt) from HRSV__AHV81506.1__F-del
MELPILKTNAIITILAAVTLCFASSQNITEEFYQSTCSAVSKGYLSALRTGWYTSVITIELSNIKENKCNGTDAKVKLIKQELDKYKNAVTELQLLMQSTPAANSRARRELPRFMNYTLNNTKNTNVTLSKKRKRRFLGFLLGVGSAIASGIAVSKVLHLEGEVNKIKSALLSTNKAVVSLSNGVSVLTSKVLDLKNYIDKQLLPIVNKQSCSISNIETVIEFQQKNNRLLEITREFSVNAGVTTPVSTYMLTNSELLSLINDMPITNDQKKLMSSNVQIVRQQSYSIMSIIKEEVLAYVVQLPLYGVIDTPCWKLHTSPLCTTNTKEGSNICLTRTDRGWYCDNAGSVSFFPQAETCKVQSNRVFCDTMNSLTLPSEVNLCNIDIFNPKYDCKIMTSKTDVSSSVITSLGAIVSCYGKTKCTASNKNRGIIKTFSNGCDYVSNKGVDTVSVGNTLYYVNKQEGKSLYVKGEPIINFYDPLVFPSDEFDASISQVNEKINQSLAFIRKSDELLHNVNAGKSTTNIMITTIIIVIIVILLALIAVGLLLYCKAR

SEQ ID NO: 9045 - protein, 553 aa, Artificial Sequence
  derived and/or modified protein sequence (wt) from HRSV__AFX60128.1__F-del
MELPILKTNAITTILAAVTLCFTSSQNITEEFYQSTCSAVSKGYLSALRTGWYTSVITIELSNIKENKCNGTDAKVKLIKQELDKYKNAVTELQLLMQSTPAANSRARRELPRFMNYTLNNTKNTNVTLSKKRKRRFLGFLLGVGSAIASGIAVSKVLHLEGEVNKIKSALLSTNKAVVSLSNGVSVLTSKVLDLKNYIDKQLLPIVNKQSCSISNIETVIEFQQKNNRLLEITREFSVNAGVTTPVSTYMLTNSELLSLINDMPITNDQKKLMSSNVQIVRQQSYSIMSIIKEEVLAYVVQLPLYGVIDTPCWKLHTSPLCTTNTKEGSNICLTRTDRGWYCDNAGSVSFFPQAETCKVQSNRVFCDTMNSLTLPSEVNLCNIDIFNPKYDCKIMTSKTDVSSSVITSLGAIVSCYGKTKCTASNKNRGIIKTFSNGCDYVSNKGVDTVSVGNTLYYVNKQEGKSLYVKGEPIINFYDPLVFPSDEFDASISQVNEKINQSLAFIRKSDELLHNVNAGKSTTNIMITTIIIVIIVILLALIAVGLLLYCKAR

SEQ ID NO: 9046 - protein, 553 aa, Artificial Sequence
  derived and/or modified protein sequence (wt) from HRSV__AFX60129.1__F-del
MELPILKTNAITTILAAVTLCFASSQNITEEFYQSTCSAVSKGYLSALRTGWYTSVITIELSNIKENKCNGTDAKVKLIKQELDKYKNAVTELQLLMQSTPAANSRARRELPRFMNYTLNNTKNTNITLSKKRKRRFLGFLLGVGSAIASGIAVSKVLHLEGEVNKIKSALLSTNKAVVSLSNGVSVLTSKVLDLKNYIDKQLLPIVNKQSCSISNIETVIEFQQKNNRLLEITREFSVNAGVTTPVSTYMLTNSELLSLINDMPITNDQKKLMSSNVQIVRQQSYSIMSIIKEEVLAYVVQLPLYGVIDTPCWKLHTSPLCTTNTKEGSNICLTRTDRGWYCDNAGSVSFFPQAETCKVQSNRVFCDTMNSLTLPSEVNLCNIDIFNPKYDCKIMTSKTDVSSSVITSLGAIVSCYGKTKCTASNKNRGIIKTFSNGCDYVSNKGVDTVSVGNTLYYVNKQEGKSLYVKGEPIINFYDPLVFPSDEFDASISQVNEKINQSLAFIRKSDELLHNVNAGKSTTNIMITTIIIVIIVILLALIAVGLLLYCKAR

SEQ ID NO: 9047 - protein, 553 aa, Artificial Sequence
  derived and/or modified protein sequence (wt) from HRSV__AEQ63389.1__F-del
MELPILKTNAITTILAAVTLCFASSQNITEEFYQSTCSAVSKGYLSALRTGWYTSVITIELSNIKENKCNGTDAKVKLIKQELDKYKNAVTELQLLMQSTPAANSRARRELPRFMNYTLNNTKNTNVTLSKKRKRRFLGFLLGVGSAIASGIAVSKVLHLEGEVNKIKSALLSTNKAVVSLSNGVSVLTSKVLDLKNYIDKQLLPIVNKQSCSISNIETVIEFQQKNNRLLEITREFSVNAGVTTPVSTYMLTNSELLSLINDMPITNDQKKLMSSNVQIVRQQSYSIMSIIKEEVLAYVVQLPLYGVIDTPCWKLHTSPLCTTNTKEGSNICLTRTDRGWYCDNAGSVSFFPQAETCKVQSNRVFCDTMNSLTLPSEVNLCNIDIFNPKYDCKIMTSKTDVSSSVITSLGAIVSCYGKTKCTASNKNRGIIKTFSNGCDYVSNKGVDTVSVGNTLYYVNKQEGKSLYVKGEPIINFYDPLVFPSDEFDASISQVNEKINQSLAFIRKSDELLHNVNAGKSTTNIMITTIIIVIIVILLALIAVGLLLYCKAR

SEQ ID NO: 9048 - protein, 553 aa, Artificial Sequence
  derived and/or modified protein sequence (wt) from HRSV__ARB66328.1__F-del
MELPILKTNAITTILAAVTLCFASSQNITEEFYQSTCSAVSKGYLSALRTGWYTSVITIELSNIRENKCNGTDAKVKLIKQELDKYKNAVTELQLLMQSTPAASSRARRELPRFMNYTLNNTKNTNVTLSKKRKRRFLGFLLGVGSAIASGIAVSKVLHLEGEVNKIKSALLSTNKAVVSLSNGVSVLTSKVLDLKNYIDKQLLPIVNKQSCSISNIETVIEFQQKNNRLLEITREFSVNAGVTTPVSTYMLTNSELLSLINDMPITNDQKKLMSSNVQIVRQQSYSIMSIIKEEVLAYVVQLPLYGVIDTPCWKLHTSPLCTTNTKEGSNICLTRTDRGWYCDNAGSVSFFPQAETCKVQSNRVFCDTMNSLTLPSEVNLCNIDIFNPKYDCKIMTSKTDVSSSVITSLGAIVSCYGKTKCTASNKNRGIIKTFSNGCDYVSNKGVDTVSVGNTLYYVNKQEGKSLYVKGEPIINFYDPLVFPSDEFDTSISQVNEKINQSLAFIRKSDELLHNVNAGKSTTNIMITTIIIVIIVILLALIAVGLLLYCKAK

SEQ ID NO: 9049 - protein, 553 aa, Artificial Sequence
  derived and/or modified protein sequence (wt) from HRSV__ANZ80034.1__F-del
MELPILKTNAITTILAAVTLCFASSQNITEEFYQSTCSAVSKGYLSALRTGWYTSVITIELSNIKENKCNGTDAKVKLIKQELDKYKNAVTELQLLMQSTPAASSRARRELPRFMNYTLNNTKNTNVTLSKKRKRRFLGFLLGVGSAIASGIAVSKVLHLEGEVNKIKSALLSTNKAVVSLSNGVSVLTSKVLDLKNYIDKQLLPIVNKQSCSISNIETVIEFQQKNNRLLEITREFSVNAGVTTPVSTYMLTNSELLSLINDMPITNDQKKLMSSNVQIVRQQSYSIMSIIKEEVLAYVVQLPLYGVIDTPCWKLHTSPLCTTNTKEGSNICLTRTDRGWYCDNAGSVSFFPQAETCKVQSNRVFCDTMNSLTLPSEVNLCNIDIFNPKYDCKIMTSKTDVSSSVITSLGAIVSCYGKTKCTASNKNRGIIKTFSNGCDYVSNKGVDTVSVGNTLYYVNKQEGKSLYVKGEPIINFYDPLVFPSDEFDASISQVNEKINQSLAFIRKSDELLHNVNAGKSTTNIMITTIIIVIIVILLALIAVGLLLYCKAR

SEQ ID NO: 9050 - protein, 553 aa, Artificial Sequence
  derived and/or modified protein sequence (wt) from HRSV__AMN91253.1__F-del
MELPILKTNAITTILAAVTLCFASSQNITEEFYQSTCSAVSKGYLSALRTGWYTSVITIELSNIKENKCNGTDAKVKLIKQELDKYKNAVTELQLLMQSTPAANNRARRELPRFMNYTLNNTKNTNVTLSKKRKRRFLGFLLGVGSAIASGIAVSKVLHLEGEVNKIKSALLSTNKAVVSLSNGVSVLTSKVLDLKNYIDKQLLPIVNKQSCSISNIETVIEFQQKNNRLLEITREFSVNAGVTTPVSTYMLTNSELLSLINDMPITNDQKKLMSSNVQIVRQQSYSIMSIIKEEVLAYVVQLPLYGVIDTPCWKLHTSPLCTTNTKEGSNICLTRTDRGWYCDNAGSVSFFPQAETCKVQSNRVFCDTMNSLTLPSEVNLCNIDIFNPKYDCKIMTSKTDVSSSVITSLGAIVSCYGKTKCTASNKNRGIIKTFSNGCDYVSNKGVDTVSVGNTLYYVNKQEGKSLYVKGEPIINFYDPLVFPSDEFDASISQVNEKINQSLAFIRKSDELLHNVNAGKSTTNIMITTIIIVIIVILLALIAVGLLLYCKAR

SEQ ID NO: 9051 - protein, 553 aa, Artificial Sequence
  derived and/or modified protein sequence (wt) from HRSV__P03420.1__F-del
MELLILKANAITTILTAVTFCFASGQNITEEFYQSTCSAVSKGYLSALRTGWYTSVITIELSNIKENKCNGTDAKVKLIKQELDKYKNAVTELQLLMQSTPPTNNRARRELPRFMNYTLNNAKKTNVTLSKKRKRRFLGFLLGVGSAIASGVAVSKVLHLEGEVNKIKSALLSTNKAVVSLSNGVSVLTSKVLDLKNYIDKQLLPIVNKQSCSISNIETVIEFQQKNNRLLEITREFSVNAGVTTPVSTYMLTNSELLSLINDMPITNDQKKLMSNNVQIVRQQSYSIMSIIKEEVLAYVVQLPLYGVIDTPCWKLHTSPLCTTNTKEGSNICLTRTDRGWYCDNAGSVSFFPQAETCKVQSNRVFCDTMNSLTLPSEINLCNVDIFNPKYDCKIMTSKTDVSSSVITSLGAIVSCYGKTKCTASNKNRGIIKTFSNGCDYVSNKGMDTVSVGNTLYYVNKQEGKSLYVKGEPIINFYDPLVFPSDEFDASISQVNEKINQSLAFIRKSDELLHNVNAGKSTTNIMITTIIIVIIVILLSLIAVGLLLYCKAR

SEQ ID NO: 9052 - protein, 553 aa, Artificial Sequence
  derived and/or modified protein sequence (wt) from HRSV__AIO08046.1__F-del
MELLILKANAITTILTAVTFCFASGQNITEEFYQSTCSAVSKGYLSALRTGWYTSVITIELSNIKKNKCNGTDAKVKLIKQELDKYKNAVTELQLLMQSTQATNNRARRELPRFMNYTLNNAKKTNVTLSKKRKRRFLGFLLGVGSAIASGVAVSKVLHLEGEVNKIKSALLSTNKAVVSLSNGVSVLTSKVLDLKNYIDKQLLPIVNKQSCSISNIETVIEFQQKNNRLLEITREFSVNAGVTTPVSTYMLTNSELLSLINDMPITNDQKKLMSNNVQIVRQQSYSIMSIIKEEVLAYVVQLPLYGVIDTPCWKLHTSPLCTTNTKEGSNICLTRTDRGWYCDNAGSVSFFPQAETCKVQSNRVFCDTMNSLTLPSEVNLCNVDIFNPKYDCKIMTSKTDVSSSVITSLGAIVSCYGKTKCTASNKNRGIIKTFSNGCDYVSNKGVDTVSVGNTLYYVNKQEGKSLYVKGEPIINFYDPLVFPSDEFDASISQVNEKINQSLAFIRKSDELLHNVNAGKSTTNIMITTIIIVIIVILLSLIAVGLLLYCKAR

SEQ ID NO: 9053 - protein, 553 aa, Artificial Sequence
  derived and/or modified protein sequence (wt) from HRSV__NP_056863.1__F-del
MELLIHRLSAIFLTLAINALYLTSSQNITEEFYQSTCSAVSRGYFSALRTGWYTSVITIELSNIKETKCNGTDTKVKLIKQELDKYKNAVTELQLLMQNTPAANNRARREAPQYMNYTINTTKNLNVSISKKRKRRFLGFLLGVGSAIASGIAVSKVLHLEGEVNKIKNALLSTNKAVVSLSNGVSVLTSKVLDLKNYINNQLLPIVNQQSCRISNIETVIEFQQKNSRLLEINREFSVNAGVTTPLSTYMLTNSELLSLINDMPITNDQKKLMSSNVQIVRQQSYSIMSIIKEEVLAYVVQLPIYGVIDTPCWKLHTSPLCTTNIKEGSNICLTRTDRGWYCDNAGSVSFFPQADTCKVQSNRVFCDTMNSLTLPSEVSLCNTDIFNSKYDCKIMTSKTDISSSVITSLGAIVSCYGKTKCTASNKNRGIIKTFSNGCDYVSNKGVDTVSVGNTLYYVNKLEGKNLYVKGEPIINYYDPLVFPSDEFDASISQVNEKINQSLAFIRRSDELLHNVNTGKSTTNIMITTIIIVIIVVLLSLIAIGLLLYCKAK

SEQ ID NO: 9054 - protein, 553 aa, Artificial Sequence
  derived and/or modified protein sequence (wt) from HRSV__AFX60234.1__F-del
MELLIHRSSAIFLTLAINALYLTSSQNITEEFYQSTCSAVSRGYLSALRTGWYTSVITIELSNIKETKCNGTDTKVKLIKQELDKYKNAVTELQLLMQNTPAVNNRARREAPQYMNYTINTTKNLNVSISKKRKRRFLGFLLGVGSAIASGIAVSKVLHLEGEVNKIKNALQSTNKAVVSLSNGVSVLTSKVLDLKNYINNQLLPIVNKQSCRISNIETVIEFQQKNSRLLEITREFSVNAGVTTPLSTYMLTNSELLSLINDMPITNDQKKLMSSNVQIVRQQSYSIMSIIKEEVLAYVVQLPIYGVIDTPCWKLHTSPLCTTNIKEGSNICLTRTDRGWYCDNAGSVSFFPQADTCKVQSNRVFCDTMNSLTLPSEVSLCNTDIFNSKYDCKIMTSKTDISSSVITSLGAIVSCYGKTKCTASNKNRGIIKTFSNGCDYVSNKGVDTVSVGNTLYYVNKLEGKNLYVKGEPIINYYDPLVFPSDEFDASISQVNEKINQSLAFIRRSDELLHNVNTGKSTTNIMITAIIIVIIVVLLSLIAIGLLLYCKAK

SEQ ID NO: 9055 - protein, 553 aa, Artificial Sequence
  derived and/or modified protein sequence (wt) from HRSV__AFX60231.1__F-del
MELLIHRSSAIFLTLAINALYLTSSQNITEEFYQSTCSAVSRGYLSALRTGWYTSVITIELSNIKETKCNGTDTKVKLIKQELDKYKNAVTELQLLMQNTPAVNNRARREAPQYMNYTINTTRNLNVSISKKRKRRFLGFLLGVGSAIASGIAVSKVLHLEGEVNKIKNALQSTNKAVVSLSNGVSVLTSKVLDLKNYINNQLLPIVNQQSCRISNIETVIEFQQKNSRLLEITREFSVNAGVTTPLSTYMLTNSELLSLINDMPITNDQKKLMSSNVQIVRQQSYSIMSIIKEEVLAYVVQLPIYGVIDTPCWKLHTSPLCTTNIKEGSNICLTRTDRGWYCDNAGSVSFFPQADTCKVQSNRVFCDTMNSLTLPSEVSLCNTDIFNSKYDCKIMTSKTDISSSVITSLGAIVSCYGKTKCTASNKNRGIIKTFSNGCDYVSNKGVDTVSVGNTLYYVNKLEGKNLYVKGEPIINYYDPLVFPSDEFDASISQVNEKINQSLAFIRRSDELLHNVNTGKSTTNIMITAIIIVIIVVLLSLIAIGLLLYCKAK

SEQ ID NO: 9056 - protein, 553 aa, Artificial Sequence
  derived and/or modified protein sequence (wt) from HRSV__AFX60232.1__F-del
MELLIYRSSAIFLTLAINALYLTSSQNITEEFYQSTCSAVSRGYLSALRTGWYTSVITIELSNIKETKCNGTDTKVKLIKQELDKYKNAVTELQLLMQNTPAVNNRARREAPQYMNYTINTTKNLNVSISKKRKRRFLGFLLGVGSAIASGIAVSKVLHLEGEVNKIKNALQSTNKAVVSLSNGVSVLTSKVLDLKNYINNQLLPIVNQQSCRISNIETVIEFQQKNSRLLEITREFSVNAGVTTPLSTYMLTNSELLSLINDMPITNDQKKLMSSNVQIVRQQSYSIMSIIKEEVLAYVVQLPIYGVIDTPCWKLHTSPLCTTNIKEGSNICLTRTDRGWYCDNAGSVSFFPQADTCKVQSNRVFCDTMNSLTLPSEVSLCNTDIFNSKYDCKIMTSKTDISSSVITSLGAIVSCYGKTKCTASNKNRGIIKTFSNGCDYVSNKGVDTVSVGNTLYYVNKLEGKNLYVKGEPIINYYDPLVFPSDEFDASISQVNEKINQSLAFIRRSDELLHNVNTGKSTTNIMITAIIIVIIVVLLSLIAIGLLLYCKAK

SEQ ID NO: 9057 - protein, 553 aa, Artificial Sequence
  derived and/or modified protein sequence (wt) from HRSV__AFX60222.1__F-del
MELLIHRSSAIFLTLAINALYITSSQNITEEFYQSTCSAVSRGYLSALRTGWYTSVITIELSNIKETKCNGTDTKVKLIKQELDKYKNAVTELQLLMQNTPAVNNRARREAPQYMNYTINTTKNLNVSISKKRKRRFLGFLLGVGSAIASGIAVSKVLHLEGEVNKIKNALQSTNKAVVSLSNGVSVLTSKVLDLKNYINNQLLPIVNQQICRISNIETVIEFQQKNSRLLEITREFSVNAGVTTPLSTYMLTNSELLSLINDMPITNDQKKLMSSNVQIVRQQSYSIMSIIKEEVLAYVVQLPIYGVIDTPCWKLHTSPLCTTNIKEGSNICLTRTDRGWYCDNAGSVSFFPQADTCKVQSNRVFCDTMNSLTLPSEVSLCNTDIFNSKYDCKIMTSKTDISSSVITSLGAIVSCYGKTKCTASNKNRGIIKTFSNGCDYVSNKGVDTVSVGNTLYYVNKLEGKNLYVKGEPIINYYDPLVFPSDEFDASISQVNEKINQSLAFIRRSDELLHNVNTGKSTTNIMITAIIIVIIVVLLSLIAIGLLLYCKAK

SEQ ID NO: 9058 - protein, 553 aa, Artificial Sequence
  derived and/or modified protein sequence (wt) from HRSV__AFX60219.1__F-del
MELLIHRSSAIFLTLAINALYLTSSQNITEEFYQSTCSAVSRGYLSALRTGWYTSVITIELSNIKETKCNGTDTKVKLIKQELDKYKNAVTELQLLMQNTPAANNRARREAPQYMNYTINTTKNPNVSISKKRKRRFLGFLLGVGSAIASGIAVSKVLHLEGEVNKIKNALLSTNKAVVSLSNGVSVLTSKVLDLKNYINNQLLPIVNQQSCRISNIETVIEFQQKNSRLLEITREFSVNAGVTTPLSTYMLTNSELLSLINDMPITNDQKKLMSSNVQIVRQQSYSIMSIIKEEVLAYVVQLPIYGVIDTPCWKLHTSPLCTTNIKEGSNICLTRTDRGWYCDNAGSVSFFPQADTCKVQSNRVFCDTMNSLTLPSEVSLCNTDIFNSKYDCKIMTSKTDISSSVITSLGAIVSCYGKTKCTASNKNRGIIKTFSNGCDYVSNKGVDTVSVGNTLYYVNKLEGKNLYVKGEPIINYYDPLVFPSDEFDASISQVNEKINQSLAFIRRSDELLHNVNTGKSTTNIIITAIIIVIIVVLLSLIAIGLLLYCKAK

SEQ ID NO: 9059 - protein, 553 aa, Artificial Sequence
  derived and/or modified protein sequence (wt) from HRSV__AFX60215.1__F-del
MELLIHRSSAIFLTLAINALYLTSSQNITEEFYQSTCSAVSRGYFSALRTGWYTSVITIELSNIKETKCNGTDTKVKLIKQELDKYKNAVTELQLLMQNTPAANNRARREAPQYMNYTINTTKNLNVSISKKRKRRFLGFLLGVGSAIASGIAVSKVLHLEGEVNKIKNALLSTNKAVVSLSNGVSVLTSKVLDLKNYINNQLLPIVNKQSCRISNIETVIEFQQKNSRLLEITREFSVNAGVTTPLSTYMLTNSELLSLINDMPITNDQKKLMSSNAQIVRQQSYSIMSIIKEEVLAYVVQLPIYGVIDTPCWKLHTSPLCTTNIKEGSNICLTRTDRGWYCDNAGSVSFFPQADTCKVQSNRVFCDTMNSLTLPSEVSLCNTDIFNSKYDCKIMTSKTDISSSVITSLGAIVSCYGKTKCTASNKNRGIIKTFSNGCDYVSNKGVDTVSVGNTLYYVNKLEGKNLYVKGEPIINYYDPLVFPSDEFDASISQVNEKINQSLAFIRRSDELLHNVNTGKSTTNIMITAIIIVIIVVLLSLIAIGLLLYCKAK

SEQ ID NO: 9060 - protein, 553 aa, Artificial Sequence
  derived and/or modified protein sequence (wt) from HRSV__AFX60214.1__F-del
MELLIHRSSAIFLTLAINALYLTSSQNITEEFYQSTCSAVSRGYLSALRTGWYTSVITIELSNIKEIKCNGTDTKVKLIKQELDKYKNAVTELQLLMQNTPAANNRARREAPQYMNYTINTTKNPNVSISKKRKRRFLGFLLGVGSAIASGIAVSKVLHLEGEVNKIKNALLSTNKAVVSLSNGVSVLTSKVLDLKNYINNQLLPIVNQQSCRISNIETVIEFQQKNSRLLEITREFSVNAGVTTPLSTYMLTNSELLSLINDMPITNDQKKLMSSNVQIVRQQSYSIMSIIKEEVLAYVVQLPIYGVIDTPCWKLHTSPLCTTNIKEGSNICLTRTDRGWYCDNAGSVSFFPQADTCKVQSNRVFCDTMNSLTLPSEVSLCNTDIFNSKYDCKIMTSKTDISSSVITSLGAIVSCYGKTKCTASNKNRGIIKTFSNGCDYVSNKGVDTVSVGNTLYYVNKLEGKNLYVKGEPIINYYDPLVFPSDEFDASISQVNEKINQSLAFIRRSDELLHNVNTGKSTTNIMITAIIIVIIVVLLSLIAIGLLLYCKAK

SEQ ID NO: 9061 - protein, 553 aa, Artificial Sequence
  derived and/or modified protein sequence (wt) from HRSV__AFX60212.1__F-del
MELLIHRSSAIFLTLAINALYLTSSQNITEEFYQSTCSAVSRGYLSALRTGWYTSVITIELSNIKETKCNGTDTKVKLIKQELDKYKNAVTELQLLMQNTPAANNRARREAPQYMNYTINTTKNPNVSISKKRKRRFLGFLLGVGSAIASGIAVSKVLHLEGEVNKIKNALLSTNKAVVSLSNGVSVLTSKVLDLKNYINNQLLPIVNQQSCRISNIETVIEFQQKNSRLLEITREFSVNAGVTTPLSTYMLTNSELLSLINDMPITNDQKKLMSSNVQIVRQQSYSIMSIIKEEVLAYVVQLPIYGVIDTPCWKLHTSPLCTTNIKEGSNICLTRTDRGWYCDNAGSVSFFPQADTCKVQSNRVFCDTMNSLTLPSEVSLCNTDIFNSKYDCKIMTSKTDISSSVITSLGAIVSCYGKTKCTASNKNRGIIKTFSNGCDYVSNKGVDTVSVGNTLYYVNKLEGKNLYVKGEPIINYYDPLVFPSDEFDASISQVNEKINQSLAFIRRSDELLHNVNTGKSTTNIMITAIIIVIIVVLLSLIAIGLLLYCKAK

SEQ ID NO: 9062 - protein, 553 aa, Artificial Sequence
  derived and/or modified protein sequence (wt) from HRSV__AFX60208.1__F-del
MELPILKTNAITTILAAVTLCFASSQNITEEFYQSTCSAVSKGYLSALRTGWYTSVITIELSNIKENKCNGTDAKVKLIKQELDKYKNAVIELQLLMQSTPAANSRARRELPRFMNYTLNNTKNTNVTLSKKRKRRFLGFLLGVGSAIASGIAVSKVLHLEGEVNKIKSALLSTNKAVVSLSNGVSVLTSKVLDLKNYIDKQLLPIVNKQSCSISNIETVIEFQQKNNRLLEITREFSVNAGVTTPVSTYMLTNSELLSLINDMPITNDQKKLMSSNVQIVRQQSYSIMSIIKEEVLAYVVQLPLYGVIDTPCWKLHTSPLCTTNTKEGSNICLTRTDRGWYCDNAGSVSFFPQAETCKVQSNRVFCDTMNSLTLPSEVNLCNIDIFNPKYDCKIMTSKTDVSSSVITSLGAIVSCYGKTKCTASNKNRGIIKTFSNGCDYVSNKGVDTVSVGNTLYYVNKQEGKSLYVKGEPIINFYDPLVFPSDEFDASISQVNEKINQSLAFIRKSDELLHNVNAGKSTTNIMITTIIIVIIVILLALIAVGLLLYCKAR

SEQ ID NO: 9063 - protein, 553 aa, Artificial Sequence
  derived and/or modified protein sequence (wt) from HRSV__AFX60202.1__F-del
MELPILKTNAITTILAAVTLCFASSQNITEEFYQSTCSAVSKGYLSALRTGWYTSVITIELSNIKENKCNGTDAKVKLIKQELDKYKNAVTELQLLMQSTSAANSRARRELPRFMNYTLNNTKNTNVTLSKKRKRRFLGFLLGVGSAIASGIAVSKVLHLEGEVNKIKSALLSTNKAVVSLSNGVSVLTSKVLDLKNYIDKQLLPIVNKQSCSISNIETVIEFQQKNNRLLEITREFSVNAGVTTPVSTYMLTNSELLSLINDMPITNDQKKLMSSNVQIVRQQSYSIMSIIKEEVLAYVVQLPLYGVIDTPCWKLHTSPLCTTNTKEGSNICLTRTDRGWYCDNAGSVSFFPQAETCKVQSNRVFCDTMNSLTLPSEVNLCNIDIFNPKYDCKIMTSKTDVSSSVITSLGAIVSCYGKTKCTASNKNRGIIKTFSNGCDYVSNKGVDTVSVGNTLYYVNKQEGKSLYVKGEPIINFYDPLVFPSDEFDASISQVNEKINQSLAFIRKSDELLHNVNAGKSTTNIMITTIIIVIIVILLALIAVGLLLYCKAR

SEQ ID NO: 9064 - protein, 553 aa, Artificial Sequence
  derived and/or modified protein sequence (wt) from HRSV__AFX60220.1__F-del
MELLIHRSSAIFLTLAINALYITSSQNITEEFYQSTCSAVSRGYLSALRTGWYTSVITIELSNIKETKCNGTDTKVKLIKQELDKYKNAVTELQLLMQNTPAVNNRARREAPQYMNYTINTTKNLNVSISKKRKRRFLGFLLGVGSAIASGIAVSKVLHLEGEVNKIKNALQSTNKAVVSLSNGVSVLTSKVLDLKNYINNQLLPIVNQQSCRISNIETVIEFQQKNSRLLEITREFSVNAGVTTPLSTYMLTNSELLSLINDMPITNDQKKLMSSNVQIVRQQSYSIMSIIKEEVLAYVVQLPIYGVIDTPCWKLHTSPLCTTNIKEGSNICLTRTDRGWYCDNAGSVSFFPQADTCKVQSNRVFCDTMNSLTLPSEVSLCNTDIFNSKYDCKIMTSKTDISSSVITSLGAIVSCYGKTKCTASNKNRGIIKTFSNGCDYVSNKGVDTVSVGNTLYYVNKLEGKNLYVKGEPIINYYDPLVFPSDEFDASISQVNEKINQSLAFIRRSDELLHNVNTGKSTTNIMITAIIIVIIVVLLSLIAIGLLLYCKAK

SEQ ID NO: 9065 - protein, 553 aa, Artificial Sequence
  derived and/or modified protein sequence (wt) from HRSV__AFX60213.1__F-del
MELLIHRSSAIFLTLAINALYLTSSQNITEEFYQSTCSAVSRGYLSALRTGWYTSVITIELSNIKETKCNGTDTKVKLIKQELDKYKNAVTELQLLMQNTPAVNNRARREAPQYMNYTINTTKNLNVSISKKRKRRFLGFLLGVGSAIASGIAVSKVLHLEGEVNKIKNALQSTNKAVVSLSNGVSVLTSKVLDLKNYINNQLLPIVNQQSCRISNIETVIEFQQKNSRLLEITREFSVNAGVTTPLSTYMLTNSELLSLINDMPITNDQKKLMSSNVQIVRQQSYSIMSIIKEEVLAYVVQLPIYGVIDTPCWKLHTSPLCTTNIKEGSNICLTRTDRGWYCDNAGSVSFFPQADTCKVQSNRVFCDTMNSLTLPSEVSLCNTDIFNSKYDCKIMTSKTDISSSVITSLGAIVSCYGKTKCTASNKNRGIIKTFSNGCDYVSNKGVDTVSVGNTLYYVNKLEGKNLYVKGEPIINYYDPLVFPSDEFDASISQVNEKINQSLAFIRRSDELLHNVNTGKSTTNIMITAIIIVIIVVLLSLIAIGLLLYCKAK

SEQ ID NO: 9066 - protein, 553 aa, Artificial Sequence
  derived and/or modified protein sequence (wt) from HRSV__AFX60190.1__F-del
MELPILKTNAITTILAAVTLCFASSQNITEEFYQSTCSAVSKGYLSALRTGWYTSVITIELSNIKENKCNGTDAKVKLIKQELDKYKNAVTELQLFMQSTPAANSRARRELPRFMNYTLNNTKNTNVTLSKKRKRRFLGFLLGVGSAIASGIAVSKVLHLEGEVNKIKSALLSTNKAVVSLSNGVSVLTSKVLDLKNYIDKQLLPIVNKQSCSISNIETVIEFQQKNNRLLEITREFSVNAGVTTPVSTYMLTNSELLSLINDMPITNDQKKLMSSNVQIVRQQSYSIMSIIKEEVLAYVVQLPLYGVIDTPCWKLHTSPLCTTNTKEGSNICLTRTDRGWYCDNAGSVSFFPQAETCKVQSNRVFCDTMNSLTLPSEVNLCNIDIFNPKYDCKIMTSKTDVSSSVITSLGAIVSCYGKTKCTASNKNRGIIKTFSNGCDYVSNKGVDTVSVGNTLYYVNKQEGKSLYVKGEPIINFYDPLVFPSDEFDASISQVNEKINQSLAFIRKSDELLHNVNAGKSTTNIMITTIIIVIIVILLALIAVGLLLYCKAR

SEQ ID NO: 9067 - protein, 553 aa, Artificial Sequence
  derived and/or modified protein sequence (wt) from HRSV__AFX60187.1__F-del
MELPILKTNAITTILAAVTLCFSSSQNITEEFYQSTCSAVSKGYLSALRTGWYTSVITIELSNIKENKCNGTDAKVKLIKQELDKYKNAVTELQLLMQSTPAANSRARRELPRFMNYTLNNTKNTNVTLSKKRKRRFLGFLLGVGSAIASGIAVSKVLHLEGEVNKIKSALLSTNKAVVSLSNGVSVLTSKVLDLKNYIDKQLLPIVNKQSCSISNIETVIEFQQKNNRLLEITREFSVNAGVTTPVSTYMLTNSELLSLINDMPITNDQKKLMSSNVQIVRQQSYSIMSIIKEEVLAYVVQLPLYGVIDTPCWKLHTSPLCTTNTKEGSNICLTRTDRGWYCDNAGSVSFFPQAETCKVQSNRVFCDTMNSLTLPSEVNLCNIDIFNPKYDCKIMTSKTDVSSSVITSLGAIVSCYGKTKCTASNKNRGIIKTFSNGCDYVSNKGVDTVSVGNTLYYVNKQEGKSLYVKGEPIINFYDPLVFPSDEFDASISQVNEKINQSLAFIRKSDELLHNVNAGKSTTNIMITTIIIVIIVILLALIAVGLLLYCKAR

SEQ ID NO: 9068 - protein, 553 aa, Artificial Sequence
  derived and/or modified protein sequence (wt) from HRSV__AFX60201.1__F-del
MELPILKTNAITTILAAVTLCFASSQNITEEFYQSTCSAVSKGYLSALRTGWYTSVITIELSNIKENKCNGTDAKVKLIKQELDKYKNAVTELQLLMQSTPAANSRARRELPRFMNYTLNNTKNTNVTLSKKRKRRFLGFLLGVGSAIASGIAVSKVLHLEGEVNKIKSALLSTNKAVVSLSNGVSVLTSKVLDLKNYIDKQLLPIVNKQSCSISNIETVIEFQQKNNRLLEITREFSVNAGVTTPVSTYMLTNSELLSLINDMPITNDQKKLMSSNVQIVRQQSYSIMSIIKEEVLAYVVQLPLYGVIDTPCWKLHTSPLCTTNTKEGSNICLTRTDRGWYCDNAGSVSFFPQAETCKVQSNRVFCDTMNSLTLPSEVNLCNIDIFNPKYDCKIMTSKTDVSSSVITSLGAIVSCYGKTKCTASNKNRGIIKTFSNGCDYVSNKGVDTVSVGNTLYYVNKQEGKSLYVKGEPIINFYDPLVFPSDEFDASISQVNEKINQSLAFIRKSDELLHNVNVGKSTTNIMITTIIIVIIVILLALIAVGLLLYCKAR

SEQ ID NO: 9069 - protein, 553 aa, Artificial Sequence
  derived and/or modified protein sequence (wt) from HRSV__AFX60173.1__F-del
MELPILNTNAITTILAAVTLCFASSQNITEEFYQSTCSAVSKGYLSALRTGWYTSVITIELSNIKENKCNGTDAKVKLIKQELDKYKNAVTELQLLMQSTPAANSRARRELPRFMNYTLNNTKNTNVTLSKKRKRRFLGFLLGVGSAIASGIAVSKVLHLEGEVNKIKSALLSTNKAVVSLSNGVSVLTSKVLDLKNYIDKQLLPIVNKQSCSISNIETVIEFQQKNNRLLEITREFSVNAGVTTPVSTYMLTNSELLSLINDMPITNDQKKLMSNNVQIVRQQSYSIMSIIKEEVLAYVVQLPLYGVIDTPCWKLHTSPLCTTNTKEGSNICLTRTDRGWYCDNAGSVSFFPQAETCKVQSNRVFCDTMNSLTLPSEVNLCNIDIFNPKYDCKIMTSKTDVSSSVITSLGAIVSCYGKTKCTASNKNRGIIKTFSNGCDYVSNKGVDTVSVGNTLYYVNKQEGKSLYVKGEPIINFYDPLVFPSDEFDASISQVNEKINQSLAFIRKSDELLHNVNAGKSTTSIMITTIIIVIIVILLSLIAVGLLLYCKAR

SEQ ID NO: 9070 - protein, 553 aa, Artificial Sequence
  derived and/or modified protein sequence (wt) from HRSV__AFX60169.1__F-del
MELPILKTNAITTILAAVTLCFASSQNITEEFYQSTCSAVSKGYLSALRTGWYTSVITIELSNIKENKCNGTDAKVKLIKQELDKYKNAVTELQLLMQSTPSANSRARRELPRFMNYTLNNTKNTNVTLSKKRKRRFLGFLLGVGSAIASGIAVSKVLHLEGEVNKIKSALLSTNKAVVSLSNGVSVLTSKVLDLKNYIDKQLLPIVNKQSCSISNIETVIEFQQKNNRLLEITREFSVNAGVTTPVSTYMLTNSELLSLINDMPITNDQKKLMSSNVQIVRQQSYSIMSIIKEEVLAYVVQLPLYGVIDTPCWKLHTSPLCTTNTKEGSNICLTRTDRGWYCDNAGSVSFFPQAETCKVQSNRVFCDTMNSLTLPSEVNLCNIDIFNPKYDCKIMTSKTDVSSSVITSLGAIVSCYGKTKCTASNKNRGIIKTFSNGCDYVSNKGVDTVSVGNTLYYVNKQEGKSLYVKGEPIINFYDPLVFPSDEFDASISQVNEKINQSLAFIRKSDELLHNVNAGKSTTNIMITTIIIVIIVILLALIAVGLLLYCKAR

SEQ ID NO: 9071 - protein, 553 aa, Artificial Sequence
  derived and/or modified protein sequence (wt) from HRSV__AFX60162.1__F-del
MELPILKTNAITTILAAVTLCFASSQNITEEFYQSTCSAVSKGYLSALRTGWYTSVITIELSNIKENKCNGTDAKVKLIKQELDKYKNAVTELQLFMQSTPAANSRARRELPRFMNYTLNNTKNTNVTLSKKRKRRFLGFLLGVGSAIASGIAVSKVLHLEGEVNKIKSALLSTNKAVVSLSNGVSVLTSKVLDLKNYIDKQLLPIVNKQSCSISNIETVIEFQQKNNRLLEITREFSVNAGVTTPVSTYMLTNSELLSLINDMPITNDQKKLMSSNVQIVRQQSYSIMSIIKEEVLAYVVQLPLYGVIDTPCWKLHTSPLCTINTKEGSNICLTRTDRGWYCDNAGSVSFFPQAETCKVQSNRVFCDTMNSLTLPSEVNLCNIDIFNPKYDCKIMTSKTDVSSSVITSLGAIVSCYGKTKCTASNKNRGIIKTFSNGCDYVSNKGVDTVSVGNTLYYVNKQEGKSLYVKGEPIINFYDPLVFPSDEFDASISQVNEKINQSLAFIRKSDELLHNVNAGKSTTNIMITTIIIVIIVILLALIAVGLLLYCKAR

SEQ ID NO: 9072 - protein, 553 aa, Artificial Sequence
  derived and/or modified protein sequence (wt) from HRSV__AFX60156.1__F-del
MELPILKANAITTILAAVILCFASSQNITEEFYQSTCSAVSKGYLSALRTGWYTSVITIELSNIKENKCNGTDAKVKLIKQELDKYKNAVTELQLLMQSTPAANNRARRELPRFMNYTLNNTKNTNVTLSKKRKRRFLGFLLGVGSAIASGIAVSKVLHLEGEVNKIKNALLSTNKAVVSLSNGVSVLTSKVLDLKNYIDKQLLPIVNKQSCSISNIETVIEFQQKNNRLLEITREFSVNAGVTTPVSTYMLTNSELLSLINDMPITNDQKKLMSNNVQIVRQQSYSIMSIIKEEVLAYVVQLPLYGVIDTPCWKLHTSPLCTTNTKEGSNICLTRTDRGWYCDNAGSVSFFPQAETCKVQSNRVFCDTMNSLTLPSEVNLCNVDIFNPKYDCKIMTSKTDVSSSVITSLGAIVSCYGKTKCTASNKNRGIIKTFSNGCDYVSNKGVDTVSVGNTLYYVNKQEGKNLYVKGEPIINFYDPLVFPSDEFDASISQVNEKINQSLAFIRKSDELLHNVNAGKSTTNIMITTIIIVIVVILLSLIVVGLLLYCKAR

SEQ ID NO: 9073 - protein, 553 aa, Artificial Sequence
  derived and/or modified protein sequence (wt) from HRSV__AFX60151.1__F-del
MELPILKTNAITTILAAVTLCFASSQNITEEFYQSTCSAVSKGYLSALRTGWYTSVITIELSNIKENKCNGTDAKVKLIKQELDKYKNAVTELQLLMQSTPAANSRARRELPRFMNYTLNNTKNTNVTLSKKRKRRFLGFLLGVGSAIASGIAVSKVLHLEGEVNKIKSALLSTNKAVVSLSNGVSVLTSKVLDLKNYIDKQLLPIVNKQSCSILNIETVIEFQQKNNRLLEITREFSVNAGVTTPVSTYMLTNSELLSLINDMPITNDQKKLMSSNVQIVRQQSYSIMSIIKEEVLAYVVQLPLYGVIDTPCWKLHTSPLCTTNTKEGSNICLTRTDRGWYCDNAGSVSFFPQAETCKVQSNRVFCDTMNSLTLPSEVNLCNIDIFNPKYDCKIMTSKTDVSSSVITSLGAIVSCYGKTKCTASNKNRGIIKTFSNGCDYVSNKGVDTVSVGNTLYYVNKQEGKSLYVKGEPIINFYDPLVFPSDEFDASISQVNEKINQSLAFIRKSDELLHNVNAGKSTTNIMITTIIIVIIVILLALIAVGLLLYCKAR

SEQ ID NO: 9074 - protein, 553 aa, Artificial Sequence
  derived and/or modified protein sequence (wt) from HRSV__AFX60150.1__F-del
MELPILKTNAITTILAAVTLCFASSQNITEEFYQSTCSAVSKGYLSALRTGWYTSVITIELSNIKENKCNGTDTKVKLIKQELDKYKNAVTELQLLMQSTPAANSRARRELPRFMNYTLNNTKNTNVTLSKKRKRRFLGFLLGVGSAIASGIAVSKVLHLEGEVNKIKSALLSTNKAVVSLSNGVSVLTSKVLDLKNYIDKQLLPIVNKQSCSISNIETVIEFQQKNNRLLEITREFSVNAGVTTPVSTYMLTNSELLSLINDMPITNDQKKLMSSNVQIVRQQSYSIMSIIKEEVLAYVVQLPLYGVIDTPCWKLHTSPLCTTNTKEGSNICLTRTDRGWYCDNAGSVSFFPQAETCKVQSNRVFCDTMNSLTLPSEVNLCNIDIFNPKYDCKIMTSKTDVSSSVITSLGAIVSCYGKTKCTASNKNRGIIKTFSNGCDYVSNKGVDTVSVGNTLYYVNKQEGKSLYVKGEPIINFYDPLVFPSDEFDASISQVNEKINQSLAFIRKSDELLHNVNAGKSTTNIMITTIIIVIIVILLALIAVGLLLYCKAR

SEQ ID NO: 9075 - protein, 553 aa, Artificial Sequence
  derived and/or modified protein sequence (wt) from HRSV__AFX60148.1__F-del
MELPILKTNAITTILAAVTLCFASSQNITEEFYQSTCSAVSKGYLSALRTGWYTSVITIELSNIKENKCNGTDAKVKLIKQELDKYKNAVTELQLLMQSTPAANSRARRELPRFMNYTLNNTKNTNVTLSKKRKRRFLGFLLGVGSAIASGIAVSKVLHLEGEVNKIKSALLSTNKAVVSLSNGVSVLTSKVLDLKNYIDKQLLPIVNKQSCSISNIETVIEFQQKNNRLLEITREFSVNAGVTTPVSTYMLTNSELLSLINDMPITNDQKKLMSSNVQIVRQQSYSIMSIIKEEVLAYVVQLPLYGVIDTPCWKLHTSPLCTTNTKEGSNICLTRTDRGWYCDNAGSVSFFPQAETCKVQSNRVFCDTMNSLTLPSEVNLCNIDIFNPKYDCKIMTSKTDVSSSVITSLGAIVSCYGKTKCTASNKNRGIIKTFSNGCDYVSNKGVDTVSVGNTLYYVNKQEGKSLYVKGEPIINFYDPLVFPSDEFDASISLVNEKINQSLAFIRKSDELLHNVNAGKSTTNIMITTIIIVIIVILLALIAVGLLLYCKAR

SEQ ID NO: 9076 - protein, 553 aa, Artificial Sequence
  derived and/or modified protein sequence (wt) from HRSV__AFX60127.1__F-del
MELPILKANAITTILTAVTLCFASSQNITEEFYQSTCSAVSKGYLSALRTGWYTSVITIELSNIKENKCNGTDAKVKLIKQELDKYKNAVTELQLLMQSTPAANNRARRELPRFMNYTLNNTKNTNVTLSKKRKRRFLGFLLGVGSAIASGIAVSKVLHLEGEVNKIKNALLSTNKAVVSLSNGVSVLTSKVLDLKNYIDKQLLPIVNKQSCSISNIETVIEFQQKNNRLLEITREFSVNAGVTTPVSTYMLTNSELLSLINDMPITNDQKKLMSNNVQIVRQQSYSIMSIIKEEVLAYVVQLPLYGVIDTPCWKLHTSPLCTTNTKEGSNICLTRTDRGWYCDNAGSVSFFPQAETCKVQSNRVFCDTMNSLTLPSEVNLCNVDIFNPKYDCKIMTSKTDVSSSVITSLGAIVSCYGKTKCTASNKNRGIIKTFSNGCDYVSNKGVDTVSVGNTLYYVNKQEGKNLYVKGEPIINFYDPLVFPSDEFDASISQVNEKINQSLAFIRKSDELLHNVNAGKSTTNIMITTIIIVIVVILLSLIVVGLLLYCKAR

SEQ ID NO: 9077 - protein, 553 aa, Artificial Sequence
  derived and/or modified protein sequence (wt) from HRSV__AFX60137.1__F-del
MELPILNTNAITTILAAVTLCFASSQNITEEFYQSTCSAVSKGYLSALRTGWYTSVITIELSNIKENKCNGTDAKVKLIKQELDKYKNAVTELQLLMQSTPAANSRARRELPRFMNYTLNNTKNTNVTLSKKRKRRFLGFLLGVGSAIASGIAVSKVLHLEGEVNKIKSALLSTNKAVVSLSNGVSVLTSKVLDLKNYIDKQLLPIVNKQSCSISNIETVIEFQQKNNRLLEITREFSVNAGVTTPVSTYMLTNSELLSLINDMPITNDQKKLMSNNVQIVRQQSYSIMSIIKEEVLAYVVQLPLYGVIDTPCWKLHTSPLCTTNKKEGSNICLTRTDRGWYCDNAGSVSFFPQAETCKVQSNRVFCDTMNSLTLPSEVNLCNIDIFNPKYDCKIMTSKTDVSSSVITSLGAIVSCYGKTKCTASNKNRGIIKTFSNGCDYVSNKGVDTVSVGNTLYYVNKQEGKSLYVKGEPIINFYDPLVFPSDEFDASISQVNEKINQSLAFIRKSDELLHNVNAGKSTTNIMITTIIIVIIVILLSLIAVGLLLYCKAR

SEQ ID NO: 9078 - protein, 553 aa, Artificial Sequence
  derived and/or modified protein sequence (wt) from HRSV__AFX60135.1__F-del
MELPILKTNAITTILAAVTLCFASSQNITEEFYQSTCSAVSKGYLSALRTGWYTSVITIELSNIKENKCNGTDAKVKLIKQELDKYKNAVTELQLLMQSTPAANSRARRELPRFMNYTLNNTKNTNVTLSKKRKRRFLGFLLGVGSAIASGTAVSKVLHLEGEVNKIKSALLSTNKAVVSLSNGVSVLTSKVLDLKNYIDKQLLPIVNKQSCSISNIETVIEFQQKNNRLLEITREFSVNAGVTTPVSTYMLTNSELLSLINDMPITNDQKKLMSSNVQIVRQQSYSIMSIIKEEVLAYVVQLPLYGVIDTPCWKLHTSPLCTTNTKEGSNICLTRTDRGWYCDNAGSVSFFPQAETCKVQSNRVFCDTMNSLTLPSEVNLCNIDIFNPKYDCKIMTSKTDVSSSVITSLGAIVSCYGKTKCTASNKNRGIIKTFSNGCDYVSNKGVDTVSVGNTLYYVNKQEGKSLYVKGEPIINFYDPLVFPSDEFDASISQVNEKINQSLAFIRKSDELLHNVNAGKSTTNIMITTIIIVIIVILLALIAVGLLLYCKAR

SEQ ID NO: 9079 - protein, 553 aa, Artificial Sequence
  derived and/or modified protein sequence (wt) from HRSV__AFV46420.1__F-del
MELPILKTNAITTILAAVTLCFASSQNITEEFYQSTCSAVSKGYLSALRTGWYTSVITIELSNIKENKCNGTDAKVKLIKQELDKYKNAVTELQLLMQSTPAANSRARRELPRFMNYTLNNTKNTNVTLSKKRKRRFLGFLLGVGSAIASGIAVSKVLHLEGEVNKIKSALLSTNKAVVSLSNGVSVLTSKVLDLKNYIDKQLLPIVNKQSCSISNIETVIEFQQKNNRLLEITREFSVNAGVTTPVSTYMLTNSELLSLINDMPITNDQKKLMSSNVQIVRQQSYSIMSIIKEEVLAYVVQLPLYGVIDTPCWKLHTSPLCTTNTKEGSNICITRTDRGWYCDNAGSVSFFPQAETCKVQSNRVFCDTMNSLTLPSEVNFCNIDIFNPKYDCKIMTSKTDVSSSVITSLGAIVSCYGKTKCTASNKNRGIIKTFSNGCDYVSNKGVDTVSVGNTLYYVNKQEGKSLYVKGEPIINFYDPLVFPSDEFDASISQVNEKINQSLAFIRKSDELLHNVNAGKSTTNIMITTIIIVIIVILLALIAVGLLLYCKAR

SEQ ID NO: 9080 - protein, 553 aa, Artificial Sequence
  derived and/or modified protein sequence (wt) from HRSV__AFX60200.1__F-del
MELPILKTNAITTILAAVTLCFASSQNITEEFYQSTCSAVSKGYLSALRTGWYTSVITIELSNIKENKCNGTDAKVKLIKQELDKYKNAVTELQLLMQSTPAANSRARRELPRFMNYTLNNTKNTNVTLSKKRKRRFLGFLLGVGSAIASGIAVSKVLHLEGEVNKIKSALLSTNKAVVSLSNGVSVLTSKVLDLKNYIDKQLLPIVNKQSCSISNIETVIEFQQKNNRLLEITREFSVNAGVTTPVSTYMLTNSELLSLINDMPITNDQKKLMSSNVQIVRQQSYSIMSIIKEEVLAYVVQLPLYGVIDTPCWKLHTSPLCTTNTKVGSNICLTRTDRGWYCDNAGSVSFFPQAETCKVQSNRVFCDTMNSLTLPSEVNLCNIDIFNPKYDCKIMTSKTDVSSSVITSLGAIVSCYGKTKCTASNKNRGIIKTFSNGCDYVSNKGVDTVSVGNTLYYVNKQEGKSLYVKGEPIINFYDPLVFPSDEFDASISQVNEKINQSLAFIRKSDELLHNVNAGKSTTNIMITTIIIVIIVILLALIAVGLLLYCKAR

SEQ ID NO: 9081 - protein, 553 aa, Artificial Sequence
  derived and/or modified protein sequence (wt) from HRSV__AFV46419.1__F-del
MELPILKTNAITTILAAVTLCFASSQNITEEFYQSTCSAVSKGYLSALRTGWYTSVITIELSNIKENKCNGTDAKVKLIKQELDKYKNAVTELQLLMQSTPAANSRARRELPRFMNYTLNNTKNTNVTLSKKRKRRFLGFLLGVGSAIASGIAVSKVLHLEGEVNKIKSALLSTNKAVVSLSNGVSVLTSKVLDLKNYIDKQLLPIVNKQSCSISNIETVIEFQQKNNRLLEITREFSVNAGVTTPVSTYMLTNSELLSLINDMPITNDQKKLMSSNVQIVRQQSYSIMSIIKEEVLAYVVQLPLYGVIDTPCWKLHTSPLCTTNTKEGSNICITRTDRGWYCDNAGSVSFFPQAETCKVQSNRVFCDTMNSLTLPSEVNLCNIDIFNPKYDCKIMTSKTDVSSSVITSLGAIVSCYGKTKCTASNKNRGIIKTFSNGCDYVSNKGVDTVSVGNTLYYVNKQEGKSLYVKGEPIINFYDPLVFPSDEFDASISQVNEKINQSLAFIRKSDELLHNVNAGKSTTNIMITTIIIVIIVILLALIAVGLLLYCKAR

SEQ ID NO: 9082 - protein, 553 aa, Artificial Sequence
  derived and/or modified protein sequence (wt) from HRSV__AFV46417.1__F-del
MELPILKTNAITTILAAVTLCFASSQNITEEFYQSTCSAVSKGYLSALRTGWYTSVITIELSNIKENKCNGTDAKVKLIKQELDKYKNAVTELQLLMQSTPAANSRTRRELPRFMNYTLNNTKNTNVTLSKKRKRRFLGFLLGVGSAIASGIAVSKVLHLEGEVNKIKSALLSTNKAVVSLSNGVSVLTSKVLDLKNYIDKQLLPIVNKQSCSISNIETVIEFQQKNNRLLEITREFSVNAGVTTPVSTYMLTNSELLSLINDMPITNDQKKLMSSNVQIVRQQSYSIMSIIKEEVLAYVVQLPLYGVIDTPCWKLHTSPLCTTNTKEGSNICLTRTDRGWYCDNAGSVSFFPQAETCKVQSNRVFCDTMNSLTLPSEVNLCNIDIFNPKYDCKIMTSKTDVSSSVITSLGAIVSCYGKTKCTASNKNRGIIKTFSNGCDYVSNKGVDTVSVGNTLYYVNKQEGKSLYVKGEPIINFYDPLVFPSDEFDASISQVNEKINQSLAFIRKSDELLHNVNAGKSTTNIMITTIIIVIIVILLALIAVGLLLYCKAR

SEQ ID NO: 9083 - protein, 553 aa, Artificial Sequence
  derived and/or modified protein sequence (wt) from HRSV__AFV46413.1__F-del
MELPILKTNAITTILAAITLCFASSQNITEEFYQSTCSAVSKGYLSALRTGWYTSVITIELSNIKENKCNGTDAKVKLIKQELDKYKNAVTELQLLMQSTPAANSRARRELPRFMNYTLNNTKNTNVTLSKKRKRRFLGFLLGVGSAIASGIAVSKVLHLEGEVNKIKSALLSTNKAVVSLSNGVSVLTSKVLDLKNYIDKQLLPIVNKQSCSISNIETVIEFQQKNNRLLEITREFSVNAGVTTPVSTYMLTNSELLSLINDMPITNDQKKLMSSNVQIVRQQSYSIMSIIKEEVLAYVVQLPLYGVIDTPCWKLHTSPLCTTNTKEGSNICLTRTDRGWYCDNAGSVSFFPQAETCKVQSNRVFCDTMNSLTLPSEVNLCNIDIFNPKYDCKIMTSKTDVSSSVITSLGAIVSCYGKTKCTASNKNRGIIKTFSNGCDYVSNKGVDTVSVGNTLYYVNKQEGKSLYVKGEPIINFYDPLVFPSDEFDASISQVNEKINQSLAFIRKSDELLHNVNAGKSTTNIMITTIIIVIIVILLALIAVGLLLYCKAR

SEQ ID NO: 9084 - protein, 553 aa, Artificial Sequence
  derived and/or modified protein sequence (wt) from HRSV__AFV46414.1__F-del
MELPILKTNAITTILAAITLCFASSQNITEEFYQSTCSAVSKGYLSALRTGWYTSVITIELSNIKENKCNGTDAKVKLIKQELDKYKNAVIELQLLMQSTPAANSRARRELPRFMNYTLNNTKNTNVTLSKKRKRRFLGFLLGVGSAIASGIAVSKVLHLEGEVNKIKSALLSTNKAVVSLSNGVSVLTSKVLDLKNYIDKQLLPIVNKQSCSISNIETVIEFQQKNNRLLEITREFSVNAGVTTPVSTYMLTNSELLSLINDMPITNDQKKLMSSNVQIVRQQSYSIMSIIKEEVLAYVVQLPLYGVIDTPCWKLHTSPLCTTNTKEGSNICLTRTDRGWYCDNAGSVSFFPQAETCKVQSNRVFCDTMNSLTLPSEVNLCNIDIFNPKYDCKIMTSKTDVSSSVITSLGAIVSCYGKTKCTASNKNRGIIKTFSNGCDYVSNKGVDTVSVGNTLYYVNKQEGKSLYVKGEPIINFYDPLVFPSDEFDASISQVNEKINQSLAFIRKSDELLHNVNAGKSTTNIMITTIIIVIIVILLALIAVGLLLYCKAR

SEQ ID NO: 9085 - protein, 553 aa, Artificial Sequence
  derived and/or modified protein sequence (wt) from HRSV__AFV46410.1__F-del
MELPILKTNAITTILAAVTLCFASSQNITEEFYQSTCSAVSKGYLSALRTGWYTSVITIELSNIKENKCNGTDAKVKLIKQELDKYKNAVTELQLLMQSTPTANSRARRELPRFMNYTLNNTKNINVTLSKKRKRRFLGFLLGVGSAIASGIAVSKVLHLEGEVNKIKSALLSTNKAVVSLSNGVSVLTSKVLDLKNYIDKQLLPIVNKQSCSISNIETVIEFQQKNNRLLEITREFSVNAGVTTPVSTYMLTNSELLSLINDMPITNDQKKLMSSNVQIVRQQSYSIMSIIKEEVLAYVVQLPLYGVIDTPCWKLHTSPLCTTNTKEGSNICLTRTDRGWYCDNAGSVSFFPQAETCKVQSNRVFCDTMNSLTLPSEVNLCNIDIFNPKYDCKIMTSKTDVSSSVITSLGAIVSCYGKTKCTASNKNRGIIKTFSNGCDYVSNKGVDTVSVGNTLYYVNKQEGKSLYVKGEPIINFYDPLVFPSDEFDASISQVNEKINQSLAFIRKSDELLHNVNAGKSTTNIMITTIIIVIIVILLALIAVGLLLYCKAR

SEQ ID NO: 9086 - protein, 553 aa, Artificial Sequence
  derived and/or modified protein sequence (wt) from HRSV__AFV46403.1__F-del
MELPILKTNAITTILAAVTLCFASSQNITEEFYQSTCSAVSKGYLSALRTGWYTSVITIELSNIKENKCNGTDAKVKLIKQELDKYKNAVTELQLLMQSTSAANSRARRELPRFMNYTLNNTKNTNVTLSKKRKRRFLGFLLGVGSAIASGIAVSKVLHLEGEVNKIKSALLSTNKAVVSLSNGVSVLTSKVLDLKNYIDKQLLPIVNKQSCSISNIETVIEFQQKNNRLLEITREFSVNAGVTTPVSTYMLTNSELLSLINDMPITNDQKKLMSSNVQIVRQQSYSIMSIIKEEVLAYVVQLPLYGVIDTPCWKLHTSPLCTTNIKEGSNICLTRTDRGWYCDNAGSVSFFPQAETCKVQSNRVFCDTMNSLTLPSEVNLCNIDIFNPKYDCKIMTSKTDVSSSVITSLGAIVSCYGKTKCTASNKNRGIIKTFSNGCDYVSNKGVDTVSVGNTLYYVNKQEGKSLYVKGEPIINFYDPLVFPSDEFDASISQVNEKINQSLAFIRKSDELLHNVNAGKSTTNIMITTIIIVIIVILLALIAVGLLLYCKAR

SEQ ID NO: 9087 - protein, 553 aa, Artificial Sequence
  derived and/or modified protein sequence (wt) from HRSV__AFV46409.1__F-del
MELPILKTNAITTILAAVTLCFASSQNITEEFYQSTCSAVSKGYLSALRTGWYTSVITIELSNIKENKCNGTDAKVKLIKQELDKYKNAVTELQLLMQSTPAANSRARRELPRFMNYTLNNTKNTNVTLSKKRKRRFLGFLLGVGSAIASGIAVSKVLHLEGEVNKIKSALLSTNKAVVSLSNGVSVLTSKVLDLKNYIDKQLLPIVNKQSCSISNIETVIEFQQKNNRLLEITREFSVNAGVTTPVSTYMLTNSELLSLINDMPITNDQKKLMSSNVQIVRQQSYSIMSIIKEEVLAYVVQLPLYGVIDTPCWKLHTSPLCTTNTKEGSNICLTRTDRGWYCDNAGSVSFFPQAETCKVQSNRVFCDTMNSLTLPSEVNLCNIDIFNPKYDCKIMTSKTDVSSSVITSLGAIVSCYGKTKCTASNKNRGIIKTFSNGCDYVSNKGVDTVSVGNTLYYVNKQEGKSLYVKGEPIINFYDPLVFPSDEFDTSISQVNEKINQSLAFIRKSDELLHNVNAGKSTTNIMITTIIIVIIVILLALIAVGLLLYCKAR

SEQ ID NO: 9088 - protein, 553 aa, Artificial Sequence
  derived and/or modified protein sequence (wt) from HRSV__AFP99061.1__F-del
MELLIHRSSAIFLTLAINALYLTSSQNITEEFYQSTCSAVSRGYLSALRTGWYTSVITIELSNIKEIKCNGTDTKVKLIKQELDKYKNAVTELQLLMQNTPAVNNRARREAPQYMNYTINTTKNLNVSISKKRKRRFLGFLLGVGSAIASGIAVSKVLHLEGEVNKIKNALLSTNKAVVSLSNGVSVLTSKVLDLKNYINNQLLPIVNQQSCRISNIETVIEFQQKNSRLLEITREFSVNAGVTTPLSTYMLTNSELLSLINDMPITNDQKKLMSSNVQIVRQQSYSIMSIIKEEVLAYVVQLPIYGVIDTPCWKLHTSPLCTTNIKEGSNICLTRTDRGWYCDNAGSVSFFPQADTCKVQSNRVFCDTMNSLTLPSEVSLCNTDIFNSKYDCKIMTSKTDISSSVITSLGAIVSCYGKTKCTASNKNRGIIKTFSNGCDYVSNKGVDTVSVGNTLYYVNKLEGKNLYVKGEPIINYYDPLVFPSDEFDASISQVNEKINQSLAFIRRSDELLHNVNTGKSTTNIMITAIIIVIIVVLLSLIAIGLLLYCKAK

SEQ ID NO: 9089 - protein, 553 aa, Artificial Sequence
  derived and/or modified protein sequence (wt) from HRSV__AFM95400.1__F-del
MELPILKTNAITTILAAVTLCFASSQNITEEFYQSTCSAVSKGYLSALRTGWYTSVITIELSNIKENKCNGTDAKVKLIKQELDKYKNAVTELQLLMQSTSAANNRARRELPRFMNYTLNNTKNNNVTLSNKRKRRFLGFLLGVGSAIASGIAVSKVLHLEGEVNKIKSALLSTNKAVVSLSNGVSVLTSKVLDLKNYIDKQLLPIVNKQSCSISNIETVIEFQQKNNRLLEITREFSVNAGVTTPVSTYMLTNSELLSLINDMPITNDQKKLMSNNVQIVRQQSYSIMSIIKEEVLAYVVQLPLYGVIDTPCWKLHTSPLCTTNTKEGSNICLTRTDRGWYCDNAGSVSFFPQAETCKVQSNRVFCDTMNSLTLPSEVNLCNIDIFNPKYDCKIMTSKTDVSSSVITSLGAIVSCYGKTKCTASNKNRGIIKTFSNGCDYVSNKGVDTVSVGNTLYYVNKQEGKSLYVKGEPIINFYDPLVFPSDEFDASISQVNEKINQSLAFIRKSDELLHNVNVGKSTTNIMITTIIIVIIVILLLLIAVGLFLYCKAR

SEQ ID NO: 9090 - protein, 553 aa, Artificial Sequence
  derived and/or modified protein sequence (wt) from HRSV__AFV46401.1__F-del
MELPILKTNAITTILAAVTLCFASSQNITEEFYQSTCSAVSKGYLSALRTGWYTSVITIELSNIKENKCNGTDAKVKLIKQELDKYKNAVTELQLLMQSTPAANSRARRELPRFMNYTLNNTKNINVTLSKKRKRRFLGFLLGVGSAIASGIAVSKVLHLEGEVNKIKSALLSTNKAVVSLSNGVSVLTSKVLDLKNYIDKQLLPIVNKQSCSISNIETVIEFQQKNNRLLEITREFSVNAGVTTPVSTYMLTNSELLSLINDMPITNDQKKLMSSNVQIVRQQSYSIMSIIKEEVLAYVVQLPLYGVIDTPCWKLHTSPLCTTNTKEGSNICLTRTDRGWYCDNAGSVSFFPQAETCKVQSNRVFCDTMNSLTLPSEVNLCNIDIFNPKYDCKIMTSKTDVSSSVITSLGAIVSCYGKTKCTASNKNRGIIKTFSNGCDYVSNKGVDTVSVGNTLYYVNKQEGKSLYVKGEPIINFYDPLVFPSDEFDASISQVNEKINQSLAFIRKSDELLHNVNAGKSTTNIMITTIIIVIIVILLALIAVGLLLYCKAR

SEQ ID NO: 9091 - protein, 553 aa, Artificial Sequence
  derived and/or modified protein sequence (wt) from HRSV__AFP99064.1__F-del
MELLIHRSSAIFLTLAINALYLTSSQNITEEFYQSTCSAVSRGYLSALRTGWYTSVITIELSNIKETKCNGTDTKVKLIKQELDKYKNAVTELQLLMQNTPAANNRARREAPQYMNYTINTTKNLNVSISKKRKRRFLGFLLGVGSAIASGVAVSKVLHLEGEVNKIKNALLSTNKAVVSLSNGVSVLTSKVLDLKNYINNQLLPIVNQQSCRISNIETVIEFQQKNSRLLEITREFSVNAGVTTPLSTYMLTNSELLSLINDMPITNDQKKLMSSNVQIVRQQSYSIMSIIKEEVLAYVVQLPIYGVIDTPCWKLHTSPLCTTNIKEGSNICLTRTDRGWYCDNAGSVSFFPQADTCKVQSNRVFCDTMNSLTLPSEVSLCNTDIFNSKYDCKIMTSKTDISSSVITSLGAIVSCYGKTKCTASNKNRGIIKTFSNGCDYVSNKGVDTVSVGNTLYYVNKLEGKNLYVKGEPIINYYDPLVFPSDEFDASISQVNEKINQSLAFIRRSDELLHNVNTGKSTTNIMITVIIIVIIVVLLSLIAIGLLLYCKAK

SEQ ID NO: 9092 - protein, 553 aa, Artificial Sequence
  derived and/or modified protein sequence (wt) from HRSV__AFM95376.1__F-del
MELPILKTNAITTILAAVTLCFASSQNITEEFYQSTCSAVSKGYLSALRTGWYTSVITIELSNIKENKCNGTDAKVKLIKQELDKYKNAVTELQLLMQSTPAANNRARRELPRFMNYTLNNTKNTNVTVSKKRKRRFLGFLLGVGSAIASGIAVSKVLHLEGEVNKIKSALLSTNKAVVSLSNGVSVLTSKVLDLKNYIDKQLLPIVNKQSCSISNIETVIEFQQKNNRLLEITREFSVNAGVTTPVSTYMLTNSELLSLINDMPITNDQKKLMSNNVQIVRQQSYSIMSIIKEEVLAYVVQLPLYGVIDTPCWKLHTSPLCTTNTKEGSNICLTRTDRGWYCDNAGSVSFFPQAETCKVQSNRVFCDTMNSLTLPSEVNLCNIDIFNPKYDCKIMTSKTDVSSSVITSLGAIVSCYGKTKCTASNKNRGIIKTFSNGCDYVSNKGVDTVSVGNTLYYVNKQEGKSLYVKGEPIINFYDPLVFPSNEFDASISQVNEKINQSLAFIRKSDELLHNVNAGKSTTNIMITTIIIVIIVILLSLIAVGLLLYCKAR

SEQ ID NO: 9093 - protein, 553 aa, Artificial Sequence
  derived and/or modified protein sequence (wt) from HRSV__AFX60138.1__F-del
MELPILKTNSITTILAAVTLCFASSQNITEEFYQSTCSAVSKGYLSALRTGWYTSVITIELSNIKENKCNGTDTKVKLIKQELDKYKNAVTELQLLMQSTPAANSRARRELPRFMNYTLNNTKNTNVTLSKKRKRRFLGFLLGVGSAIASGIAVSKVLHLEGEVNKIKSALLSTNKAVVSLSNGVSVLTSKVLDLKNYIDKQLLPIVNKQSCSISNIETVIEFQQKNNRLLEITREFSVNAGVTTPVSTYMLTNSELLSLINDMPITNDQKKLMSSNVQIVRQQSYSIMSIIKEEVLAYVVQLPLYGVIDTPCWKLHTSPLCTTNTKEGSNICLTRTDRGWYCDNAGSVSFFPQAETCKVQSNRVFCDTMNSLTLPSEVNLCNIDIFNPKYDCKIMTSKTDVSSSVITSLGAIVSCYGKTKCTASNKNRGIIKTFSNGCDYVSNKGVDTVSVGNTLYYVNKQEGKSLYVKGEPIINFYDPLVFPSDEFDASISQVNEKINQSLAFIRKSDELLHNVNAGKSTTNIMITTIIIVIIVILLALIAVGLLLYCKAR

SEQ ID NO: 9094 - protein, 553 aa, Artificial Sequence
  derived and/or modified protein sequence (wt) from HRSV__AFP99060.1__F-del
MELLIHRSSAIFLTLAINALYLTSSQNITEEFYQSTCSAVSRGYLSALRTGWYTSVITIELSNIKETKCNGTDTKVKLIKQELDKYKNAVTELQLLMQNTPAVNNRARREAPQYMNYTINTTKNLNVSISKKRKRRFLGFLLGVGSAIASGIAVSKVLHLEGEVNKIKNALLSTNKAVVSLSNGVSVLTSKVLDLKNYINNQLLPIVNQQSCRISNIETVIEFQQKNSRLLEITREFSVNAGVTTPLSTYMLTNSELLSLINDMPITNDQKKLMSSNVQIVRQQSYSIMSIIKEEVLAYVVQLPIYGVIDTPCWKLHTSPLCTTNIKEGSNICLTRTDRGWYCDNAGSVSFFPQADTCKVQSNRVFCDTMNSLTLPSEVSLCNTDIFNSKYDCKIMTSKTDISSSVITSLGAIVSCYGKTKCTASNKNRGIIKTFSNGCDYVSNKGVDTVSVGNTLYYVNKLEGKNLYVKGEPIINYYDPLVFPSDEFDASISQVNEKINQSLAFIRRSDELLHNVNTGKSTTNIMITAIIIVIIVVLLSLIAIGLLLYCKAK

SEQ ID NO: 9095 - protein, 553 aa, Artificial Sequence
  derived and/or modified protein sequence (wt) from HRSV__AFM95365.1__F-del
MELPILKTNAITTILAAVTLCFASSQNITEEFYQSTCSAVSKGYLSALRTGWYTSVITIELSNIKENKCNGTDAKVKLIKQELDKYKNAVTELQLLMQSTPAANNRARRELPRFMNYTLNNTKNTNVTVSKKRKRRFLGFLLGVGSAIASGIAVSKVLHLEGEVNKIKSALLSTNKAVVSLSNGVSVLTSKVLDLKNYIDKQLLPIVNKQSCSISNIETVIEFQQKNNRLLEITREFSVNAGVTTPVSTYMLTNSELLSLINDMPITNDQKKLMSNNVQIVRQQSYSIMSIIKEEVLAYVVQLPLYGVIDTPCWKLHTSPLCTTNTKEGSNICLTRTDRGWYCDNAGSVSFFPQAETCKVQSNRVFCDTMNSLTLPSEVNLCNIDIFNPKYDCKIMTSKTDVSSSVITSLGAIVSCYGKTKCTASNKNRGIIKTFSNGCDYVSNKGVDTVSVGNTLYYVNKQEGKSLYVKGEPIINFYDPLVFPSDEFDASISQVNEKINQSLAFIRKYDELLHNVNAGKSTTNIMITTIIIVIIVILLSLIAVGLLLYCKAR

SEQ ID NO: 9096 - protein, 553 aa, Artificial Sequence
  derived and/or modified protein sequence (wt) from HRSV__AFM55563.1__F-del
MELPILKTNAITTILAAVTLCFASSQNITEEFYQSTCSAVSKGYLSALRTGWYTSVITIELSNIKENKCNGTDAKVKLIKQELDKYKNAVTELQLLMQSTQAANSRARRELPRFMNYTLNNTKNTNVTLSKKRKRRFLGFLLGVGSAIASGIAVSKVLHLEGEVNKIKSALLSTNKAVVSLSNGVSVLTSKVLDLKNYIDKQLLPIVNKQSCSISNIETVIEFQQKNNRLLEITREFSVNAGVTTPVSTYMLTNSELLSLINDMPITNDQKKLMSNNVQIVRQQSYSIMSIIKEEVLAYVVQLPLYGVIDTPCWKLHTSPLCTTNTKEGSNICLTRTDRGWYCDNAGSVSFFPQAETCKVQSNRVFCDTMNSLTLPSEVNLCNIDIFNPKYDCKIMTSKTDVSSSVITSLGAIVSCYGKTKCTASNKNRGIIKTFSNGCDYVSNKGVDTVSVGNTLYYVNKQEGKSLYVKGEPIINFYDPLVFPSDEFDASISQVNEKINQSLAFIRKSDELLHNVNAGKSTTNIMITTIIIVIIVILLSLIAVGLLLYCKAR

SEQ ID NO: 9097 - protein, 553 aa, Artificial Sequence
  derived and/or modified protein sequence (wt) from HRSV__AFM55530.1__F-del
MELPILKTNAITTILAAVTLCFASSQNITEEFYQSTCSAVSKGYLSALRTGWYTSVITIELSNIKENKCNGTDAKVKLIKQELDKYKNAVTELQLLMQSTPAANSRARRELPRFMNYTLNSTKNTNVTLSKKRKRRFLGFLLGVGSAIASGIAVSKVLHLEGEVNKIKSALLSTNKAVVSLSNGVSVLTSKVLDLKNYIDKQLLPIVNKQSCSISNIETVIEFQQKNNRLLEITREFSVNAGVTTPVSTYMLTNSELLSLINDMPITNDQKKLMSSNVQIVRQQSYSIMSIIKEEVLAYVVQLPLYGVIDTPCWKLHTSPLCTTNTKEGSNICLTRTDRGWYCDNAGSVSFFPQAETCKVQSNRVFCDTMNSLTLPSEVNLCNIDIFNPKYDCKIMTSKTDVSSSVITSLGAIVSCYGKTKCTASNKNRGIIKTFSNGCDYVSNKGVDTVSVGNTLYYVNKQEGKSLYVKGEPIINFYDPLVFPSDEFDASISQINEKINQSLAFIRKSDELLHNVNAGKSTTNIMITTIIIVIIVILLALIAVGLLLYCKAR

SEQ ID NO: 9098 - protein, 553 aa, Artificial Sequence
  derived and/or modified protein sequence (wt) from HRSV__AFM55442.1__F-del
MELPILKTNAITTIFAAVTLCFASSQNITEEFYQSTCSAVSKGYLSALRTGWYTSVITIELSNIKENKCNGTDAKVKLIKQELDKYKNAVTELQLLMQSTPAANNRARRELPRFMNYTLNNTKNNNVTLSKKRKRRFLGFLLGVGSAIASGIAVSKVLHLEGEVNKIKSALLSTNKAVVSLSNGVSVLTSKVLDLKNYIDKQLLPIVNKQSCSISNIETVIEFQQKNNRLLEITREFSVNAGVTTPVSTYMLTNSELLSLINDMPITNDQKKLMSNNVQIVRQQSYSIMSIIKEEVLAYVVQLPLYGVIDTPCWKLHTSPLCTTNTKEGSNICLTRTDRGWYCDNAGSVSFFPQAETCKVQSNRVFCDTMNSLTLPSEVNLCNIDIFNPKYDCKIMTSKTDVSSSVITSLGAIVSCYGKTKCTASNKNRGIIKTFSNGCDYVSNKGVDTVSVGNTLYYVNKQEGKSLYVKGEPIINFYDPLVFPSDEFDASISQVNEKINQSLAFIRKSDELLHNVNVGKSTTNIMITTIIIVIIVILLLLIAVGLFLYCKAR

SEQ ID NO: 9099 - protein, 553 aa, Artificial Sequence
  derived and/or modified protein sequence (wt) from HRSV__AFM55420.1__F-del
MELPILKTNAITTILAAVTLCFASSQNITEEFYQSTCSAVSKGYLSALRTGWYTSVITIELSNIKENKCNGTDAKVKLIKQELDKYKNAVTELQLLMQSTPAANNRARRELPRFMNYTLNNTKTTNVTLSRKRKRRFLGFLLGVGSAIASGIAVSKVLHLEGEVNKIKSALLSTNKAVVSLSNGVSVLTSKVLDLKNYIDKQLLPVVNKQSCRISNIETVIEFQQKNNRLLEITREFSVNAGVTTPVSTYMLTNSELLSLINDMPITNDQKKLMSNNVQIVRQQSYSIMSIIKEEVLAYVVQLPLYGVIDTPCWKLHTSPLCTTNTKEGSNICLTRTDRGWYCDNAGSVSFFPQAETCKVQSNRVFCDTMNSLTLPSEVNLCNIDIFNPKYDCKIMTSKTDVSSSVITSLGAIVSCYGKTKCTASNKNRGIIKTFSNGCDYVSNKGVDTVSVGNTLYYVNKQEGKSLYVKGEPIINFYDPLVFPSDEFDASISQVNEKINQSLAFIRKSDELLHNVNAGKSTTNIMITTIIIVIIVILLSLIAVGLLLYCKAR

SEQ ID NO: 9100 - protein, 553 aa, Artificial Sequence
  derived and/or modified protein sequence (wt) from HRSV__AFM55552.1__F-del
MELPILNTNAITTILAAVTLCFASSQNITEEFYQSTCSAVSKGYLSALRTGWYTSVITIELSNIKENKCNGTDAKVKLIKQELDKYKNAVTELQLLMQSTPAANSRARRELPRFMNYTLNNTKNTNVTLSKKRKRRFLGFLLGVGSAIASGIAVSKVLHLEGEVNKIKSALLSTNKAVVSLSNGVSVLTSKVLDLKNYIDKQLLPIVNKQSCSISNIETVIEFQQKNNRLLEITREFSVNAGVTTPVSTYMLTNSELLSLINDMPITNDQKKLMSNNVQIVRQQSYSIMSIIKEEVLAYVVQLPLYGVIDTPCWKLHTSPLCTTNTKEGSNICLTRTDRGWYCDNAGSVSFFPQAETCKVQSNRVFCDTMNSLTLPSEVNLCNIDIFNPKYDCKIMTSKTDVSSSVITSLGAIVSCYGKTKCTASNKNRGIIKTFSNGCDYVSNKGVDTVSVGNTLYYVNKQEGKSLYVKGEPIINFYDPLVFPSDEFDASISQVNEKINQSLAFIRKSDELLHNVNAGKSTTNIMITTIIIVIIVILLSLIAVGLLLYCKAR

SEQ ID NO: 9101 - protein, 553 aa, Artificial Sequence
  derived and/or modified protein sequence (wt) from HRSV__AFM55365.1__F-del
MELPILKTNAITTILAAVTLCFTSSQNITEEFYQSTCSAVSKGYLSALRTGWYTSVITIELSNIKENKCNGTDAKVKLIKQELDKYKNAVTELQLLMQSTPAANSRARRELPRFMNYTLNNTKNTNVTLSKKRKRRFLGFLLGVGSAIASGIAVSKVLHLEGEVNKIKSALLSTNKAVVSLSNGVSVLTSKVLDLKNYIDKQLLPIVNKQSCSISNIETVIEFQQKNNRLLEITREFSVNAGVTTPVSTYMLTNSELLSLINDMPITNDQKKLMSNNVQIVRQQSYSIMSIIKEEVLAYVVQLPLYGVIDTPCWKIHTSPLCTTNTKEGSNICLTRTDRGWYCDNAGSVSFFPQAETCKVQSNRVFCDTMNSLTLPSEVNLCNIDIFNPKYDCKIMTSKTDVSSSVITSLGAIVSCYGKTKCTASNKNRGIIKTFSNGCDYVSNKGVDTVSVGNTLYYVNKQEGKSLYVKGEPIINFYDPLVFPSDEFDASISQVNEKINQSLAFIRKSDELLHNVNAGKSTTNIMITTIIIVIIVILLSLIAVGLLLYCKAR

SEQ ID NO: 9102 - protein, 553 aa, Artificial Sequence
  derived and/or modified protein sequence (wt) from HRSV__AFP99059.1__F-del
MELLIHRSSAIFLTLAINALYLTSSQNITEEFYQSTCSAVSRGYLSALRTGWYTSVITIELSNIKETKCNGTDTKVKLIKQELDKYKNAVTELQLLMQNTPAANNRARREAPQYMNYTINTTKNLNVSISKKRKRRFLGFLLGVGSAIASGIAVSKVLHLEGEVNKIKNALLSTNKAVVSLSNGVSVLTSKVLDLKNYINNQLLPIVNQQSCRISNIETVIEFQQKNSRLLEITREFSVNAGVTTPLSTYMLTNSELLSLINDMPITNDQKKLMSSNVQIVRQQSYSIMSIIKEEVLAYVVQLPIYGVIDTPCWKLHTSPLCTTNIKEGSNICLTRTDRGWYCDNAGSVSFFPQADTCKVQSNRVFCDTMNSLTLPSEVSLCNTDIFNSKYDCKIMTSKTDISSSVITSLGAIVSCYGKTKCTASNKNRGIIKTFSNGCDYVSNKGVDTVSVGNTLYYVNKLEGKNLYVKGEPIINYYDPLVFPSDEFDASISQVNEKINQSLAFIRRSDELLHNVNTGKSTTNIMITVIIIVIIVVLLSLIAIGLLLYCKAK

SEQ ID NO: 9103 - protein, 553 aa, Artificial Sequence
  derived and/or modified protein sequence (wt) from HRSV__AFM55354.1__F-del
MELPILKTNAITTILAAVTLCFVSSQNITEEFYQSTCSAVSKGYLSALRTGWYTSVITIELSNIKENKCNGTDAKVKLIKQELDKYKNAVTELQLLMQSTPASNNRARRELPRFMNYTLNNTKNTNVTLSKKRKRRFLGFLLGVGSAIASGIAVSKVLHLEGEVNKIKSALLSTNKAVVSLSNGVSVLTSKVLDLKNYIDKQLLPIVNKQSCSISNIETVIEFQQKNNRLLEITREFSVNAGVTTPVSTYMLTNSELLSLINDMPITNDQKKLMSNNVQIVRQQSYSIMSIIKEEVLAYVVQLPLYGVIDTPCWKLHTSPLCTTNTKEGSNICLTRTDRGWYCDNAGSVSFFPQAETCKVQSNRVFCDTMNSLTLPSEVNLCNIDIFNPKYDCKIMTSKTDVSSSVITSLGAIVSCYGKTKCTASNKNRGIIKTFSNGCDYVSNKGVDTVSVGNTLYYVNKQEGKSLYVKGEPIINFYDPLVFPSDEFDASISQVNEKINQSLAFIRKSDELLHNVNAGKSTTNIMITTIIIVIVVILLSLIAVGLLLYCKAR

SEQ ID NO: 9104 - protein, 553 aa, Artificial Sequence
  derived and/or modified protein sequence (wt) from HRSV__AFM55343.1__F-del
MELPILKTNAITTILAAVTLCFASSQNITEEFYQSTCSAVSKGYLSALRTGWYTSVITIELSNIKENKCNGTDAKVKLIKQELDKYKNAVTELQLLMQSTPAANSRARRELPRFMNYTLNNTKNANVTLSKKRKRRFLGFLLGVGSAIASGIAVSKVLHLEGEVNKIKSALLSTNKAVVSLSNGVSVLTSKVLDLKNYIDKQLLPIVNKQSCSISNIETVIEFQQKNNRLLEITREFSVNAGVTTPVSTYMLTNSELLSLINDMPITNDQKKLMSSNVQIVRQQSYSIMSIIKEEVLAYVVQLPLYGVIDTPCWKLHTSPLCTTNTKEGSNICLTRTDRGWYCDNAGSVSFFPQAETCKVQSNRVFCDTMNSLTLPSEVNLCNIDIFNPKYDCKIMTSKTDVSSSVITSLGAIVSCYGKTKCTASNKNRGIIKTFSNGCDYVSNKGVDTVSVGNTLYYVNKQEGKSLYVKGEPIINFYDPLVFPSDEFDASISQVNEKINQSLAFIRKSDELLHNVNAGKSTTNIMITTIIIVIIVILLALIAVGLLLYCKAR

SEQ ID NO: 9105 - protein, 553 aa, Artificial Sequence
  derived and/or modified protein sequence (wt) from HRSV__AFM55387.1__F-del
MELPILKTNAITIILAAVTLCFASSQNITEEFYQSTCSAVSKGYLSALRTGWYTSVITIELSNIKENKCNGTDAKVKLIKQELDKYKNAVTELQLLMQSTPAANSRARRELPRFMNYTLNNTKNTNVTLSKKRKRRFLGFLLGVGSAIASGIAVSKVLHLEGEVNKIKSALLSTNKAVVSLSNGVSVLTSKVLDLKNYIDKQLLPIVNKQSCSISNIETVIEFQQKNNRLLEITREFSVNAGVTTPVSTYMLTNSELLSLINDMPITNDQKKLMSSNVQIVRQQSYSIMSIIKEEVLAYVVQLPLYGVIDTPCWKLHTSPLCTTNTKEGSNICLTRTDRGWYCDNAGSVSFFPQAETCKVQSNRVFCDTMNSLTLPSEVNLCNIDIFNPKYDCKIMTSKTDVSSSVITSLGAIVSCYGKTKCTASNKNRGIIKTFSNGCDYVSNKGVDTVSVGNTLYYVNKQEGKSLYVKGEPIINFYDPLVFPSDEFDASISQVNEKINQSLAFIRKSDELLHNVNAGKSTTNIMITTIIIVIIVILLALIAVGLLLYCKAR

SEQ ID NO: 9106 - protein, 553 aa, Artificial Sequence
  derived and/or modified protein sequence (wt) from HRSV__AFM55299.1__F-del
MDLPILKTKAITTILAAVSLCFASSQNITEEFYQSTCSAVSKGYLSALRTGWYTSVITIELSNIKENKCNGTDAKVKLIKQELDKYKNAVTELQLLMQSTPAANNRARRELPRFMNYTLNNNKNNNVTLSKKRKRRFLGFLLGVGSAIASGIAVSKVLHLEGEVNKIKSALLSTNKAVVSLSNGVSVLTSKVLDLKNYIDKQLLPIVNKQSCSISNIETVIEFQQKNNRLLEITREFSVNAGVTTPVSTYMLTNSELLSLINDMPITNDQKKLMSNNVQIVRQQSYSIMSIIKEEVLAYVVQLPLYGVIDTPCWKLHTSPLCTTNTKEGSNICLTRTDRGWYCDNAGSVSFFPQAETCKVQSNRVFCDTMNSLTLPSEVNLCNIDIFNPKYDCKIMTSKTDVSSSVITSLGAIVSCYGKTKCTASNKNRGIIKTFSNGCDYVSNKGVDTVSVGNTLYYVNKQEGKSLYVKGEPIINFYDPLVFPSDEFDASISQVNEKINQSLAFIRKSDELLHNVNVGKSTTNIMITTIIIVIIVILLLLIAVGLFLYCKAR

SEQ ID NO: 9107 - protein, 553 aa, Artificial Sequence
  derived and/or modified protein sequence (wt) from HRSV__AFM55288.1__F-del
MDLPILKTNAITTIFAAVTLCFASSQNITEEFYQSTCSAVSKGYLSALRTGWYTSVITIELSNIKENKCNGTDAKVKLIKQELDKYKNAVTELQLLMQSTPAANNRARRELPRFMNYTLNNTKNNNVTLSKKRKRRFLGFLLGVGSAIASGIAVSKVLHLEGEVNKIKSALLSTNKAVVSLSNGVSVLTSKVLDLKNYIDKQLLPIVNKQSCSISNIETVIEFQQKNNRLLEITREFSVNAGVTTPVSTYMLTNSELLSLINDMPITNDQKKLMSNNVQIVRQQSYSIMSIIKEEVLAYVVQLPLYGVIDTPCWKLHTSPLCTINTKEGSNICLTRTDRGWYCDNAGSVSFFPQAETCKVQSNRVFCDTMNSLTLPSEVNLCNIDIFNPKYDCKIMTSKTDVSSSVITSLGAIVSCYGKTKCTASNKNRGIIKTFSNGCDYVSNKGVDTVSVGNTLYYVNKQEGKSLYVKGEPIINFYDPLVFPSDEFDASISQVNEKINQSLAFIRKSDELLHNVNVGKSTTNIMITTIIIVIIVILLLLIAVGLFLYCKAR

SEQ ID NO: 9108 - protein, 553 aa, Artificial Sequence
  derived and/or modified protein sequence (wt) from HRSV__AFM55266.1__F-del
MELPILKTNAITTILAAVTFCFASSQNITEEFYQSTCSAVSKGYLSALRTGWYTSVITIELSNIKENKCNGTDAKVKLIKQELDKYKNAVTELQLLMQSTPASNNRARRELPRFMNYTLNNTKNTNVTLSKKRKRRFLGFLLGVGSAIASGIAVSKVLHLEGEVNKIKSALLSTNKAVVSLSNGVSVLTSKVLDLKNYIDKQLLPIVNKQSCSISNIETVIEFQQKNNRLLEITREFSVNAGVTTPVSTYMLTNSELLSLINDMPITNDQKKLMSNNVQIVRQQSYSIMSIIKEEVLAYVVQLPLYGVIDTPCWKLHTSPLCTTNTKEGSNICLTRTDRGWYCDNAGSVSFFPQAETCKVQSNRVFCDTMNSLTLPSEVNLCNIDIFNPKYDCKIMTSKTDVSSSVITSLGAIVSCYGKTKCTASNKNRGIIKTFSNGCDYVSNKGVDTVSVGNTLYYVNKQEGKSLYVKGEPIINFYDPLVFPSDEFDASISQVNEKINQSLAFIRKSDELLHNVNAGKSTTNIMITTIIIVIVVILLSLIAVGLLLYCKAR

SEQ ID NO: 9109 - protein, 553 aa, Artificial Sequence
  derived and/or modified protein sequence (wt) from HRSV__AFM55277.1__F-del
MELPILKTNAITTILAAVTLCFASSQNITEEFYQSTCSAVSKGYLSALRTGWYTSVITIELSNIKENKCNGTDAKVKLIKQELDKYKNAVTELQLLMQSTPASNNRARRELPRFMNYTLNNTKNTNVTLSKKRKRRFLGFLLGVGSAIASGIAVSKVLHLEGEVNKIKSALLSTNKAVVSLSNGVSVLTSKVLDLKNYIDKQLLPIVNKQSCSISNIETVIEFQQKNNRLLEITREFSVNAGVTTPVSTYMLTNSELLSLINDMPITNDQKKLMSNNVQIVRQQSYSIMSIIKEEVLAYVVQLPLYGVIDTPCWKLHTSPLCTTNTKEGSNICLTRTDRGWYCDNAGSVSFFPQAETCKVQSNRVFCDTMNSLTLPSEVNLCNIDIFNSKYDCKIMTSKTDVSSSVITSLGAIVSCYGKTKCTASNKNRGIIKTFSNGCDYVSNKGVDTVSVGNTLYYVNKQEGKSLYVKGEPIINFYDPLVFPSDEFDASISQVNEKINQSLAFIRKSDELLHNVNAGKSTTNIMITTIIIVIVVILLSLIAVGLLLYCKAR

SEQ ID NO: 9110 - protein, 553 aa, Artificial Sequence
  derived and/or modified protein sequence (wt) from HRSV__AFM55255.1__F-del
MELPILKTNAITTILAAVTLCFASSQNITEEFYQSTCSAVSKGYLSALRTGWYTSVITIELSNIKENKCNGTDAKVKLIKQELDKYKNAVTELQLLMQSTPAANNRARRELPRFMNYTLNNTKNNNVTLSKKRKRRFLGFLLGVGSAIASGIAVSKVLHLEGEVNKIKSALLSTNKAVVSLSNGVSVLTSKVLDLKNYIDKQLLPIVNKQSCSISNIETVIEFQQKNNRLLEITREFSVNAGVTTPVSTYMLTNSELLSLINDMPITNDQKKLMSNNVQIVRQQSYSIMSIIKEEVLAYVVQLPLYGVIDTPCWKLHTSPLCTINTKEGSNICLTRTDRGWYCDNAGSVSFFPQAETCKVQSNRVFCDTMNSLTLPSEVNLCNIDIFNPKYDCKIMTSKTDVSSSVITSLGAIVSCYGKTKCTASNKNRGIIKTFSNGCDYVSNKGVDTVSVGNTLYYVNKQEGKSLYVKGEPIINFYDPLVFPSDEFDASISQVNEKINQSLAFIRKSDELLHNVNVGKSTTNIMITTIIIVIIVILLLLIAVGLFLYFKAR

SEQ ID NO: 9111 - protein, 553 aa, Artificial Sequence
  derived and/or modified protein sequence (wt) from HRSV__AFM55222.1__F-del
MELPILKTNVITTILAAVTLCFASSQNITEEFYQSTCSAVSKGYLSALRTGWYTSVITIELSNIKENKCNGTDAKVKLIKQELDKYKNAVTELQLLMQSTPAANNRARRELPRFMNYTLNNTKTTNVTLSKKRKRRFLGFLLGVGSAIASGIAVSKVLHLEGEVNKIKSALLSTNKAVVSLSNGVSVLTSKVLDLKNYIDKQLLPIVNKQSCSISNIETVIEFQQKNNRLLEITREFSVNAGVTTPVSTYMLTNSELLSLINDMPITNDQKKLMSNNVQIVRQQSYSIMSIIKEEVLAYVVQLPLYGVIDTPCWKLHTSPLCTTNTKEGSNICLTRTDRGWYCDNAGSVSFFPQAETCKVQSNRVFCDTMNSLTLPSEVNLCNIDIFNPKYDCKIMTSKTDVSSSVITSLGAIVSCYGKTKCTASNKNRGIIKTFSNGCDYVSNKGVDTVSVGNTLYYVNKQEGKSLYVKGEPIINFYDPLVFPSDEFDASISQVNEKINQSLAFIRKSDELLHNVNAGKSTTNIMITTIIIVIIVILLSLIAVGLLLYCKAR

SEQ ID NO: 9112 - protein, 553 aa, Artificial Sequence
  derived and/or modified protein sequence (wt) from HRSV__AFM55211.1__F-del
MELPILKTNAITTILAAVTLCFASSQNITEEFYQSTCSAVSKGYLSALRTGWYTSVITIELSNIKENKCNGTDAKVKLIKQELDKYKNAVTELQLLMQSTPAANNRARRELPRFMNYTLNNTKTTNVTLSRKRKRRFLGFLLGVGSAIASGIAVSKVLHLEGEVNKIKSALLSTNKAVVSLSNGVSVLTSKVLDLKNYIDKQLLPIVNKQSCSISNIETVIEFQQKNNRLLEITREFSVNAGVTTPVSTYMLTNSELLSLINDMPITNDQKKLMSNNVQIVRQQSYSIMSIIKEEVLAYVVQLPLYGVIDTPCWKLHTSPLCTTNTKEGSNICLTRTDRGWYCDNAGSVSFFPQAETCKVQSNRVFCDTMNSLTLPSEVNLCNIDIFNPKYDCKIMTSKTDVSSSVITSLGAIVSCYGKTKCTASNKNRGIIKTFSNGCDYVSNKGVDTVSVGNTLYYVNKQEGKSLYVKGEPIINFYDPLVFPSDEFDASISQVNEKINQSLAFIRKSDELLHNVNAGKSTTNIMITTIIIVIIVILLSLIAVGLLLYCKAR

SEQ ID NO: 9113 - protein, 553 aa, Artificial Sequence
  derived and/or modified protein sequence (wt) from HRSV__AFI25262.1__F-del
MELLIHRSSAIFLTLAINALYLTSSQNITEEFYQSTCSAVSRGYFSALRTGWYTSVITIELSNIKEIKCNGTDTKVKLIKQELDKYKNAVTELQLLMQNTPAANNRARREAPQYMNYTINTTKNLNVSISKKRKRRFLGFLLGVGSAIASGIAVSKVLHLEGEVNKIKNALLSTNKAVVSLSNGVSVLTSKVLDLKNYINNQLLPIVNQQSCRISNIETVIEFQQKNSRLLEITREFSVNAGVTTPLSTYMLTNSELLSLINDMPITNDQKKLMSSNVQIVRQQSYSIMSIIKEEVLAYVVQLPIYGVIDTPCWKLHTSPLCTTNIKEGSNICLTRTDRGWYCDNAGSVSFFPQADTCKVQSNRVFCDTMNSLTLPSEVSLCNTDIFNSKYDCKIMTSKTDISSSVITSLGAIVSCYGKTKCTASNKNRGIIKTFSNGCDYVSNKGVDTVSVGNTLYYVNKLEGKNLYVKGEPIINYYDPLVFPSDEFDSSISQVNEKINQSLAFIRRSDELLHNVNTGKSTTNIMITAIIIVIIVVLLSLIAIGLLLYCKAK

SEQ ID NO: 9114 - protein, 553 aa, Artificial Sequence
  derived and/or modified protein sequence (wt) from HRSV__AFD34266.1__F-del
MELLIHRSSAIFLTLAINALYLTSSQNITEEFYQSTCSAVSRGYFSALRTGWYTSVITIELSNIKETKCNGTDTKVKLIKQELDKYKNAVTELQLLMQNTPAANNRARREAPQYMNYTINTTKNLNVSISKKRKRRFLGFLLGVGSAIASGIAVSKVLHLEGEVNKIKNALLSTNKAVVSLSNGVSVLTSKVLDLKNYINNQLLPIVNQQSCRISNIETVIEFQQKNSRLLEITREFSVNAGVTTPLSTYMLTNSELLSLINDMPITNDQKKLMSSNVQIVRQQSYSIMSIIKEEVLAYVVQLPIYGVIDTPCWKLHTSPLCTTNIKEGSNICLTRTDRGWYCDNAGSVSFFPQADTCKVQSNRVFCDTMNSLTLPSEVSLCNTDIFNSKYDCKIMTSKTDISSSVITSLGAIVSCYGKTKCTASNKNRGIIKTFSNGCDYVSNKGVDTVSVGNTLYYVNKLEGKNLYVKGEPIINYYDPLVFPSDEFDASISQVNEKINQSLAFIRRSDELLHNVNTGKSTTNIMITVIIIVIIVVLLSLIAIGLLLYCKAK

SEQ ID NO: 9115 - protein, 553 aa, Artificial Sequence
  derived and/or modified protein sequence (wt) from HRSV__AFM55332.1__F-del
MELPILKTNAITTILAAVTLCFASSQNITEEFYQSTCSAVSKGYLSALRTGWYTSVITIELSNIKENKCNGTDAKVKLIKQELDKYKNAVTELQLLMQSTPATNNRARRELPRFMNYTLNNTKNTNVTLSKKRKRRFLGFLLGVGSAIASGIAVSKVLHLEGEVNKIKSALLSTNKAVVSLSNGVSVLTSKVLDLKNYIDKQLLPIVNKQSCSISNIETVIEFQQKNNRLLEITREFSVNAGVTTPVSTYMLTNSELLSLINDMPITNDQKKLMSNNVQIVRQQSYSIMSIIKEEVLAYVVQLPLYGVIDTPCWKLHTSPLCTTNTKEGSNICLTRTDRGWYCDNAGSVSFFPQAETCKVQSNRVFCDTMNSLTLPSEVNLCNIDIFNPKYDCKIMTSKTDVSSSVITSLGAIVSCYGKTKCTASNKNRGIIKTFSNGCDYVSNKGVDTVSVGNTLYYVNKQEGKSLYVKGEPIINFYDPLVFPSDEFDASISQVNEKINQSLAFIRKSDELLHNVNAGKSTTNIMITTIIIVIIVILLSLIAVGLLLYCKAR

SEQ ID NO: 9116 - protein, 553 aa, Artificial Sequence
  derived and/or modified protein sequence (wt) from HRSV__AFD34264.1__F-del
MELLIHRSSAILLTLAINALYLTSSQNITEEFYQSTCSAVSRGYFSALRTGWYTSVITIELSNIKETKCNGTDTKVKLIKQELDKYKNAVTELQLLMQNTPAANNRARREAPQYMNYTINTTKNLNVSISKKRKRRFLGFLLGVGSAIASGIAVSKVLHLEGEVNKIKNALLSTNKAVVSLSNGVSVLTSKVLDLKNYINNQLLPIVNQQSCRISNIETVIEFQQKNSRLLEITREFSVNAGVTTPLSTYMLTNGELLSLINDMPITNDQKKLMSSNAQIVRQQSYSIMSIIKEEVLAYVVQLPIYGVIDTPCWKLHTSPLCTTNIKEGSNICLTRTDRGWYCDNAGSVSFFPQADTCKVQSNRVFCDTMNSLTLPSEVSLCNTDIFNSKYDCKIMTSKTDISSSVITSLGAIVSCYGKTKCTASNKNRGIIKTFSNGCDYVSNKGVDTVSVGNTLYYVNKLEGKNLYVKGEPIINYYDPLVFPSDEFDASISQVNEKINQSLAFIRRSDELLHNVNTGKSTTNIMITAIIIVIIVVLLSLIAIGLLLYCKAK

SEQ ID NO: 9117 - protein, 553 aa, Artificial Sequence
  derived and/or modified protein sequence (wt) from HRSV__AFD34262.1__F-del
MELLIHRSSAIFLTLAINALYLTSSQNITEEFYQSTCSAVSRGYFSALRTGWYTSVITIELSNIKETKCNGTDTKVKLIKQELDKYKNAVTELQLLMQNTPAANNRARREAPQYMNYTINTTKNLNVSISKKRKRRFLGFLLGVGSAIASGIAVSKVLHLEGEVNKIKNALLSTNKAVVSLSNGVSVLTSKVLDLKNYINNQLLPIVNQQSCRISNIETVIEFQQKNSRLLEITREFSVNAGVTTPLSTHMLTNSELLSLINDMPITNDQKKLMSSNVQIVRQQSYSIMSIIKEEVLAYVVQLPIYGVIDTPCWKLHTSPLCTTNIKEGSNICLTRTDRGWYCDNAGSVSFFPQADTCKVQSNRVFCDTMNSLTLPSEVSLCNTDIFNSKYDCKIMTSKTDISSSVITSLGAIVSCYGKTKCTASNKNRGIIKTFSNGCDYVSNKGVDTVSVGNTLYYVNKLEGKNLYVKGEPIINYYDPLVFPSDEFDASISQVNEKINQSLAFIRRSDELLHNVNTGKSTTNIMITAIIIVIIVVLLSLIAIGLLLYCKAK

SEQ ID NO: 9118 - protein, 553 aa, Artificial Sequence
  derived and/or modified protein sequence (wt) from HRSV__AFD34265.1__F-del
MELLIHRSSAIFLTLAINALYLTSSQNITEEFYQSTCSAVSRGYLSALRTGWYTSVITIELSNIKETKCNGTDTKVKLIKQELDKYKNAVTELQLLMQNTPAANNRARREASQYMNYTINTTKNLNVSISKKRKRRFLGFLLGVGSAIASGIAVSKVLHLEGEVNKIKNALLSTNKAVVSLSNGVSVLTSKVLDLKNYINNQLLPIVNQQSCRISNIETVIEFQQKNSRLLEIAREFSVNAGVTTPLSTYMLTNSELLSLINDMPITNDQKKLMSSNVQIVRQQSYSIMSIIKEEVLAYVVQLPIYGVIDTPCWKLHTSPLCTTNIKEGSNICLTRTDRGWYCDNAGSVSFFPQADTCKVQSNRVFCDTMNSLTLPSEVSLCNTDIFNSKYDCKIMTSKTDISSSVITSLGAIVSCYGKTKCTASNKNRGIIKTFSNGCDYVSNKGVDTVSVGNTLYYVNKLEGKNLYVKGEPIINYYDPLVFPSDEFDASISQVNEKINQSLAFIRRSDELLHNVNTGKSTTNIMITAIIIVIIVVLLSLIAIGLLLYCKAK

SEQ ID NO: 9119 - protein, 553 aa, Artificial Sequence
  derived and/or modified protein sequence (wt) from HRSV__AFD34261.1__F-del
MELLIHRSSAIFLTLAINALYLTSSQNITEEFYQSTCSAVSRGYFSALRTGWYTSVITIELSNIKETKCNGTDTKVKLIKQELDKYKNAVTELQLLMQNTPAANNRARREAPQYMNYTINTTKNLNVSISKKRKRRFLGFLLGVGSAIASGIAVSKVLHLEGEVNKIKNALLSTNKAVVSLSNGVSVLTSKVLDLKNYINNQLLPIVNQQSCRISNIETVIEFQQKNSRLLEITREFGVNAGVTTPLSTYMLTNSELLSLINDMPITNDQKKLMSSNVQIVRQQSYSIMSIIKEEVLAYVVQLPIYGVIDTHCWKLHTSPLCTTNIKEGSNICLTRTDRGWYCDNAGSVSFFPQADTCKVQSNRVFCDTMNSLTLPSEVSLCNTDIFNSKYDCKIMTSKTDISSSVITSLGAIVSCYGKTKCTASNKNRGIIKTFSNGCDYVSNKGVDTVSVGNTLYYVNKLEGKNLYVKGEPIINYYDPLVFPSDEFDASISQVNEKINQSLAFIRRSDELLHNVNTGKSTTNIMITAIIIVIIVVLLSLIAIGLLLYCKAK

SEQ ID NO: 9120 - protein, 553 aa, Artificial Sequence
  derived and/or modified protein sequence (wt) from HRSV__AFD34260.1__F-del
MELLIHRSSAIFLTLAINALYLTSSQNITEEFYQSTCSAVSRGYFSALRTGWYTSVITIELSNIKETKCNGTDTKVKLIKQELDKYKNAVTELQLLMQNTPAANNRARREAPQYMNYTINTTKNLNVSISKKRKRRFLGFLLGVGSAIASGIAVSKVLHLEGEVNKIKNALLSTNKAVVSLSNGVSVLTSKVLDLKNYINNQLLPIVNKQSCRISNIETVIEFQQKNSRLLEITREFSVNAGVTTPLSTYMLTNSELLSLINDMPITNDQKKLMSSNVQIVRQQSYSIMSIIKEEVLAYVVQLPIYGVIDTPCWKLHTSPLCTTNIKEGSNICLTRTDRGWYCDNAGSVSFFPQADTCKVQSNRVFCDTMNSLTLPSEVSLCNTDIFNSKYDCKIMTSKTDVSSSVITSLGAIVSCYGKTKCTASNKNRGIIKTFSNGCDYVSNKGVDTVSVGNTLYYVNKLEGKNLYVKGEPIINYYDPLVFPSDEFDASISQVNEKINQSLAFIRRSDELLHNVNTGKSTTNIMITAIIIVIIVVLLSLIAIGLLLYCKAK

SEQ ID NO: 9121 - protein, 553 aa, Artificial Sequence
  derived and/or modified protein sequence (wt) from HRSV__AFD34259.1__F-del
MELLIYRSSAIFLTLAINALYLTSSQNITEEFYQSTCSAVSRGYFSALRTGWYTSVITIELSNIKETKCNGTDTKVKLIKQELDKYKNAVTELQLLMQNTPAANNRARREAPQYMNYTINTTKNLNVSISKKRKRRFLGFLLGVGSAIASGMAVSKVLHLEGEVNKIKNALLSTNKAVVSLSNGVSVLTSKVLDLKNYINNQLLPIVNQQSCRISNIETVIEFQQKNSRLLEITREFSVNAGVTTPLSTYMLTNSELLSLINDMPITNDQKKLMSSNVQIVRQQSYSIMSIIKEEVLAYVVQLPIYGVIDTPCWKLHTSPLCTTNIKEGSNICLTRTDRGWYCDNAGSVSFFPQADTCKVQSNRVFCDTMNSLTLPSEVSLCNTDIFNSKYDCKIMTSKTDISSSVITSLGAIVSCYGKTKCTASNKNRGIIKTFSNGCDYVSNKGVDTVSVGNTLYYVNKLEGKNLYVKGEPIINYYDPLVFPSDEFDASISQVNEKINQSLAFIRRSDELLHNVNTGKSTTNIMITVIIIVIIVVLLSLIAIGLLLYCKAK

SEQ ID NO: 9122 - protein, 553 aa, Artificial Sequence
  derived and/or modified protein sequence (wt) from HRSV__AEQ63641.1__F-del
MELLIHRSSAIFLTLAINAFYLTSSQNITEEFYQSTCSAVSRGYLSALRTGWYTSVITIELSNIKETKCNGTDTKVKLIKQELDKYKNAVTELQLLMQNTPAANNRARREAPQYMNYTINTTKNLNVSISKKRKRRFLGFLLGVGSAIASGIAVSKVLHLEGEVNKIKNALLSTNKAVVSLSNGVSVLTSKVLDLKNYINNQLLPIVNQQSCRISNIETVIEFQQKNSRLLEITREFSVNAGVTTPLSTYMLTNSELLSLINDMPITNDQKKLMSSNVQIVRQQSYSIMSIIKEEVLAYVVQLPIYGVIDTPCWKLHTSPLCTTNIKEGSNICLTRTDRGWYCDNAGSVSFFPQADTCKVQSNRVFCDTMNSLTLPSEVSLCNTDIFNSKYDCKIMTSKTDISSSVITSLGAIVSCYGKTKCTASNKNRGIIKTFSNGCDYVSNKGVDTVSVGNTLYYVNKLEGKNLYVKGEPIINYYDPLVFPSDEFDASISQVNEKINQSLAFIRRSDELLHNVNTGKSTTNIMITAIIIVIIVVLLSLIAIGLLLYCKAK

SEQ ID NO: 9123 - protein, 553 aa, Artificial Sequence
  derived and/or modified protein sequence (wt) from HRSV__AEQ63487.1__F-del
MELPILKTNAITTILAAVTLCFASSQNITEEFYQSTCSAVSKGYLSALRTGWYTSVITIELSNIKENKCNGTDAKVKLIKQELDKYKNAVTELQLLMQSTPAANNRARRELPRFMNYTLNNTKNTNVTVSKKRKRRFLGFLLGVGSAIASGIAVSKVLHLEGEVNKIKSALLSTNKAVVSLSNGVSVLTSKVLDLKNYIDKQLLPIVNKQSCSISNIETVIEFQQKNNRLLEITREFSVNAGVTTPVSTYMLTNSELLSLINDMPITNDQKKLMSNNVQIVRQQSYSIMSIIKEEVLAYVVQLPLYGVIDTPCWKLHTSPLCTTNTKEGSNICLTRTDRGWYCDNAGSVSFFPQAETCKVQSNRVFCDTMNSLTLPNEVNLCNIDIFNPKYDCKIMTSKTDVSSSVITSLGAIVSCYGKTKCTASNKNRGIIKTFSNGCDYVSNKGVDTVSVGNTLYYVNKQEGKSLYVKGEPIINFYDPLVFPSDEFDASISQVNEKINQSLAFIRKSDELLHNVNAGKSTTNIMITTIIIVIIVILLSLIAVGLLLYCKAR

SEQ ID NO: 9124 - protein, 553 aa, Artificial Sequence
  derived and/or modified protein sequence (wt) from HRSV__AEQ63520.1__F-del
MELPILKTNAITTILAAVTLCFASSQNITEEFYQSTCSAVSKGYLSALRTGWYTSVITIELSNIKENKCNGTDAKVKLIKQELDKYKNAVTELQLLMQSTPAANNRARRELPRFMNYTLNNTKNTNVTVSKKRKRRFLGFLLGVGSAIASGIAVSKVLHLEGEVNKIKSALLSTNKAVVSLSNGVSVLTSKVLDLKNYIDKQLLPIVNKQSCSISNIETVIEFQQKNNRLLEITREFSVNAGVTTPVSTYMLTNSELLSLINDMPITNDQKKLMSNNVQIVRQQSYSIMSIIKEEVLAYVVQLPLYGVIDTPCWKLHTSPLCTTNTKEGSNICLTRTDRGWYCDNAGSVSFFPQAETCKVQSNRVFCDTMNSLTLPSEVNLCNIDIFNPKYDCKIMTSKTDVSSSVITSLGAIVSCYGKTKCTASNKNRGIIKTFSNGCDYVSNKGVDTVSVGNTLYYVNKQEGKSLYVKGEPIINFYDPLVFPSDEFDASISQVNEKINQSLAFIRKSDELLHNVNAGKSTTNIMITTIIIVIIVILLSLIAVGLLLYCKAR

SEQ ID NO: 9125 - protein, 553 aa, Artificial Sequence
  derived and/or modified protein sequence (wt) from HRSV__4CCF_A__F-del
MELLILKANAITTILTAVTFCFASGQNITEEFYQSTCSAVSKGYLSALRTGWYTSVITIELSNIKKNKCNGTDAKVKLIKQELDKYKNAVTELQLLMQSTQATNNRARRELPRFMNYTLNNAKKTNVTLSKKRKRRFLGFLLGVGSAIASGVAVSKVLHLEGEVNKIKSALLSTNKAVVSLSNGVSVLTSKVLDLKNYIDKQVLPIVNKQSCSISNIETVIEFQQKNNRLLEITREFSVNAGVTTPVSTYMLTNSELLSLINDMPITNDQKKLMSNNVQIVRQQSYSIMSIIKEEVLAYVVQLPLYGVIDTPCWKLHTSPLCTTNTKEGSNICLTRTDRGWYCDNAGSVSFFPQAETCKVQSNRVFCDTMNSLTLPSEVNLCNVDIFNPKYDCKIMTSKTDVSSSVITSLGAIVSCYGKTKCTASNKNRGIIKTFSNGCDYVSNKGVDTVSVGNTLYYVNKQEGKSLYVKGEPIINFYDPLVFPSDEFDASISQVNEKINQSLAFIRKSDELLHNVNAGKSTTNIMITTIIIVIIVILLSLIAVGLLLYCKAR

SEQ ID NO: 9126 - protein, 553 aa, Artificial Sequence
  derived and/or modified protein sequence (wt) from HRSV__AEQ63334.1__F-del
MELPILKTNAITTILAAVTLCFASSQNITEEFYQSTCSAVSKGYLSALRTGWYTSVITIELSNIKENKCNGTDAKVKLIKQELDKYKNAVTELQLLMQSTPAANSRARRELPRFMNYTLNNTKNTNVTLSKKRKRRFLGFLLGVGSAIASGIAVSKVLHLEGEVNKIKSALLSTNKAVVSLSNGVSVLTSKVLDLKNYIDKQLLPIVNKQSCSISNIETVIEFQQKNNRLLEITREFSVNAGVTTPVSTYMLTNSELLSLINDMPITNDQKKLMSNNVQIVRQQSYSIMSIIKEEVLAYVVQLPLYGVIDTPCWKLHTSPLCTTNTKEGSNICLTRTDRGWYCDNAGSVSFFPQADTCKVQSNRVFCDTMNSLTLPSEVNLCNIDIFNPKYDCKIMTSKTDVSSSVITSLGAIVSCYGKTKCTASNKNRGIIKTFSNGCDYVSNKGVDTVSVGNTLYYVNKQEGKSLYVKGEPIINFYDPLVFPSDEFDASISQVNEKINQSLAFIRKSDELLHNVNAGKSTTNIMITTIIIVIIVILLSLIAVGLLLYCKAR

SEQ ID NO: 9127 - protein, 553 aa, Artificial Sequence
  derived and/or modified protein sequence (wt) from HRSV__AEO45949.1__F-del
MELPILKTNAITTILAAVTLCFASSQNITEEFYQSTCSAVSKGYLSALRTGWYTSVITIELSNIKENKCNGTDAKVKLIKQELDKYKNAVTELQLLMQSTPAANNRARRELPRFMNYTLNNTKTTNVTLSKKRKRRFLGFLLGVGSAIASGIAVSKVLHLEGEVNKIKSALLSTNKAVVSLSNGVSVLTSKVLDLKNYIDKQLLPIVNKQSCSISNIETVIEFQQKNNRLLEITREFSVNAGVTTPVSTYMLTNSELLSLINDMPITNDQKKLMSNNVQIVRQQSYSIMSIIKEEVLAYVVQLPLYGVIDTPCWKLHTSPLCTTNTKEGSNICLTRTDRGWYCDNAGSVSFFPQAETCKVQSNRVFCDTMNSLTLPSEVNLCNVDIFNPKYDCKIMTSKTDVSSSVITSLGAIVSCYGKTKCTASNKNRGIIKTFSNGCDYVSNKGVDTVSVGNTLYYVNKQEGKSLYVKGEPIINFYDPLVFPSDEFDASISQVNEKINQSLAFIRKSDELLHNVNVGKSTTNIMITTIIIVIIVILLSLIAVGLLLYCKAR

SEQ ID NO: 9128 - protein, 553 aa, Artificial Sequence
  derived and/or modified protein sequence (wt) from HRSV__AEO45939.1__F-del
MDLPILKTNAITTILAAVTLCFASSQNITEEFYQSTCSAVSKGYLSALRTGWYTSVITIELSNIKENKCNGTDAKVKLIKQELDKYKNAVTELQLLMQSTPASNNRARRELPRFMNYTLNNTKNTNVTLSKKRKRRFLGFLLGVGSAIASGIAVSKVLHLEGEVNKIKSALLSTNKAVVSFIDGVSVLTSKVLDLKNYIDKQLLPIVNKQSCSISNIETVIEFQQKNNRLLEITREFSVNAGVTTPVSTYMLTNSELLSLINDMPITNDQKKLMSNNVQIVRQQSYSIMSIIKEEVLAYVVQLPLYGVIDTPCWKLHTSPLCTTNTKEGSNICLTRTDRGWYCDNAGSVSFFPQAETCKVQSNRVFCDTMNSLTLPSEVNLCNIDIFNPKYDCKIMTSKTDVSSSVITSLGAIVSCYGKTKCTASNKNRGIIKTFSNGCDYVSNKGVDTVSVGNTLYYVNKQEGKSLYVKGEPIINFYDPLVFPSDEFDASISQVNEKINQSLAFIRKSDELLHNVNVGKSTTNIMITTIIIVIIVILLSLIAVGLLLYCKAR

SEQ ID NO: 9129 - protein, 553 aa, Artificial Sequence
  derived and/or modified protein sequence (wt) from HRSV__AEQ63312.1__F-del
MELPVLKTNAITTILAAVTLCFASSQNITEEFYQSTCSAVSKGYLSALRTGWYTSVITIELSNIKENKCNGTDAKVKLIKQELDKYKNAVTELQLLMQSTPAANNRARRELPRFMNYTLNNTKNTNVTLSKKRKRRFLGFLLGVGSAIASGIAVSKVLHLEGEVNKIKSALLSTNKAVVSLSNGVSVLTSKVLDLKNYIDKQLLPIVNKQSCSISNIETVIEFQQKNNRLLEITREFSVNAGVTTPVSTYMLTNSELLSLINDMPITNDQKKLMSNNVQIVRQQSYSIMSIIKEEVLAYVVQLPLYGVIDTPCWKLHTSPLCTTNTKEGSNICLTRTDRGWYCDNAGSVSFFPQADTCKVQSNRVFCDTMNSLTLPSEVNLCNIDIFNPKYDCKIMTSKTDVSSSVITSLGAIVSCYGKTKCTASNKNRGIIKTFSNGCDYVSNKGVDTVSVGNTLYYVNKQEGKSLYVKGEPIINFYDPLVFPSDEFDASISQVNEKINQSLAFIRKSDELLHNVNAGKSTTNIMITTIIIVIIVILLSLIAVGLLLYCKAR

SEQ ID NO: 9130 - protein, 553 aa, Artificial Sequence
  derived and/or modified protein sequence (wt) from HRSV__AEQ63586.1__F-del
MELLIHRSSAIFLTLAINALYLTSSQNITEEFYQSTCSAVSRGYLSALRTGWYTSVITIELSNIKETKCNGTDTKVKLIKQELDKYKNAVTELQLLMQNTPAANNRARREAPQYMNYTINTTKNLNVSISKKRKRRFLGFLLGVGSAIASGIAVSKVLHLEGEVNKIKNALLSTNKAVVSLSNGVSVLTSKVLDLKNYINNQLLPIVNQQSCRISNIETVIEFQQKNSRLLEITREFSVNAGVTTPLSTYMLTNSELLSLINDMPITNDQKKLMSSNVQIVRQQSYSIMSIIKEEVLAYVVQLPIYGVIDTPCWKLHTSPLCTTNIKEGSNICLTRTDRGWYCDNAGSVSFFPQADTCKVQSNRVFCDTMNSLTLPSEVSLCNTDIFNSKYDCKIMTSKTDISSSVITSLGAIVSCYGKTKCTASNKNRGIIKTFSNGCDYVSNKGVDTVSVGNTLYYVNKLEGKNLYVKGEPIINYYDPLVFPSDEFDASISQVNEKINQSLAFIRRSDELLHNVNTGKSTTNIMITAIIIVIIVVLLSLIAIGLLLYCKAK

SEQ ID NO: 9131 - protein, 553 aa, Artificial Sequence
  derived and/or modified protein sequence (wt) from HRSV__AEO45919.1__F-del
MELPILKINAITTILAAITLCFASSQNITEEFYQSTCSAVSKGYLSALRTGWYTSVITIELSNIKENKCNGTDAKVKLIKQELDKYKNAVTELQLLMQSTPAANNRARRELPRFMNYTLNNTKNTNVTVSKKRKRRFLGFLLGVGSAIASGIAVSKVLHLEGEVNKIKSALLSTNKAVVSLSNGVSVLTSKVLDLKNYIDKQLLPIVNKQSCSISNIETVIEFQQKNNRLLEITREFSVNAGVTTPVSTYMLTNSELLSLINDMPITNDQKKLMSNNVQIVRQQSYSIMSIIKEEVLAYVVQLPLYGVIDTPCWKLHTSPLCTTNTKEGSNICLTRTDRGWYCDNAGSVSFFPQAETCKVQSNRVFCDTMNSLTLPSEVNLCNVDIFNPKYDCKIMTSKTDVSSSVITSLGAIVSCYGKTKCTASNKNRGIIKTFSNGCDYVSNKGVDTVSVGNTLYYVNKQEGKSLYVKGEPIINFYDPLVFPSDEFDASISQVNEKINQSLAFIRKSDELLHNVNVGKSTTNIMITTIIIVIIVILLSLIAVGLLLYCKAR

SEQ ID NO: 9132 - protein, 553 aa, Artificial Sequence
  derived and/or modified protein sequence (wt) from HRSV__AEO45909.1__F-del
MELPILKTNAITTIFAAVTLCFASSQNITEEFYQSTCSAVSKGYLSALRTGWYTSVITIELSNIKENKCNGTDAKVKLIKQELDKYKNAVTELQLLMQSTPAANNRARRELPRFMNYTLNNTKNNNVTLSKKRKRRFLGFLLGVGSAIASGIAVSKVLHLEGEVNKIKSALLSTNKAVVSLSNGVSVLTSKVLDLKNYIDKQLLPIVNKQSCSISNIETVIEFQQKNNRLLEITREFSVNAGVTTPVSTYMLTNSELLSLINDMPITNDQKKLMSNNVQIVRQQSYSIMSIIKEEVLAYVVQLPLYGVIDTPCWKLHTSPLCTTNTKEGSNICLTRTDRGWYCDNAGSVSFFPQAETCKVQSNRVFCDTMNSLTLPSEVNLCNVDIFNPKYDCKIMTSKTDVSSSVITSLGAIVSCYGKTKCTASNKNRGIIKTFSNGCDYVSNKGVDTVSVGNTLYYVNKQEGKSLYVKGEPIINFYDPLVFPSDEFDASISQVNEKINQSLAFIRKSDELLHNVNVGKSTTNIMITTIIIVIIVILLLLIAVGLLLYCKAR

SEQ ID NO: 9133 - protein, 553 aa, Artificial Sequence
  derived and/or modified protein sequence (wt) from HRSV__AEO45889.1__F-del
MELPILKTNAITTIFAAVTLCFASSQNITEEFYQSTCSAVSKGYLSALRTGWYTSVITIELSNIKENKCNGTDAKVKLIKQELDKYKNAVTELQLLMQSTPAANNRARRELPRFMNYTLNNTKNNNVTLSKKRKRRFLGFLLGVGSAIASGIAVSKVLHLEGEVNKIKSALLSTNKAVVSLSNGVSVLTSKVLDLKNYIDKQLLPIVNKQSCSISNIETVIEFQQKNNRLLEITREFSVNAGVTTPVSTYMLTNSELLSLINDMPITNDQKKLMSNNVQIVRQQSYSIMSIIKEEVLAYVVQLPLYGVIDTPCWKLHTSPLCTTNTKEGSNICLTRTDRGWYCDNAGSVSFFPQAETCKVQSNRVFCDTMNSLTLPSEVNLCNVDIFNPKYDCKIMTSKTDVSSSVITSLGAIVSCYGKTKCTASNKNRGIIKTFSNGCDYVSNKGVDTVSVGNTLYYVNKQEGKSLYVKGEPIINFYDPLVFPSDEFDASISQVNEKINQSLAFIRKSDELLHNVNVGKSTTNIMITTIIIVIIVILLLLIAVGLFLYCKAR

SEQ ID NO: 9134 - protein, 553 aa, Artificial Sequence
  derived and/or modified protein sequence (wt) from HRSV__AEO45879.1__F-del
MELPILKTNAITTIFAAVTLCFASSQNITEEFYQSTCSAVSKGYLSALRTGWYTSVITIELSNIKENKCNGTDAKVKLIKQELDKYKNAVTELQLLMQSTPAANNRARRELPRFMNYTLNNTKNNNVTLSKKRKRRFLGFLLGVGSAIASGIAVSKVLHLEGEVNKIKSALLSTNKAVVSLSNGVSVLTSKVLDLKNYIDKQLLPIVNKQSCSISNIETVIEFQQKNNRLLEITREFSVNAGVTTPVSTYMLTNSELLSLINDMPITNDQKKLMSNNVQIVRQQSYSIMSIIKEEVLAYVVQLPLYGVIDTPCWKLHTSPLCTTNTKEGSNICLTRTDRGWYCDNAGSVSFFPQAETCKVQSNRVFCDTMNSLTLPSEVNLCNVDIFNPKYDCKIMTSKTDVSSSVITSLGAIVSCYGKTKCTASNKNRGIIKTFSNGCDYVSNKGVDTVSVGNTLYYVNKQEGKSLYVKGEPIINFYDPLVFPSDEFDASISQVNEKINQSLAFIRKSDELLHNVNAGKSTTNIMITTIIIVIIVILLSLIAVGLLLYCKAR

SEQ ID NO: 9135 - protein, 553 aa, Artificial Sequence
  derived and/or modified protein sequence (wt) from HRSV__AEO45869.1__F-del
MELPILKTNAITAILAAVSLCFASSQNITEEFYQSTCSAVSKGYLSALRTGWYTSVITIELSNIKENKCNGTDAKVKLIKQELDKYKNAVTELQLLMQSTPAANNRARRELPRFMNYTLNNTKNNNVTLSKKRKRRFLGFLLGVGSAIASGIAVSKVLHLEGEVNKIKSALLSTNKAVVSLSNGVSVLTSKVLDLKNYIDKQLLPIVNKQSCSISNIETVIEFQQKNNRLLEITREFSVNAGVTTPVSTYMLTNSELLSLINDMPITNDQKKLMSNNVQIVRQQSYSIMSIIKEEVLAYVVQLPLYGVIDTPCWKLHTSPLCTTNTKEGSNICLTRTDRGWYCDNAGSVSFFPQAETCKVQSNRVFCDTMNSLTLPSEVNLCNVDIFNPKYDCKIMTSKTDVSSSVITSLGAIVSCYGKTKCTASNKNRGIIKTFSNGCDYVSNKGVDTVSVGNTLYYVNKQEGKSLYVKGEPIINFYDPLVFPSDEFDASISQVNEKINQSLAFIRKSDELLHNVNVGKSTTNIMITTIIIVIIVILLLLIAVGLLLYCKAR

SEQ ID NO: 9136 - protein, 553 aa, Artificial Sequence
  derived and/or modified protein sequence (wt) from HRSV__AEO45929.1__F-del
MELPILKTNAITTILAAVTLCFASSQNITEEFYQSTCSAVSKGYLSALRTGWYTSVITIELSNIKENKCNGTDAKVKLIKQELDKYKNAVTELQLLMQSTPAANNRARRELPRFMNYTLNNTKTTNVTLSKKRKRRFLGFLLGVGSAIASGIAVSKVLHLEGEVNKIKSALLSTNKAVVSLSNGVSVLTSKVLDLKNYIDKQLLPIVNKQSCSISNIETVIEFQQKNNRLLEITREFSVNAGVTTPVSTYMLTNSELLSLINDMPITNDQKKLMSNNVQIVRQQSYSIMSIIKEEVLAYVVQLPLYGVIDTPCWKLHTSPLCTTNTKEGSNICLTRTDRGWYCDNAGSVSFFPQAETCKVQSNRVFCDTMNSLTLPSEVNLCNIDIFNPKYDCKIMTSKTDVSSSVITSLGAIVSCYGKTKCTASNKNRGIIKTFSNGCDYVSNKGVDTVSVGNTLYYVNKQEGKSLYVKGEPIINFYDPLVFPSDEFDASISQVNEKINQSLAFIRKSDELLHNVNAGKSTTNIMITTIIIVIIVILLSLIAVGLLLYCKAR

SEQ ID NO: 9137 - protein, 553 aa, Artificial Sequence
  derived and/or modified protein sequence (wt) from HRSV__AEO45850.1__F-del
MELPILKTNAITTILTAVTFCFASSQNITEEFYQSTCSAVSKGYLSALRTGWYTSVITIELSNIKENKCNGTDAKVKLIKQELDKYKNAVTELQLLMQSTPAANNRARRELPRFMNYTLNNTKNNNVTLSKKRKRRFLGFLLGVGSAIASGIAVSKVLHLEGEVNKIKSALLSTNKAVVSLSNGVSVLTSKVLDLKNYIDKQLLPIVNKQSCSISNIETVIEFQQKNNRLLEITREFSVNAGVTTPVSTYMLTNSELLSLINDMPITNDQKKLMSNNVQIVRQQSYSIMSIIKEEVLAYVVQLPLYGVIDTPCWKLHTSPLCTTNTKEGSNICLTRTDRGWYCDNAGSVSFFPQAETCKVQSNRVFCDTMNSLTLPSEVNLCNVDIFNPKYDCKIMTSKTDVSSSVITSLGAIVSCYGKTKCTASNKNRGIIKTFSNGCDYVSNKGVDTVSVGNTLYYVNKQEGKSLYVKGEPIINFYDPLVFPSDEFDASISQVNEKINQSLAFIRKSDELLHNVNVGKSTTNIMITTIIIVIIVILLLLIAVGLLLYCKAR

SEQ ID NO: 9138 - protein, 553 aa, Artificial Sequence
  derived and/or modified protein sequence (wt) from HRSV__AEO45859.1__F-del
MDLPILKTNAITAILAAVSLCFASSQNITEEFYQSTCSAVSKGYLSALRTGWYTSVITIELSNIKENKCNGTDAKVKLIKQELDKYKNAVTELQLLMQSTPAANNRARRELPRFMNYTLNNTKNNNVTLSKKRKRRFLGFLLGVGSAIASGIAVSKVLHLEGEVNKIKSALLSTNKAVVSLSNGVSVLTSKVLDLKNYIDKQLLPIVNKQSCSISNIETVIEFQQKNNRLLEITREFSVNAGVTTPVSTYMLTNSELLSLINDMPITNDQKKLMSNNVQIVRQQSYSIMSIIKEEVLAYVVQLPLYGVIDTPCWKLHTSPLCTTNTKEGSNICLTRTDRGWYCDNAGSVSFFPQAETCKVQSNRVFCDTMNSLTLPSEVNLCNVDIFNPKYDCKIMTSKTDVSSSVITSLGAIVSCYGKTKCTASNKNRGIIKTFSNGCDYVSNKGVDTVSVGNTLYYVNKQEGKSLYVKGEPIINFYDPLVFPSDEFDASISQVNEKINQSLAFIRKSDELLHNVNVGKSTTNIMITTIIIVIIVILLLLIAVGLFLYCKAR

SEQ ID NO: 9139 - protein, 553 aa, Artificial Sequence
  derived and/or modified protein sequence (wt) from HRSV__AEQ63444.1__F-del
MDLPILKTNAITAILAAVSLCFASSQNITEEFYQSTCSAVSKGYLSALRTGWYTSVITIELSNIKENKCNGTDAKVKLIKQELDKYKNAVTELQLLMQSTPAANNRARRELPRFMNYTLNNTKNNNVTLSKKRKRRFLGFLLGVGSAIASGIAVSKVLHLEGEVNKIKSALLSTNKAVVSLSNGVSVLTSKVLDLKNYIDKQLLPIVNKQSCSISNIETVIEFQQKNNRLLEITREFSVNAGVTTPVSTYMLTNSELLSLINDMPITNDQKKLMSNNVQIVRQQSYSIMSIIKEEVLAYVVQLPLYGVIDTPCWKLHTSPLCTTNTKEGSNICLTRTDRGWYCDNAGSVSFFPQAETCKVQSNRVFCDTMNSLTLPSEVNLCNIDIFNPKYDCKIMTSKTDVSSSVITSLGAIVSCYGKTKCTASNKNRGIIKTFSNGCDYVSNKGVDTVSVGNTLYYVNKQEGKSLYVKGEPIINFYDPLVFPSDEFDASISQVNEKINQSLAFIRKSDELLHNVNVGKSTTNIMITTIIIVIIVILLLLIAVGLFLYCKAR

SEQ ID NO: 9140 - protein, 553 aa, Artificial Sequence
  derived and/or modified protein sequence (wt) from HRSV__AEO23054.1__F-del
MELLIHRSSAIFLTLAINALYLTSSQNITEEFYQSTCSAVSRGYFSALRTGWYTSVITIELSNIKETKCNGTDTKVKLIKQELDKYKNAVTELQLLMQNTPAANNRARREAPQYMNYTINTTKNLNVSTSKKRKRRFLGFLLGVGSAIASGIAVSKVLHLEGEVNKIKNALLATNKAVVSLSNGVSVLTSKVLDLKNYINNQLLPIVNQQSCRISNIETVIEFQQKNSRLLEITREFSVNAGVTTPLSTYMLTNSELLSLINDMPITNDQKKLMSSNVQIVRQQSYSIMSIIKEEVLAYVVQLPIYGVIDTPCWKLHTSPLCTTNIKEGSNICLTRTDRGWYCDNAGSVSFFPQADTCKVQSNRVFCDTMNSLTLPSEVSLCNTDIFNSKYDCKIMTSKTDISSSVITSLGAIVSCYGKTKCTASNKNRGIIKTFSNGCDYVSNKGVDTVSVGNTLYYVNKLEGKNLYVKGEPIINYYDPLVFPSDEFDASISQVNEKINQSLAFIRRSDELLHNVNTGKSTTNIMITAIIIVIIVVLLSLIAIGLLLYCKAK

SEQ ID NO: 9141 - protein, 553 aa, Artificial Sequence
  derived and/or modified protein sequence (wt) from HRSV__AEO23052.1__F-del
MELPILKANAISTILAAVTLCFASSQNITEEFYQSTCSAVSKGYLSALRTGWYTSVITIELSNIKENKCNGTDAKVKLIKQELDKYKNAVTELQLLMQSTPAANSRARRELPRFMNYTLNNTKNTNVTLSKKRKRRFLGFLLGVGSAIASGIAVSKVLHLEGEVNKIKSALLSTNKAVVSLSNGVSVLTSKVLDLKNYIDKQLLPIVNKQSCSISNIETVIEFQQKNNRLLEITREFSVNAGVTTPVSTYMLTNSELLSLINDMPITNDQKKLMSSNVQIVRQQSYSIMSIIKEEVLAYVVQLPLYGVIDTPCWKLHTSPLCTTNTKEGSNICLTRTDRGWYCDNAGSVSFFPQAETCKVQSNRVFCDTMNSLTLPSEVNLCNIDIFNPKYDCKIMTSKTDVSSSVITSLGAIVSCYGKTKCTASNKNRGIIKTFSNGCDYVSNKGVDTVSVGNTLYYVNKQEGKSLYVKGEPIINFYDPLVFPSDEFDASISQVNEKINQSLAFIRKSDELLHNVNAGKSTTNIMITTIIIVIIVILLALIAVGLLLYCKAR

SEQ ID NO: 9142 - protein, 553 aa, Artificial Sequence
  derived and/or modified protein sequence (wt) from HRSV__AEO23051.1__F-del
MELPILKTNAITTILAAVTLCFASSQNITEEFYQSTCSAVSKGYLSALRTGWYTSVITIELSNIKENKCNGTDAKVKLIKQELDKYKNAVTELQLLMQSTPAANSRARRELPRFMNYTLNNTKNTNVTLSKKRKRRFLGFLLGVGSAIASGIAVSKVLHLEGEVNKIKSALLSTNKAVVSLSNGVSVLTSKVLDLKNYIDKQLLPIVNKQSCSISNIETVIEFQQKNNRLLEITREFSVNAGVTTPVSTYMLTNSELLSLINDMPITNDQKKLMSNNVQIVRQQSYSIMSIIKEEVLAYVVQLPLYGVIDTPCWKLHTSPLCTTNTKEGSNICLTRTDRGWYCDNAGSVSFFPQAETCKVQSNRVFCDTMNSLTLPSEVNLCNIDIFNPKYDCKIMTSKTDVSSSVITSLGAIVSCYGKTKCTASNKNRGIIKTFSNGCDYVSNKGVDTVSVGNTLYYVNKQEGKSLYVKGEPIINFYDPLVFPSDEFDASISQVNEKINQSLAFIRKSDELLHNVNAGKSTTNIMITTIIIVIIVILLSLIAVGLLLYCKAR

SEQ ID NO: 9143 - protein, 553 aa, Artificial Sequence
  derived and/or modified protein sequence (wt) from HRSV__AEC32087.1__F-del
MELPILKTNAITTILAAVTLCFASSQNITEEFYQSTCSAVSKGYLSALRTGWYTSVITIELSNIKENKCNGTDAKVKLIKQELDKYKNAVTELQLLMQSTQAANNRARRELPRFMNYTLNNTKTTNVTLSKKRKRRFLGFLLGVGSAIASGIAVSKVLHLEGEVNKIKSALLSTNKAVVSLSNGVSVLTSKVLDLKNYIDKQLLPIVNKQSCSISNIETVIEFQQKNNRLLEITREFSVNAGVTTPVSTYMLTNSELLSLINDMPITNDQKKLMSNNVQIVRQQSYSIMSIIKEEVLAYVVQLPLYGVIDTPCWKLHTSPLCTTNTKEGSNICLTRTDRGWYCDNAGSVSFFPQAETCKVQSNRVFCDTMNSLTLPSEVNLCNIDIFNPKYDCKIMTSKTDVSSSVITSLGAIVSCYGKTKCTASNKNRGIIKTFSNGCDYVSNKGVDTVSVGNTLYYVNKQEGKSLYVKGEPIINFYDPLVFPSDEFDASISQVNEKINQSLAFIRKSDELLHNVNAGKSTTNIMITTIIIVIIVILLSLIAVGLLLYCKAR

SEQ ID NO: 9144 - protein, 553 aa, Artificial Sequence
  derived and/or modified protein sequence (wt) from HRSV__ADZ95785.1__F-del
MELPILKANAITTILAAVTFCFASSQNITEEFYQSTCSAVSKGYLSALRTGWYTSVITIELSNIKENKCNGTDAKVKLIKQELDKYKNAVTELQLLMQSTPAANNRARRELPRFMNYTLNNTKKTNVTLSKKRKRRFLGFLLGVGSAIASGIAVSKVLHLEGEVNKIKSALLSTNKAVVSLSNGVSVLTSKVLDLKNYIDKQLLPIVNKQSCRISNIETVIEFQQKNNRLLEITREFSVNAGVTTPVSTYMLTNSELLSLINDMPITNDQKELMSNNVQIVRQQSYSIMSIIKEEVLAYVVQLPLYGVIDTPCWKLHTSPLCTTNTKEGSNICLTRTDRGWYCDNAGSVSFFPQAETCKVQSNRVFCDTMNSLTLPSEVNLCNVDIFNPKYDCKIMTSKTDVSSSVITSLGAIVSCYGKTKCTASNKNRGIIKTFSNGCDYVSNKGVDTVSVGNTLYYVNKQEGKSLYVKGEPIINFYDPLVFPSDEFDASISQVNEKINQSLAFIRKSDELLHHVNAGKSTTNIMITTIIIVIIVILLSLIAVGLLLYCKAR

SEQ ID NO: 9145 - protein, 553 aa, Artificial Sequence
  derived and/or modified protein sequence (wt) from HRSV__AEC32085.1__F-del
MELPILKTNAITTILAAVTLCFASSQNITEEFYQSTCSAVSKGYLSALRTGWYTSVITIELSTIKENKCNGTDAKGKLIKQELDKYKNAVTELQLLMQSTPAANNRARRELPRFMNYTLNNAKNTNVTLSKKRKRRFLGFLLGVGSAIASGIAVSKVLHLEGEVNKIKSALLSTNKAVVSLSNGVSVLTSKVLDLKNYIDKQLLPIVNKQSCSISNIETVIEFQQKNNRLLEITREFSVNAGVTTPVSTYMLTNSELLSLINDMPITNDQKKLMSNNVQIVRQQSYSIMSIIKEEVLAYVVQLPLYGVIDTPCWKLHTSPLCTTNTKEGSNICLTRTDRGWYCDNAGSVSFFPQAETCKVQSNRVFCDTMNSLTLPSEVNLCNIDIFNPKYDCKIMTSKTDVSSSVITSLGAIVSCYGKTKCTASNKNRGIIKTFSNGCDYVSNKGVDTVSVGNTLYYVNKQEGKSLYVKGEPIINFYDPLVFPSDEFDASISQVNEKINQSLAFIRKSDELLHNVNAGKSTTKIMITTIIIVIIVILLSLIAVGLLLYCKAR

SEQ ID NO: 9146 - protein, 553 aa, Artificial Sequence
  derived and/or modified protein sequence (wt) from HRSV__ADZ95784.1__F-del
MELPILKANAITTILAAVTFCFASSQNITEEFYQSTCSAVSKGYLSALRTGWYTSVITIELSNIKENKCNGTDAKVKLIKQELDKYKNAVTELQLLMQSTPAANNRARRELPRFMNYTLNNTKKTNVTLSKKRKRRFLGFLLGVGSAIASGIAVSKVLHLEGEVNKIKSALLSTNKAVVSLSNGVSVLTSKVLDLKNYIDKQLLPIVNKQSCRISNIETVIEFQQKNNRLLEITREFSVNAGVTTPVSTYMLTNSELLSLINDMPITNDQKQLMSNNVQIVRQQSYSIMSIIKEEVLAYVVQLPLYGVIDTPCWKLHTSPLCTTNTKEGSNICLTRTDRGWYCDNAGSVSFFPQAETCKVQSNRVFCDTMNSLTLPSEVNLCNVDIFNPKYDCKIMTSKTDVSSSVITSLGAIVSCYGKTKCTASNKNRGIIKTFSNGCDYVSNKGVDTVSVGNTLYYVNKQEGKSLYVKGEPIINFYDPLVFPSDEFDASISQVNEKINQSLAFIRKSDELLHHVNAGKSTTNIMITTIIIVIIVILLSLIAVGLLLYCKAR

SEQ ID NO: 9147 - protein, 553 aa, Artificial Sequence
  derived and/or modified protein sequence (wt) from HRSV__ADZ95783.1__F-del
MELPILKANAITTILAAVTFCFASSQNITEEFYQSTCSAVSKGYLSALRTGWYTSVITIELSNIKENKCNGTDAKVKLIKQELDKYKNAVTELQLLMQSTPAANNRARRELPRFMNYTLNNTKKTNVTLSKKRKRRFLGFLLGVGSAIASGIAVSKVLHLEGEVNKIKSALLSTNKAVVSLSNGVSVLTSKVLDLKNYIDKQLLPIVNKQSCRISNIETVIEFQQKNNRLLEITREFSVNAGVTTPVSTYMLTNSELLSLINDMPITNDQKTLMSNNVQIVRQQSYSIMSIIKEEVLAYVVQLPLYGVIDTPCWKLHTSPLCTTNTKEGSNICLTRTDRGWYCDNAGSVSFFPQAETCKVQSNRVFCDTMNSLTLPSEVNLCNVDIFNPKYDCKIMTSKTDVSSSVITSLGAIVSCYGKTKCTASNKNRGIIKTFSNGCDYVSNKGVDTVSVGNTLYYVNKQEGKSLYVKGEPIINFYDPLVFPSDEFDASISQVNEKINQSLAFIRKSDELLHHVNAGKSTTNIMITTIIIVIIVILLSLIAVGLLLYCKAR

SEQ ID NO: 9148 - protein, 553 aa, Artificial Sequence
  derived and/or modified protein sequence (wt) from HRSV__ADZ95782.1__F-del
MELPILKANAITTILAAVTFCFASSQNITEEFYQSTCSAVSKGYLSALRTGWYTSVITIELSNIKENKCNGTDAKVKLIKQELDKYKNAVTELQLLMQSTPAANNRARRELPRFMNYTLNNTKKTNVTLSKKRKRRFLGFLLGVGSAIASGIAVSKVLHLEGEVNKIKSALLSTNKAVVSLSNGVSVLTSKVLDLKNYIDKQLLPIVNKQSCRISNIETVIEFQQKNNRLLEITREFSVNAGVTTPVSTYMLTNSELLSLINDMPITNDQKMLMSNNVQIVRQQSYSIMSIIKEEVLAYVVQLPLYGVIDTPCWKLHTSPLCTTNTKEGSNICLTRTDRGWYCDNAGSVSFFPQAETCKVQSNRVFCDTMNSLTLPSEVNLCNVDIFNPKYDCKIMTSKTDVSSSVITSLGAIVSCYGKTKCTASNKNRGIIKTFSNGCDYVSNKGVDTVSVGNTLYYVNKQEGKSLYVKGEPIINFYDPLVFPSDEFDASISQVNEKINQSLAFIRKSDELLHHVNAGKSTTNIMITTIIIVIIVILLSLIAVGLLLYCKAR

SEQ ID NO: 9149 - protein, 553 aa, Artificial Sequence
  derived and/or modified protein sequence (wt) from HRSV__ADZ95781.1__F-del
MELPILKANAITTILAAVTFCFASSQNITEEFYQSTCSAVSKGYLSALRTGWYTSVITIELSNIKENKCNGTDAKVKLIKQELDKYKNAVTELQLLMQSTPAANNRARRELPRFMNYTLNNTKKTNVTLSKKRKRRFLGFLLGVGSAIASGIAVSKVLHLEGEVNKIKSALLSTNKAVVSLSNGVSVLTSKVLDLKNYIDKQLLPIVNKQSCRISNIETVIEFQQKNNRLLEITREFSVNAGVTTPVSTYMLTNSELLSLINDMPITNDQKNLMSNNVQIVRQQSYSIMSIIKEEVLAYVVQLPLYGVIDTPCWKLHTSPLCTTNTKEGSNICLTRTDRGWYCDNAGSVSFFPQAETCKVQSNRVFCDTMNSLTLPSEVNLCNVDIFNPKYDCKIMTSKTDVSSSVITSLGAIVSCYGKTKCTASNKNRGIIKTFSNGCDYVSNKGVDTVSVGNTLYYVNKQEGKSLYVKGEPIINFYDPLVFPSDEFDASISQVNEKINQSLAFIRKSDELLHHVNAGKSTTNIMITTIIIVIIVILLSLIAVGLLLYCKAR

SEQ ID NO: 9150 - protein, 553 aa, Artificial Sequence
  derived and/or modified protein sequence (wt) from HRSV__ADZ95779.1__F-del
MELLIHRSSAIFLTLAINALYLTSSQNITEEFYQSTCSAVSRGYFSALRTGWYTSVITIELSNIKETKCNGTDTKVKLIKQELDKYKNAVTELQLLMQNTPAANNRARREAPQYMNYTINTTKNLNVSISKKRKRRFLGFLLGVGSAIASGIAVSKVLHLEGEVNKIKNALLSTNKAVVSLSNGVSVLTSKVLDLKNYINNQLLPIVNQQSCRISNIETVIEFQQKNSRLLEITREFSVNAGVTTPLSTYMLTNSELLSLINDMPITNDQKKLMLSNVQIVRQQSYSIMSIIKEEVLAYVVQLPIYGVIDTPCWKLHTSPLCTTNIKEGSNICLTRTDRGWYCDNAGSVSFFPQADTCKVQSNRVFCDTMNSLTLPSEVSLCNTDIFNSKYDCKIMTSKTDISSSVITSLGAIVSCYGKTKCTASNKNRGIIKTFSNGCDYVSNKGVDTVSVGNTLYYVNKLEGKNLYVKGEPIINYYDPLVFPSDEFDASISQVNEKINQSLAFIRRSDELLHNVNTGKSTTNIMITAIIIVIIVVLLSLIAIGLLLYCKAK

SEQ ID NO: 9151 - protein, 553 aa, Artificial Sequence
  derived and/or modified protein sequence (wt) from HRSV__ADZ95778.1__F-del
MELPILKTNAITTILAAVTLCFASSQNITEEFYQSTCSAVSKGYLSALRTGWYTSVITIELSSIKENKCNGTDAKVKLIKQELDKYKNAVTELQLLMQSTPAANNRARRELPRFMNYTLNNTKTTNVTLSRKRKRRFLGFLLGVGSAIASGIAVSKVLHLEGEVNKIKSALLSTNKAVVSLSNGVSVLTSKVLDLKNYIDKQLLPIVNKQSCSISNIETVIEFQQKNNRLLEITREFSVNAGVTTPVSTYMLTNSELLSLINDMPITNDQKKLMFNNVQIVRQQSYSIMSIIKEEVLAYVVQLPLYGVIDTPCWKLHTSPLCTTNTKEGSNICLTRTDRGWYCDNAGSVSFFPQAETCKVQSNRVFCDTMNSLTLPSEVNLCNIDIFNPKYDCKIMTSKTDVSSSVITSLGAIVSCYGKTKCTASNKNRGIIKTFSNGCDYVSNKGVDTVSVGNTLYYVNKQEGKSLYVKGEPIINFYDPLVFPSDEFDASISQVNEKINQSLAFIRKSDELLHNVNAGKSTTNIMITTIIIVIIVILLSLIAVGLLLYCKAR

SEQ ID NO: 9152 - protein, 553 aa, Artificial Sequence
  derived and/or modified protein sequence (wt) from HRSV__ADZ95775.1__F-del
MELLIHRSSAIFLTLAINALYLTSSQNITEEFYQSTCSAVSRGYFSALRTGWYTSVITIELSNIQETKCNGTDTKVKLIKQELDKYKNAVTELQLLMQNTPAVNNRARREAPQYMNHTINTTKNLNVSISKKRKRRFLGFLLGVGSAIASGIAVSKVLHLEGEVNKIKNALLSTNKAVVSLSNGVSVLTSKVLDLKNYINNQLLPIVNQQSCRISNIETVIEFQQKNSRLLEITREFSVNAGVTTPLSTYMLTNSELLSLINDMPITNDQKELMSSNVQIVRQQSYSIMSIIKEEVLAYVVQLPIYGVIDTPCWKLHTSPLCTTNIKEGSNICLTRTDRGWYCDNAGSVSFFPQADTCKVQSNRVFCDTMNSLTLPSEVSLCNTDIFNSKYDCKIMTSKTDISSSVITSLGAIVSCYGKTKCTASNKNRGIIKTFSNGCDYVSNKGVDTVSVGNTLYYVNKLEGKNLYVKGEPIINYYDPLVFPSDEFDASISQVNEKINQSLAFIRRSDELLHNVNTGKSTTNIMITAIIIVIIVVLLSLIAIGLLLYCKAK

SEQ ID NO: 9153 - protein, 553 aa, Artificial Sequence
  derived and/or modified protein sequence (wt) from HRSV__ACY68435.1__F-del
MELPILKTNAITTILAAVTLCFASSQNITEEFYQSTCSAVSKGYLSALRTGWYTSVITIELSTIKENKCNGTDAKVKLIKQELDKYKNAVTELQLLMQSTPAANNRARRELPRFMNYTLNNAKNTNVTLSKKRKRRFLGFLLGVGSAIASGIAVSKVLHLEGEVNKIKSALLSTNKAVVSLSNGVSVLTSKVLDLKNYIDKQLLPIVNKQSCSISNIETVIEFQQKNNRLLEITREFSVNAGVTTPVSTYMLTNSELLSLINDMPITNDQKKLMSNNVQIVRQQSYSIMSIIKEEVLAYVVQLPLYGVIDTPCWKLHTSPLCTTNTKEGSNICLTRTDRGWYCDNAGSVSFFPQAETCKVQSNRVFCDTMNSLTLPSEVNLCNIDIFNPKYDCKIMTSKTDVSSSVITSLGAIVSCYGKTKCTASNKNRGIIKTFSNGCDYVSNKGVDTVSVGNTLYYVNKQEGKSLYVKGEPIINFYDPLVFPSDEFDASISQVNEKINQSLAFIRKSDELLHNVNAGKSTTNIMITTIIIVIIVILLSLIAVGLLLYCKAR

SEQ ID NO: 9154 - protein, 553 aa, Artificial Sequence
  derived and/or modified protein sequence (wt) from HRSV__ACO83302.1__F-del
MELPILKANAITTILAAVTFCFASSQNITEEFYQSTCSAVSKGYLSALRTGWYTSVITIELSNIKENKCNGTDAKVKLIKQELDKYKNAVTELQLLMQSTPAANNRARRELPRFMNYTLNNTKKTNVTLSKKRKRRFLGFLLGVGSAIASGIAVSKVLHLEGEVNKIKSALLSTNKAVVSLSNGVSVLTSKVLDLKNYIDKQLLPIVNKQSCRISNIETVIEFQQKNNRLLEITREFSVNAGVTTPVSTYMLTNSELLSLINDMPITNDQKKLMSNNVQIVRQQSYSIMSIIKEEVLAYVVQLPLYGVIDTPCWKLHTSPLCTTNTKEGSNICLTRTDRGWYCDNAGSVSFFPQAETCKVQSNRVFCDTMNSLTLPSEVNLCNVDIFNPKYDCKIMTSKTDVSSSVITSLGAIVSCYGKTKCTASNKNRGIIKTFSNGCDYVSNKGVDTVSVGNTLYYVNKQEGKSLYVKGEPIINFYDPLVFPSDEFDASISQVNEKINQSLAFIRKSDELLHHVNAGKSTTNIMITTIIIVIIVILLSLIAVGLLLYCKAR

SEQ ID NO: 9155 - protein, 553 aa, Artificial Sequence
  derived and/or modified protein sequence (wt) from HRSV__ABI35685.1__F-del
MELPILKTNAITTILAAVTLCFASSQNITEEFYQSTCSAVSKGYLSALRTGWYTSVITIELSNIKENKCNGTDAKVKLIKQELDKYKNAVTELQLLMQSTPAANNRARRELPRFMNYTLNNTKNNNVTLSKKRKRRFLGFLLGVGSAIASGIAVSKVLHLEGEVNKIKSALLSTNKAVVSLSNGVSVLTSKVLDLKNYIDKQLLPIVNKQSCSISNIETVIEFQQKNNRLLEITREFSVNAGVTTPVSTYMLTNSELLSLINDMPITNDQKKLMSNNVQIVRQQSYSIMSIIKEEVLAYVVQLPLYGVIDTPCWKLHTSPLCTTNTKEGSNICLTRTDRGWYCDNAGSVSFFPQAETCKVQSNRVFCDTMNSLTLPSEVNLCNIDIFNPKYDCKIMTSKADVSSSVITSLGAIVSCYGKTKCTASNKNRGIIKTFSNGCDYVSNKGVDTVSVGNTLYYVNKQEGKSLYVKGEPIINFYDPLVFPSDEFDASISQVNEKINQSLAFIRKSDELLHNVNVGKSTTNIMITTIIIVIIVILLLLIAVGLFLYCKAR

SEQ ID NO: 9156 - protein, 553 aa, Artificial Sequence
  derived and/or modified protein sequence (wt) from HRSV__AFI25251.1__F-del
MELLIHRSSAIFLTLAINALYLTSSQNITEEFYQSTCSAVSRGYFSALRTGWYTSVITIELSNIKETKCNGTDTKVKLIKQELDKYKNAVTELQLLMQNTPAANNRARREAPQYMNYTINTTKNLNVSISKKRKRRFLGFLLGVGSAIASGIAVSKVLHLEGEVNKIKNALLSTNKAVVSLSNGVSVLTSKVLDLKNYINNQLLPIVNQQSCRISNIETVIEFQQKNSRLLEITREFSVNAGVTTPLSTYMLTNSELLSLINDMPITNDQKKLMSSNVQIVRQQSYSIMSIMKEEVLAYVVQLPIYGVIDTPCWKLHTSPLCTTNIKEGSNICLTRTDRGWYCDNAGSVSFFPQADTCKVQSNRVFCDTMNSLTLPSEVSLCNTDIFNSKYDCKIMTSKTDISSSVITSLGAIVSCYGKTKCTASNKNRGIIKTFSNGCDYVSNKGVDTVSVGNTLYYVNKLEGKNLYVKGEPIINYYDPLVFPSDEFDASISQVNEKINQSLAFIRRSDELLHNVNTGKSTTNIMITVIIIVIIVVLLSLIAIGLLLYCKAK

SEQ ID NO: 9157 - protein, 553 aa, Artificial Sequence
  derived and/or modified protein sequence (wt) from HRSV__AAX23994.1__F-del
MELPILKANAITTILAAVTFCFASSQNITEEFYQSTCSAVSKGYLSALRTGWYTSVITIELSNIKENKCNGTDAKVKLINQELDKYKNAVTELQLLMQSTTAANNRARRELPRFMNYTLNNTKKTNVTLSKKRKRRFLGFLLGVGSAIASGIAVSKVLHLEGEVNKIKSALLSTNKAVVSLSNGVSVLTSKVLDLKNYIDKQLLPIVNKQSCRISNIETVIEFQQKNNRLLEITREFSVNAGVTTPVSTYMLTNSELLSLINDMPITNDQKKLMSNNVQIVRQQSYSIMSIIKEEVLAYVVQLPLYGVIDTPCWKLHTSPLCTTNTKEGSNICLTRTDRGWYCDNAGSVSFFPQAETCKVQSNRVFCDTMNSLTLPSEVNLCNVDIFNPKYDCKIMTSKTDVSSSVITSLGAIVSCYGKTKCTASNKNRGIIKTFSNGCDYVSNKGVDTVSVGNTLYYVNKQEGKSLYVKGEPIINFYDPLVFPSDEFDASISQVNEKINQSLAFIRKSDELLHHVNAGKSTTNIMITTIIIVIIVILLSLIAVGLLLYCKAR

SEQ ID NO: 9158 - protein, 553 aa, Artificial Sequence
  derived and/or modified protein sequence (wt) from HRSV__AAQ97026.1__F-del
MELPILKANAITTILAAVTFCFASSQNITEEFYQSTCSAVSKGYLSALRTGWYTSVITIELSNIKENKCNGTDAKVKLIKQELDKYKNAVTELQLLMQSTSAANNRARRELPRFMNYTLNNTKKTNVTLSKKRKRRFLGFLLGVGSAIASGTAVSKVLHLEGEVNKIKSALLSTNKAVVSLSNGVSVLTSKVLDLKNYIDKQLLPIVNKQSCRISNIETVIEFQQKNNRLLEITREFSVNAGVTTPVSTYMLTNSELLSLINDMPITNDQKKLMSNNVQIVRQQSYSIMSIIKEEVLAYVVQLPLYGVIDTPCWKLHTSPLCTTNTKEGSNICLTRTDRGWYCDNAGSVSFFPQAETCKVQSNRVFCDTMNSLTLPSEVNLCNVDIFNPKYGCKIMTSKTDVSSSVITSLGAIVSCYGKTKCTASNKNRGIIKTFSNGCDYVSNKGVDTVSVGNTLYYVNKQEGKSLYVKGEPIINFYDPLVFPSDEFDASISQVNEKINQSLAFIRKSDELLHHVNAGKSTTNIMITTIIIVIIVILLSLIAVGLLLYCKAR

SEQ ID NO: 9159 - protein, 553 aa, Artificial Sequence
  derived and/or modified protein sequence (wt) from HRSV__AAR14266.1__F-del
MELLIHRSSAIFLTLAINALYLTSSQNITEEFYQSTCSAVSRGYFSALRTGWYTSVITIELSNIKETKCNGTDTKVKLIKQELDKYKNAVTELQLLTQNTPAANNRARREAPQYMNYTINTTKNLNVSISKKRKRRFLGFLLGVGSAIASGIAVSKVLHLEGEVNKIKNALLSTNKAVVSLSNGVSVLTSKVLDLKSYINNQLLPIVNQQSCRISNIETVIEFQQKNSRLLEITREFSVNAGVTTPLSTYMLTNSELLSLINDMPITNDQKKLMSSNVQIVRQQSYSIMSIIKEEVLAYVVQLPIYGVIDTPCWKLHTSPLCTTNIKEGSNICLTRTDRGWYCDNAGSVSFFPQADTCKVQSNRVFCDTMNSLTLPSEVSLCNTDIFNSKYDCKIMTSKTDISSSVITSLGAIVSCYGKTKCTASNKNRGIIKTFSNGCDYVSNKGVDTVSVGNTLYYVNKLEGKNLYVKGEPIINYYDPLVFPSDEFDASISQVNEKINQSLAFIRRSDELLHNVNTGKSTTNIMITTIIIVIIVVLLSLIAIGLLLYCKAK

SEQ ID NO: 9160 - protein, 553 aa, Artificial Sequence
  derived and/or modified protein sequence (wt) from HRSV__AAQ97027.1__F-del
MELPILKANAITTILAAVTFCFASSQNITEEFYQSTCSAVSKGYLSALRTGWYTSVITIELSNIKENKCNGTDAKVKLIKQELDKYKNAVTELQLLMQSTSAANNRARRELPRFMNYTLNNTKKTNVTLSKKRKRRFLGFLLGVGSAIASGTAVSKVLHLEGEVNKIKSALLSTNKAVVSLSNGVSVLTSKVLDLKNYIDKQLLPIVNKQSCRISNIETVIEFQQKNNRLLEITREFSVNAGVTTPVSTYMLTNSELLSLINDMPITNDQKKLMSNNVQIVRQQSYSIMSIIKEEVLAYVVQLPLYGVIDTPCWKLHTSPLCTTNTKEGSNICLTRTDRGWYCDNAGSVSFFPQAETCKVQSNRVFCDTMNSLTLPSEVNLCNVDIFNPKYDCRIMTSKTDVSSSVITSLGAIVSCYGKTKCTASNKNRGIIKTFSNGCDYVSNKGVDTVSVGNTLYYVNKQEGKSLYVKGEPIINFYDPLVFPSDEFDASISQVNEKINQSLAFIRKSDELLHHVNAGKSTTNIMITTIIIVIIVILLSLIAVGLLLYCKAR

SEQ ID NO: 9161 - protein, 553 aa, Artificial Sequence
  derived and/or modified protein sequence (wt) from HRSV__AAQ97030.1__F-del
MELPILKANAITTILAAVTFCFASSQNITEEFYQSTCSAVSKGYLSALRTGWYTSVITIELSNIKENKCNGTDAKVKLIKQELDKYKNAVTELQLLMQSTSAANNRARRELPRFMNYTLNNTKKTNVTLSKKRKRRFLGFLLGAGSAIASGTAVSKVLHLEGEVNKIKSALLSTNKAVVSLSNGVSVLTSKVLDLKNYIDKQLLPIVNKQSCRISNIETVIEFQQKNNRLLEITREFSVNAGVTTPVSTYMLTNSELLSLINDMPITNDQKKLMSNNVQIVRQQSYSIMSIIKEEVLAYVVQLPLYGVIDTPCWKLHTSPLCTTNTKEGSNICLTRTDRGWYCDNAGSVSFFPQAETCKVQSNRVFCDTMNSLTLPSEVNLCNVDIFNPKYDCKIMTSKTDVSSSVITSLGAIVSCYGKTKCTASNKNRGIIKTFSNGCDYVSNKGVDTVSVGNTLYYVNKQEGKSLYVKGEPIINFYDPLVFPSDEFDASISQVNEKINQSLAFIRKSDELLHHVNAGKSTTNIMITTIIIVIIVILLSLIAVGLLLYCKAR

SEQ ID NO: 9162 - protein, 553 aa, Artificial Sequence
  derived and/or modified protein sequence (wt) from HRSV__AAQ97028.1__F-del
MELPILKANAITTILAAVTFCFASSQNITEEFYQSTCSAVSKGYLSALRTGWYTSVITIELSNIKENKCNGTDAKVKLIKQELDKYKNAVTELQLLMQSTSAANNRARRELPRFMNYTLNNTKKTNVTLSKKRKRRFLGFLLGVGSAIASGTAVSKVLHLEGEVNKIKSALLSTNKAVVSLSNGVSVLTSKVLDLKNYIDKQLLPIVNKQSCRISNIETVIEFQQKNNRLLEITREFSVNAGVTTPVSTYMLTNSELLSLINDMPITNDQKKLMSNNVQIVRQQSYSIMSIIKEEVLAYVVQLPLYGVIDTPCWKLHTSPLCTTNTKEGSNICLTRTDRGWYCDNAGSVSFFPQAETCKVQSNRVFCDTMNSLTLPSEVNLCNVDIFNPKYDCKIMTSKTDVSSSVITSLGAIVSCYGKTKCTASNKNRGIIKTFSNGCDYVSNKGVDTVSVGNTLYYVNKQEGKSLYVKGEPIINFYDPLVFPSDEFEASISQVNEKINQSLAFIRKSDELLHHVNAGKSTTNIMITTIIIVIIVILLSLIAVGLLLYCKAR

SEQ ID NO: 9163 - protein, 553 aa, Artificial Sequence
  derived and/or modified protein sequence (wt) from HRSV__AAC57027.1__F-del
MELPILKTNAITAILAAVTLCFASSQNITEEFYQSTCSAVSKGYLSALRTGWYTSVITIELSNIKENKCNGTDAKVKLIKQELDKYKSAVTELQLLMQSTPATNNRARRELPRFMNYTLNNTKNTNVTLSKKRKRRFLGFLLGVGSAIASGIAVSKVLHLEGEVNKIKSALLSTNKAVVSLSNGVSVLTSKVLDLKNYIDKQLLPIVNKQSCSISNIETVIEFQQKNNRLLEITREFSVNAGVTTPVSTYMLTNSELLSLINDMPITNDQKKLMSNNVQIVRQQSYSIMSIIKEEVLAYVVQLPLYGVIDTPCWKLHTSPLCTTNTKEGSNICLTRTDRGWYCDNAGSVSFFPLAETCKVQSNRVFCDTMNSLTLPSEVNLCNIDIFNPKYDCKIMTSKTDVSSSVITSLGAIVSCYGKTKCTASNKNRGIIKTFSNGCDYVSNKGVDTVSVGNTLYYVNKQEGKSLYVKGEPIINFYDPLVFPSDEFDASISQVNEKINQSLAFIRKSDELLHNVNAGKSTTNIMITTIIIVIIVILLSLIAVGLLLYCKAR

SEQ ID NO: 9164 - protein, 553 aa, Artificial Sequence
  derived and/or modified protein sequence (wt) from HRSV__AAQ97029.1__F-del
MELPILKANAITTILAAVTFCFASSQNITEEFYQSTCSAVSKGYLSALRTGWYTSVITIELSNIKENKCNGTDAKVKLIKQELDKYKNAVTELQLLMQSTSAANNRARRELPRFMNYTLNNTKKTNVTLSKKRKRRFLGLLLGVGSAIASGTAVSKVLHLEGEVNKIKSALLSTNKAVVSLSNGVSVLTSKVLDLKNYIDKQLLPIVNKQSCRISNIETVIEFQQKNNRLLEITREFSVNAGVTTPVSTYMLTNSELLSLINDMPITNDQKKLMSNNVQIVRQQSYSIMSIIKEEVLAYVVQLPLYGVIDTPCWKLHTSPLCTTNTKEGSNICLTRTDRGWYCDNAGSVSFFPQAETCKVQSNRVFCDTMNSLTLPSEVNLCNVDIFNPKYDCKIMTSKTDVSSSVITSLGAIVSCYGKTKCTASNKNRGIIKTFSNGCDYVSNKGVDTVSVGNTLYYVNKQEGKSLYVKGEPIINFYDPLVFPSDEFDASISQVNEKINQSLAFIRKSDELLHHVNAGKSTTNIMITTIIIVIIVILLSLIAVGLLLYCKAR

SEQ ID NO: 9165 - protein, 553 aa, Artificial Sequence
  derived and/or modified protein sequence (wt) from HRSV__AAQ97031.1__F-del
MELPILKANAITTILAAVTFCFASSQNITEEFYQSTCSAVSKGYLSALRTGWYTSVITIELSNIKENKCNGTDAKVKLIKQELDKYKNAVTELQLLMQSTSAANNRARRELPRFMNYTLNNTKKTNVTLSKKRKRRFLGFLLGVGSAIASGTAVSKVLHLEGEVNKIKSALLSTNKAVVSLSNGVSVLTSKVLDLKNYIDKQLLPIVNKQSCRISNIETVIEFQQKNNRLLEITREFSVNAGVTTPVSTYMLTNSELLSLINDMPITNDQKKLMSNNVQIVRQQSYSIMSIIKEEVLAYVVQLPLYGVIDTPCWKLHTSPLCTTNTKEGSNICLTRTDRGWYCDNAGSVSFFPQAETCKVQSNRVFCDTMNSLTLPSEVNLCNVDIFNPKYDCKIMTSKTDVSSSVITSLGAIVSCYGKTKCTASNKNRGIIKTFSNGCDYVSNKGVDTVSVGNTLYYVNKQEGKSLYVKGEPIINFYDPLVFPSDEFDASISQVNEKINQSLAFIRKSDELLHHVNAGKSTTNIMITTIIIVIIVILLSLIAVGLLLYCKAR

SEQ ID NO: 9166 - protein, 553 aa, Artificial Sequence
  derived and/or modified protein sequence (wt) from HRSV__AAM68160.1__F-del
MDLPILKTNAITTILAAVLLCFASSQNITEEFYQSTCSAVSKGYLSALRTGWYTSVITIELSNIKENKCNGTDAKVKLIKQELDKYKNAVTELQLLMQSTPAANNRARRELPRFMNYTLNNTKNNNVTLSKKRKRRFLGFLLGVGSAIASGIAVSKVLHLEGEVNKIKSALLSTNKAVVSLSNGVSVLTSKVLDLKNYIDKQLLPIVNKQSCSISNIETVIEFQQKNNRLLEITREFSVNAGVTTPVSTYMLTNSELLSLINDMPITNDQKKLMSNNVQIVRQQSYSIMSIIKEEVLAYVVQLPLYGVIDTPCWKLHTSPLCTTNTKEGSNICLTRTDRGWYCDNAGSVSFFPQAETCKVQSNRVFCDTMNSLTLPSEVNLCNIDIFNPKYDCKIMTSKTDVSSSVITSLGAIVSCYGKTKCTASNKNRGIIKTFSNGCDYVSNKGVDTVSVGNTLYYVNKQEGKSLYVKGEPIINFYDPLVFPSDEFDASISQVNEKINQSLAFIRKSDELLHNVNVGKSTTNIMITTIIIVIIVILLLLIAVGLFLYCKAR

SEQ ID NO: 9167 - protein, 553 aa, Artificial Sequence
  derived and/or modified protein sequence (wt) from HRSV__AAM44851.1__F-del
MELPILKANAITTILAAVTLCFVSSQNITEEFYQSTCSAVSKGYLSALRTGWYTSVITIELSNIKENKCNGTDAKVKLIKQELDKYKNAVTELQLLMQSTPAANNRARRELPRFMNYTLNNTKNTNVTLSKKRKRRFLGFLLGVGSAIASGIAVSKVLHLEGEVNKIKSALLSTNKAVVSLSNGVSVLTSKVLDLKNYIDKQLLPIVNKQSCSISNIETVIEFQQKNNRLLEITREFSVNAGVTTPVSTYMLTNSELLSLINDMPITNDQKKLMSNNVQIVRQQSYSIMSIIKEEVLAYVVQLPLYGVIDTPCWKLHTSPLCTTNTKEGSNICLTRTDRGWYCDNAGSVSFFPQAETCKVQSNRVFCDTMNSLTLPSEVNLCNVDIFNPKYDCKIMTSKTDVSSSVITSLGAIVSCYGKTKCTASNKNRGIIKTFSNGCDYVSNKGVDTVSVGNTLYYVNKQEGKNLYVKGEPIINFYDPLVFPSDEFDASISQVNEKINQSLAFIRKSDELLHNVNAGKSTTNIMITTIIIVIIVILLSLIAVGLLLYCKAR

SEQ ID NO: 9168 - protein, 553 aa, Artificial Sequence
  derived and/or modified protein sequence (wt) from HRSV__P11209.2__F-del
MELPILKTNAITAILAAVTLCFASSQNITEEFYQSTCSAVSKGYLSALRTGWYTSVITIELSNIKENKCNGTDAKVKLIKQELDKYKSAVTELQLLMQSTPATNNRARRELPRFMNYTLNNTKNTNVTLSKKRKRRFLGFLLGVGSAIASGIAVSKVLHLEGEVNKIKSALLSTNKAVVSLSNGVSVLTSKVLDLKNYIDKQLLPIVNKQSCSISNIETVIEFQQKNNRLLEITREFSVNAGVTTPVSTYMLTNSELLSLINDMPITNDQKKLMSNNVQIVRQQSYSIMSIIKEEVLAYVVQLPLYGVIDTPCWKLHTSPLCTTNTKEGSNICLTRTDRGWYCDNAGSVSFFPLAETCKVQSNRVFCDTMNSLTLPSEVNLCNIDIFNPKYDCKIMTSKTDVSSSVITSLGAIVSCYGKTKCTASNKDRGIIKTFSNGCDYVSNKGVDTVSVGNTLYYVNKQEGKSLYVKGEPIINFYDPLVFPSDEFDASISQVNEKINQSLAFIRKSDELLHNVNAGKSTTNIMITTIIIVIIVILLSLIAVGLLLYCKAR

SEQ ID NO: 9169 - protein, 553 aa, Artificial Sequence
  derived and/or modified protein sequence (wt) from HRSV__P13843.1__F-del
MELLIHRSSAIFLTLAVNALYLTSSQNITEEFYQSTCSAVSRGYFSALRTGWYTSVITIELSNIKETKCNGTDTKVKLIKQELDKYKNAVTELQLLMQNTPAANNRARREAPQYMNYTINTTKNLNVSISKKRKRRFLGFLLGVGSAIASGIAVSKVLHLEGEVNKIKNALLSTNKAVVSLSNGVSVLTSKVLDLKNYINNRLLPIVNQQSCRISNIETVIEFQQMNSRLLEITREFSVNAGVTTPLSTYMLTNSELLSLINDMPITNDQKKLMSSNVQIVRQQSYSIMSIIKEEVLAYVVQLPIYGVIDTPCWKLHTSPLCTTNIKEGSNICLTRTDRGWYCDNAGSVSFFPQADTCKVQSNRVFCDTMNSLTLPSEVSLCNTDIFNSKYDCKIMTSKTDISSSVITSLGAIVSCYGKTKCTASNKNRGIIKTFSNGCDYVSNKGVDTVSVGNTLYYVNKLEGKNLYVKGEPIINYYDPLVFPSDEFDASISQVNEKINQSLAFIRRSDELLHNVNTGKSTTNIMITTIIIVIIVVLLSLIAIGLLLYCKAK

SEQ ID NO: 9170 - protein, 553 aa, Artificial Sequence
  derived and/or modified protein sequence (wt) from HRSV__AAO72325.1__F-del
MELPILKTNAITTILAAVTLCFASSQNITEEFYQSTCSAVSKGYLSALRTGWYTSVITIELSNIKENKCNGTDAKAKLIKQELDKYKNAVTELQLLMQSTPAANNRARRELPRFMNYTLNNTKNTNVTLSKKRKRRFLGFLLGVGSAIASGIAVSKVLHLEGEVNKIKSALLSTNKAVVSLSNGVSVLTSKVLHLKNYIDKQFLPIVNKQSCSISNIATVIEFQQKNNRLLEITREFSVNAGVTTPVSTYMLTNSELLSLINDMPITNDQKKLMSNNVQIVRQQSYSIMSIIKEEVLAYVVQLPLYGVMDTPCWKLHTSPLCTTNTKEGSNICLTRTDRGWYCDNAGSVSFFPQAETCKVQSNRVFCDTMNSLTLPSEVNLCNIDIFNPKYDCKIMTSKTDVSSSVITSLGAIVSCYGKTKCTASNKNRGIIKTFSNGCDYVSNKGVDTVSVGNTLYYVNKQEGKSLYVKGEPIINFYDPLVFPSDEFDASISQVNEKINQSLAFIRKSDELLHNVNAGKSTINIMITTIIIVIIVILLSLIAVGLLLYCKAR

SEQ ID NO: 9171 - protein, 553 aa, Artificial Sequence
  derived and/or modified protein sequence (wt) from HRSV__AAM68157.1__F-del
MDLPILKTNAITTILAAVSLCFASSQNITEEFYQSTCSAVSKGYLSALRTGWYTSVITIELSNIKENKCNGTDAKVKLIKQELDKYKNAVTELQLLMQSTPAANNRARRELPRFMNYTLNNTKNNNVTLSKKRKRRFLGFLLGVGSAIASGIAVSKVLHLEGEVNKIKSALLSTNKAVVSLSNGVSVLTSKVLDLKNYIDKQLLPIVNKQSCSISNIETVIEFQQKNNRLLEITREFSVNAGVTTPVSTYMLTNSELLSLINDMPITNDQKKLMSNNVQIVRQQSYSIMSIIKEEVLAYVVQLPLYGVIDTPCWKLHTSPLCTTNTKEGSNICLTRTDRGWYCDNAGSVSFFPQAETCKVQSNRVFCDTMNSLTLPSEVNLCNIDIFNPKYDCKIMTSKTDVSSSVITSLGAIVSCYGKTKCTASNKNRGIIKTFSNGCDYVSNKGVDTVSVGNTLYYVNKQEGKSLYVKGEPIINFYDPLVFPSDEFDASISQVNEKINQSLAFIRKSDELLHNVNVGKSTTNIMITTIIIVIIVILLLLIAVGLFLYCKAR

SEQ ID NO: 9172 - protein, 553 aa, Artificial Sequence
  derived and/or modified protein sequence (wt) from HRSV__CAA26143.1__F-del
MELLILKANAITTILTAVTFCFASGQNITEEFYQSTCSAVSKGYLSALRTGWYTSVITIELSNIKENKCNGTDAKVKLIKQELDKYKNAVTELQLLMQSTPATNNRARRELPRFMNYTLNNAKKTNVTLSKKRKRRFLGFLLGVGSAIASGVAVSKVLHLEGEVNKIKSALLSTNKAVVSLSNGVSVLTSKVLDLKNYIDKQLLPIVNKQSCSISNIETVIEFQQKNNRLLEITREFSVNAGVTTPVSTYMLTNSELLSLINDMPITNDQKKLMSNNVQIVRQQSYSIMSIIKEEVLAYVVQLPLYGVIDTPCWKLHTSPLCTTNTKEGSNICLTRTDRGWFCDNAGSVSFFPQAETCKVQSNRVFCDTMNSLTLPSEVNLCNVDIFNPKYDCKIMTSKTDVSSSVITSLGAIVSCYGKTKCTASNKNRGIIKTFSNGCDYVSNKGVDTVSVGNTLYYVNKQEGKSLYVKGEPIINFYDPLVFPSDEFDASISQVNEKINQSLAFIRKSDELLHNVNAGKSTTNIMITTIIIVIIVILLSLIAVGLLLYCKAR

SEQ ID NO: 9173 - protein, 553 aa, Artificial Sequence
  derived and/or modified protein sequence (wt) from HRSV__1512372A__F-del
MELPILKANAITTILAAVTFCFASSQNITEEFYQSTCSAVSKGYLSALRTGWYTSVITIELSNIKENKCNGTDAKVKLIKQELDKYKNAVTELQLLMQSTPAANNRARRELPRFMNYTLNNTKKTNVTLSKKRKRRFLGFLLGVGSAIASGTAVSKVLHLEGEVNKIKSALLSTNKAVVSLSNGVSVLTSKVLDLKNYIDKQLLPIVDKQSCRISNIETVIEFQQKNNRLLEITREFSVNAGVTTPVSTYMLTNSELLSLINDMPITNDQKKLMSNNVQIVRQQSYSIMSIIKEEVLAYVVQLPLYGVIDTPCWKLHTSPLCTTNTKEGSNICLTRTDRGWYCDNAGSVSFFPQAETCKVQSNRVFCDTMNSLTLPSEVNLCNVDIFNPKYDCKIMTSKTDVSSSVITSLGAIVSCYGKTKCTASNKNRGIIKTFSNGCDYASNKGVDTVSVGNTLYYVNKQEGKSLYVKGEPIINFYDPLVFPSDEFDASISQVNEKINQSLAFIRKSDELLHHVNAGKSTTNIMITTIIIVIIVILLSLIAVGLLLYCKAR

SEQ ID NO: 9174 - protein, 553 aa, Artificial Sequence
  derived and/or modified protein sequence (wt) from HRSV__AAB86664.1__F-del
MELLILKANAITTILTAVTFCFASGQNITEEFYQSTCSAVSKGYLSALRTGWYTSVITIELSNIKENKCNGTDAKVKLIKQELDKYKNAVTELQLLMQSTPATNNRARRELPRFMNYTLNNAKKTNVTLSKKRKRRFLGFLLGVGSAIASGVAVSKVLHLEGEVNKIKSALLSTNKAVVSLSNGVSVLTSKVLDLKNYIDKQLLPIVNKQSCSISNIATVIEFQQKNNRLLEITREFSVNAGVTTPVSTYMLTNSELLSLINDMPITNDQKKLMSNNVQIVRQQSYSIMSIIKEEVLAYVVQLPLYGVIDTPCWKLHTSPLCTTNTKEGSNICLTRTDRGWYCDNAGSVSFFPQAETCKVQSNRVFCDTMNSLTLPSEVNLCNVDIFNPKYDCKIMTSKTDVSSSVITSLGAIVSCYGKTKCTASNKNRGIIKTFSNGCDYVSNKGVDTVSVGNTLYYVNKQEGKSLYVKGEPIINFYDPLVFPSDEFDASISQVNEKINQSLAFIRKSDELLHNVNAGKSTINIMITTIIIVIIVILLSLIAVGLLLYCKAR

SEQ ID NO: 9175 - protein, 553 aa, Artificial Sequence
  derived and/or modified protein sequence (wt) from HRSV__AAO72324.1__F-del
MELPILKTNAITTILAAVTLCFASSQNITEEFYQSTCSAVSKGYLSALRTGWYTSVITIELSNIKENKCNGTDAKVKLIKQELDKYKNAVTELQLLMQSTPAANNRARRELPRFMNYTLNNTKNTNVTLSKKRKRRFLGFLLGVGSAIASGIAVSKVLHLEGEVNKIKSALLSTNKAVVSLSNGVSVLTSKVLDLKNYIDKQLLPIVNKQSCSISNIATVIEFQQKNNRLLEITREFSVNAGVTTPVSTYMLTNSELLSLINDMPITNDQKKLMSNNVQIVRQQSYSIMSIIKEEVLAYVVQLPLYGVIDTPCWKLHTSPLCTTNTKEGSNICLTRTDRGWYCDNAGSVSFFPQAETCKVQSNRVFCDTMNSLTLPSEVNLCNIDIFNPKYDCKIMTSKTDVSSSVITSLGAIVSCYGKTKCTASNKNRGIIKTFSNGCDYVSNKGVDTVSVGNTLYYVNKQEGKSLYVKGEPIINFYDPLVFPFDEFDASISQVNEKINQSLAFIRKSDELLHNVNAGKSTINIMITTIIIVIIVILLSLIAVGLLLYCKAR

SEQ ID NO: 9176 - protein, 553 aa, Artificial Sequence
  derived and/or modified protein sequence (wt) from HRSV__AAB82446.1__F-del
MELLIHRLSAIFLTLAINALYLTSSQNITEEFYQSTCSAVSRGYFSALRTGWYTSVITIELSNIKETKCNGTDTKVKLIKQELDKYKNAVTELQLLMQNTPAANNRARREAPQYMNYTINTTKNLNVSISKKRKRRFLGFLLGVGSAIASGIAVSKVLHLEGEVNKIKNALLSTNKAVVSLSNGVSVLTSKVLDLKNYINNQLLPIVNQQSCRISNIGTVIEFQQKNSRLLEINREFSVNAGVTTPLSTYMLTNSELLSLINDMPITNDQKKLMSSNVQIVRQQSYSIMSIIKEEVLAYVVQLPIYGVIDTPCWKLHTSPLCTTNIKEGSNICLTRTDRGWYCDNAGSVSFFPQADTCKVQSNRVFCDTMNSLTLPSEVSLCNTDIFNSKYDCKIMTSKTDISSSVITSLGAIVSCYGKTKCTASNKNRGIIKTFSNGCDYVSNKGVDTVSVGNTLYYVNKLEGKNLYVKGEPIINYYDPLVFPSDEFDASISQVNEKINQSLAFIRRSDELLHNVNTGKSTTNIMITTIIIVIIVVLLSLIAIGLLLYCKAK

SEQ ID NO: 9177 - protein, 553 aa, Artificial Sequence
  derived and/or modified protein sequence (wt) from HRSV__AAO72323.1__F-del
MELPILKTNAITTILAAVTLCFASSQNITEEFYQSTCSAVSKGYLSALRTGWYTSVITIELSNIKENKCNGTDAKVKLIKQELDKYKNAVTELQLLMQSTPAANNRARRELPRFMNYTLNNTKNTNVTLSKKRKRRFLGFLLGVGSAIASGIAVSKVLHLEGEVNKIKSALLSTNKAVVSLSNGVSVLTSKVLDLKNYIDKQLLPIVNKQSCSISNIATVIEFQQKNNRLLEITREFSVNAGVTTPVSTYMLTNSELLSLINDMPITNDQKKLMSNNVQIVRQQSYSIMSIIKEEVLAYVVQLPLYGVMDTPCWKLHTSPLCTTNTKEGSNICLTRTDRGWYCDNAGSVSFFPQAETCKVQSNRVFCDTMNSLTLPSEVNLCNIDIFNPKYDCKIMTSKTDVSSSVITSLGAIVSCYGKTKCTASNKNRGIIKTFSNGCDYVSNKGVDTVSVGNTLYYVNKQEGKSLYVKGEPIINFYDPLVFPSDEFDASISQVNEKINQSLAFIRKSDELLHNVNAGKSTINIMITTIIIVIIVILLSLIAVGLLLYCKAR

SEQ ID NO: 9178 - protein, 553 aa, Artificial Sequence
  derived and/or modified protein sequence (wt) from HRSV__AAM68154.1__F-del
MELPILKTNAITTILAAVTLCFASSQNITEEFYQSTCSAVSKGYLSALRTGWYTSVITIELSNIKENKCNGTDAKVKLIKQELDKYKNAVTELQLLMQSTPAANNRARRELPRFMNYTLNNTKTTNVTLSRKRKRRFLGFLLGVGSAIASGIAVSKVLHLEGEVNKIKSALLSTNKAVVSLSNGVSVLTSKVLDLKNYIDKQLLPIVNKQSCSISNIETVIEFQQKNNRLLEITREFSVNAGVTTPVSTYMLTNSELLSLINDMPITNDQKKLMSNNVQIVRQQSYSIMSIIKEEVLAYVVQLPLYGVIDTPCWKLHTSPLCTTNTKEGSNICLTRTDRGWYCDNAGSISFFPQAETCKVQSNRVFCDTMNSLTLPSEVNLCNIDIFNPKYDCKIMTSKTDVSSSVITSLGAIVSCYGKTKCTASNKNRGIIKTFSNGCDYVSNKGVDTVSVGNTLYYVNKQEGKSLCVKGEPIINFYDPLVFPSDEFDASISQVNEKINQSLAFIRKSDELLHNVNAGKSTTNIMITTIIIVIIVILLSLIAVGLLLYCKAR

SEQ ID NO: 9179 - protein, 553 aa, Artificial Sequence
  derived and/or modified protein sequence (wt) from HRSV__AAA47410.1__F-del
MELPILKANAITTILAAVTFCFASSQNITEEFYQSTCSAVSKGYLSALRTGWYTSVITIELSNIKENKCNGTDAKVKLMKQELDKYKNAVTELQLLMQSTPAANNRARRELPRFMNYTLNNTKKTNVTLSKKRKRRFLGFLLGVGSAIASGIAVSKVLHLEGEVNKIKSALLSTNKAVVSLSNGVSVLTSKVLDLKNYIDKQLLPIVNKQSCRISNIETVIEFQQKNNRLLEITREFSVNAGVTTPVSTYMLTNSELLSLINDMPITNDQKKLMSNNVQIVRQQSYSIMSIIKEEVLAYVVQLPLYGVIDTPCWKLHTSPLCTTNTKEGSNICLTRTDRGWYCDNAGSVSFFPQAETCKVQSNRVFCDTMNSLTLPSEVNLCNVDIFNPKYDCKIMTSKTDVSSSVITSLGAIVSCYGKTKCTASNKNRGIIKTFSNGCDYVSNKGVDTVSVGNTLYYVNKQEGKSLYVKGEPIINFYDPLVFPSDEFDASISQVNEKINQSLAFIRKSDELLHNVNAGKSTTNIMITTIIIVIIVILLSLIAVGLLLYCKAR

SEQ ID NO: 9180 - protein, 553 aa, Artificial Sequence
  derived and/or modified protein sequence (wt) from HRSV__P12568.1__F-del
MELPILKANAITTILAAVTFCFASSQNITEEFYQSTCSAVSKGYLSALRTGWYTSVITIELSNIKENKCNGTDAKVKLIKQELDKYKNAVTELQLLMQSTPAANNRARRELPRFMNYTLNNTKKTNVTLSKKRKRRFLGFLLGVGSAIASGTAVSKVLHLEGEVNKIKSALLSTNKAVVSLSNGVSVLTSKVLDLKNYIDKQLLPIVNKQSCRISNIETVIEFQQKNNRLLEITREFSVNAGVTTPVSTYMLTNSELLSLINDMPITNDQKKLMSNNVQIVRQQSYSIMSIIKEEVLAYVVQLPLYGVIDTPCWKLHTSPLCTTNTKEGSNICLTRTDRGWYCDNAGSVSFFPQAETCKVQSNRVFCDTMNSLTLPSEVNLCNVDIFNPKYDCKIMTSKTDVSSSVITSLGAIVSCYGKTKCTASNKNRGIIKTFSNGCDYASNKGVDTVSVGNTLYYVNKQEGKSLYVKGEPIINFYDPLVFPSDEFDASISQVNEKINQSLAFIRKSDELLHHVNAGKSTTNIMITTIIIVIIVILLSLIAVGLLLYCKAR

SEQ ID NO: 9181 - protein, 553 aa, Artificial Sequence
  derived and/or modified protein sequence (wt) from HRSV__ARB07894.1__F-del
MELLIHRLSAIFLTLAINALYLTSSQNITEEFYQSTCSAVSRGYFSALRTGWYTSVITIELSNIKETKCNGTDTKVKLIKQELDKYKNAVTELQLLMQNTPAANNRARREAPQYMNYTINTTKNLNVSISKKRKRRFLGFLLGVGSAIASGIAVSKVLHLEGEVNKIKNALLSTNKAVVSLSNGVSVLTSKVLDLKNYINNQLLPIVNQQSCRISNIETVIEFQQKNSRLLEINREFSVNAGVTTPLSTYMLTNSELLSLINDMPITNDQKKLMSSNVQIVRQQSYSIMSIIKEEVLAYVVQLPIYGVIDTPCWKLHTSPLCTTNIKEGSNICLTRTDRGWYCDNAGSVSFFPQADTCKVQSNRVFCDTMYSLTLPSEVSLCNTDIFNSKYDCKIMTSKTDISSSVITSLGAIVSCYGKTKCTASNKNRGIIKTFSNGCDYVSNKGVDTVSVGNTLYYVNKLEGKNLYVKGEPIINYYDPLVFPSDEFDASISQVNEKINQSLAFIRRSDELLHNVNTGKSTTNIMITTIIIVIIVVLLSLIAIGLLLYCKAK

SEQ ID NO: 9182 - protein, 553 aa, Artificial Sequence
  derived and/or modified protein sequence (wt) from HRSV__AGG39517.1__F-del
MELLIHRSSAIFLTLAINALYLTSSQNITEEFYQSTCSAVSRGYFSALRTGWYTSVITIELSNIKETKCNGTDTKVKLIKQELDKYKNAVTELQLLMQNTPAANNRARREAPQYMNYTINTTKNLNVSISKKRKRRFLGFLLGVGSAIASGIAVSKVLHLEGEVNKIKNALLSTNKAVVSLSNGVSVLTSKVLDLKNYINNQLLPIVNQQSCRISNIETVIEFQQKNSRLLEITREFSVNAGVTTPLSTYMLTNSELLSLINDMPITNDQKKLMSSNVQIVRQQSYSIMSIIKEEVLAYVVQLPIYGVIDTPCWKLHTSPLCTTNIKEGSNICLTRTDRGWYCDNAGSVSFFPQADTCKVQSNRVFCDTMNSLTLPSEVSLCNTDIFNSKYDCKIMTSKTDISSSVITSLGAIVSCYGKTKCTASNKNRGIIKTFSNGCDYVSNKGVDTVSVGNTLYYVNKLEGKNLYVKGEPIINYYDPLVFPSDEFDASISQVNEKINQSLAFIRRSDELLHNVNTGKSTTNIMITAIIIVIIVVLLSLIAIGLLLYCKAK

SEQ ID NO: 9183 - protein, 553 aa, Artificial Sequence
  derived and/or modified protein sequence (wt) from HRSV__BBC54612.1__F-del
MELPILKTNAITTILAAVTLCFTSSQNITEEFYQSTCSAVSKGYLSALRTGWYTSVITIELSNIKENKCNGTDAKVKLIKQELDKYKNAVTELQLLMQSTPAANSRARRELPRFMNYTLNNTKNTNVTLSKKRKRRFLGFLLGVGSAIASGIAVSKVLHLEGEVNKIKSALLSTNKAVVSLSNGVSVLTSKVLDLKNYIDKQLLPIVNKQSCSISNIETVIEFQQKNNRLLEITREFSVNAGVTTPVSTYMLTNSELLSLINDMPITNDQKKLMSSNVQIVRQQSYSIMSIIKEEVLAYVVQLPLYGVIDTPCWKLHTSPLCTTNTKEGSNICLTRTDRGWYCDNAGSVSFFPQAETCKIQSNRVFCDTMNSLTLPSEVNLCNIDIFNPKYDCKIMTSKTDVSSSVITSLGAIVSCYGKTKCTASNKNRGIIKTFSNGCDYVSNKGVDTVSVGNTLYYVNKQEGKSLYVKGEPIINFYDPLVFPSDEFDASISQVNEKINQSLAFIRKSDELLHNVNAGKSTTNIMITTIIIVIIVILLALIAVGLLLYCKAR

SEQ ID NO: 9184 - protein, 553 aa, Artificial Sequence
  derived and/or modified protein sequence (wt) from HRSV__BBC54636.1__F-del
MELPILKTNAITTILAAVTLCFASSQNITEEFYQSTCSAVSKGYLSALRTGWYTSVITIELSNIKENKCNGTDAKVKLIKQELDKYKNAVTELQLLMQSTPAANSRARRELPRLMNYTLNNTKNTNVTLSKKRKRRFLGFLLGVGSAIASGIAVSKVLHLEGEVNKIKSALLSTNKAVVSLSNGVSVLTSKVLDLKNYIDKQLLPIVNKQSCSISNIETVIEFQQKNNRLLEITREFSVNAGVTTPVSTYMLTNSELLSLINDMPITNDQKKLMSSNVQIVRQQSYSIMSIIKEEVLAYVVQLPLYGVIDTPCWKLHTSPLCTTNTKEGSNICLTRTDRGWYCDNAGSVSFFPQAETCKVQSNRVFCDTMNSLTLPSEVNLCNIDIFNPKYDCKIMTSKTDVSSSVITSLGAIVSCYGKTKCTASNKNRGIIKTFSNGCDYVSNKGVDTVSVGNTLYYVNKQEGKSLYVKGEPIINFYDPLVFPSDEFDASISQVNEKINQSLAFIRKSDELLHNVNAGKSTTNIMITTIIIVIIVILLALIAVGLLLYCKAR

SEQ ID NO: 9185 - protein, 553 aa, Artificial Sequence
  derived and/or modified protein sequence (wt) from HRSV__BBC54627.1__F-del
MELPILKTNAITTILAAVTLCFASSQNITEEFYQSTCSAVSKGYLSALRTGWYTGVITIELSNIKENKCNGTDAKVKLIKQELDKYKNAVTELQLLMQSTPAANSRARRELPRFMNYTLNNTKSTNVTLSKKRKRRFLGFLLGVGSAIASGIAVSKVLHLEGEVNKIKSALLSTNKAVVSLSNGVSVLTSKVLDLKNYIDKQLLPIVNKQSCSISNIETVIEFQQKNNRLLEITREFSVNAGVTTPVSTYMLTNSELLSLINDMPITNDQKKLMSSNVQIVRQQSYSIMSIIKEEVLAYVVQLPLYGVIDTPCWKLHTSPLCTTNTKEGSNICLTRTDRGWYCDNAGSVSFFPQAETCKVQSNRVFCDTMNSLTLPSEVNLCNIDIFNPKYDCKIMTSKTDVSSSVITSLGAIVSCYGKTKCTASNKNRGIIKTFSNGCDYVSNKGVDTVSVGNTLYYVNKQEGKSLYVKGEPIINFYDPLVFPSDEFDASISQVNEKINQSLAFIRKSDELLHNVNAGKSTTNIMITTIIIVIIVILLALIAVGLLLYCKAR

SEQ ID NO: 9186 - protein, 553 aa, Artificial Sequence
  derived and/or modified protein sequence (wt) from HRSV__BBC54621.1__F-del
MELPILKTNAITTILAAVTLCFASSQNITEEFYQSTCSAVSKGYLSALRTGWYTSVITIELSNIKENKCNGTDAKVKLIKQELDKYKNAVTELQLLMQSTPAANSRARRELPRFMNYTLNNTKNTNVTLSKKRKRRFLGFLLGVGSAIASGIAVSKVLHLEGEVNKIKSALLSTNKAVVSLSNGVSVLTSKVLDLKNYIDKQLLPIVNKQSCSISNIETVIEFQQKNNRLLEITREFSVNAGVTTPVSTYMLTNSELLSLINDMPITNDQKKLMSSNVQIVRQQSYSIMSIIKEEVLAYVVQLPLYGVIDTPCWKLHTSPLCTTNTKEGSNICLTRTDRGWYCDNAGSVSFFPQAETCKVQTNRVFCDTMNSLTLPSEVNLCNIDIFNPKYDCKIMTSKTDVSSSVITSLGAIVSCYGKTKCTASNKNRGIIKTFSNGCDYVSNKGVDTVSVGNTLYYVNKQEGKSLYVKGEPIINFYDPLVFPSDEFDASISQVNEKINQSLAFIRKSDELLHNVNAGKSTTNIMITTIIIVIIVILLALIAVGLLLYCKAR

SEQ ID NO: 9187 - protein, 553 aa, Artificial Sequence
  derived and/or modified protein sequence (wt) from HRSV__BBC54570.1__F-del
MELPILKTNAITTILASVTLCFASSQNITEEFYQSTCSAVSKGYLSALRTGWYTSVITIELSNIKENKCNGTDAKVKLIKQELDKYKNAVTELQLLMQSTPAANSRARRELPRFMNYTLNNTKNTNVTLSKKRKRRFLGFLLGVGSAIASGIAVSKVLHLEGEVNKIKSALLSTNKAVVSLSNGVSVLTSKVLDLKNYIDKQLLPIVNKQSCSISNIETVIEFQQKNNRLLEITREFSVNAGVTTPVSTYMLTNSELLSLINDMPITNDQKKLMSSNVQIVRQQSYSIMSIIKEEVLAYVVQLPLYGVIDTPCWKLHTSPLCTTNTKEGSNICLTRTDRGWYCDNAGSVSFFPQAETCKVQSNRVFCDTMNSLTLPSEVNLCNIDIFNPKYDCKIMTSKTDVSSSVITSLGAIVSCYGKTKCTASNKNRGIIKTFSNGCDYVSNKGVDTVSVGNTLYYVNKQEGKSLYVKGEPIINFYDPLVFPSDEFDASISQVNEKINQSLAFIRKSDELLHNVNAGKSTTNIMITTIIIVIIVILLALIAVGLLLYCKAR

SEQ ID NO: 9188 - protein, 553 aa, Artificial Sequence
  derived and/or modified protein sequence (wt) from HRSV__BBC54579.1__F-del
MELPIFKTNAITTILAAVTLCFTSSQNITEEFYQSTCSAVSKGYLSALRTGWYTSVITIELSNIKENKCNGTDAKVKLIKQELDKYKNAVTELQLLMQSTPAANSRARRELPRFMNYTLNNTKNTNVTLSKKRKRRFLGFLLGVGSAIASGIAVSKVLHLEGEVNKIKSALLSTNKAVVSLSNGVSVLTSKVLDLKNYIDKQLLPIVNKQSCSISNIETVIEFQQKNNRLLEITREFSVNAGVTTPVSTYMLTNSELLSLINDMPITNDQKKLMSSNVQIVRQQSYSIMSIIKEEVLAYVVQLPLYGVIDTPCWKLHTSPLCTTNTKEGSNICLTRTDRGWYCDNAGSVSFFPQAETCKVQSNRVFCDTMNSLTLPSEVNLCNIDIFNPKYDCKIMTSKTDVSSSVITSLGAIVSCYGKTKCTASNKNRGIIKTFSNGCDYVSNKGVDTVSVGNTLYYVNKQEGKSLYVKGEPIINFYDPLVFPSDEFDASISQVNEKINQSLAFIRKSDELLHNVNAGKSTTNIMITTIIIVIIVILLALIAVGLLLYCKAR

SEQ ID NO: 9189 - protein, 553 aa, Artificial Sequence
  derived and/or modified protein sequence (wt) from HRSV__BBC54595.1__F-del
MELPILKTNAITTILAAVTLCFASSQNITEEFYQSTCSAVSKGYLSALRTGWYTSVITIELSNIKENKCNGTDAKVKLIKQELDKYKNAVTELQLLMQSTPAANSRARRELPRFMNYTLNNTKNTNVTLSKKRKRRFLGFLLGVGSAIASGIAVSKVLHLEGEVNKIKSALLSTNKAVVSLSNGVSVLTSKVLDLKNYIDKQLLPIVNKQSCSISNIETVIEFQQKNNRLLEITREFSVNAGVTTPVSTYMLTNSELLSLINDMPITNDQKKLMSSNVQIVRQQSYSIMSIIKEEVLAYVVQLPLYGVIDTPCWKLHTSPLCTTNTKEGSNICLTRTDRGWYCDNAGSVSFFPQAETCKVQSNRVFCDTMNSLTLPSEVNLCNIDIFNPKYDCKIMTSKTDVSSSVITSLGAIVSCYGKTKCTASNKNRGIIKTFSNGCDYVSNKGVDTVSVGNTLYYVNKQEGKSLYVKGEPIINFYDPLVFPSDEFDASISQVNEKINQSLAFIRKSDELLHNVNAGKSTTNIMITTIIIVIIVILLALIVVGLLLYCKAR

SEQ ID NO: 9190 - protein, 553 aa, Artificial Sequence
  derived and/or modified protein sequence (wt) from HRSV__BBC54555.1__F-del
MELPILKTNAITTILAAVTLCFASSQNITEEFYQSTCSAVSKGYLSALRTGWYTSVITIELSNIKENKCNGTDAKVKLIKQELDKYKNAVTELQLLMQSTPAANSRARRELPRFMNYTLNNTKNTNVTLGKKRKRRFLGFLLGVGSAIASGIAVSKVLHLEGEVNKIKSALLSTNKAVVSLSNGVSVLTSKVLDLKNYIDKQLLPIVNKQSCSISNIETVIEFQQKNNRLLEITREFSVNAGVTTPVSTYMLTNSELLSLINDMPITNDQKKLMSSNVQIVRQQSYSIMSIIKEEVLAYVVQLPLYGVIDTPCWKLHTSPLCTTNTKEGSNICLTRTDRGWYCDNAGSVSFFPQAETCKVQSNRVFCDTMNSLTLPSEVNLCNIDIFNPKYDCKIMTSKTDVSSSVITSLGAIVSCYGKTKCTASNKNRGIIKTFSNGCDYVSNKGVDTVSVGNTLYYVNKQEGKSLYVKGEPIINLYDPLVFPSDEFDASISQVNEKINQSLAFIRKSDELLHNVNAGKSTTNIMITTIIIVIIVILLALIAVGLLLYCKAR

SEQ ID NO: 9191 - protein, 553 aa, Artificial Sequence
  derived and/or modified protein sequence (wt) from HRSV__BBC54552.1__F-del
MELPILKTNAITTILAAVALCFASSQNITEEFYQSTCSAVSKGYLSALRTGWYTSVITIELSNIKENKCNGTDAKVKLIKQELDKYKNAVTELQLLMQSTPAANSRARRELPRFMNYTLNNTKNTNVTLSKKRKRRFLGFLLGVGSAIASGIAVSKVLHLEGEVNKIKSALLSTNKAVVSLSNGVSVLTSKVLDLKNYIDKQLLPIVNKQSCSISNIETVIEFQQKNNRLLEITREFSVNAGVTTPVSTYMLTNSELLSLINDMPITNDQKKLMSSNVQIVRQQSYSIMSIIKEEVLAYVVQLPLYGVIDTPCWKLHTSPLCTTNTKEGSNICLTRTDRGWYCDNAGSVSFFPQAETCKVQSNRVFCDTMNSLTLPSEVNLCNIDIFNPKYDCKIMTSKTDVSSSVITSLGAIVSCYGKTKCTASNKNRGIIKTFSNGCDYVSNKGVDTVSVGNTLYYVNKQEGKSLYVKGEPIINFYDPLVFPSDEFDASISQVNEKINQSLAFIRKSDELLHNVNAGKSTTNIMITTIIIVIIVILLALIAVGLLLYCKAR

SEQ ID NO: 9192 - protein, 553 aa, Artificial Sequence
  derived and/or modified protein sequence (wt) from HRSV__BBC54564.1__F-del
MELPILKTNAITTILAAVTLCFASSQNITEEFYQSTCSAVSKGYLSALRTGWYTSVITIELSNIKENKCNGTDAKVKLIKQELDKYKNAVTELQLLMQSTPAANSRARRELPRFMNYTLNNTKNTNVTLSKKRKRRFLGFLLGVGSAIASGIAVSKVLHLEGEVNKIKSALLSTNKAVVSLSNGVSVLTSKVLDLKNYIDKQLLPIVNKQSCSISNIETVIEFQQKNNRLLEITREFSVNAGVTTPVSTYMLTNSELLSLINDMPITNDQKKLMSSNVQIVRQQSYSIMSIIKEEVLAYVVQLPLYGVIDTPCWKLHTSPLCTTNTKEGSNICLTRTDRGWYCDNAGSVSFFPQAETCKVQSIRVFCDTMNSLTLPSEVNLCNIDIFNPKYDCKIMTSKTDVSSSVITSLGAIVSCYGKTKCTASNKNRGIIKTFSNGCDYVSNKGVDTVSVGNTLYYVNKQEGKSLYVKGEPIINFYDPLVFPSDEFDASISQVNEKINQSLAFIRKSDELLHNVNAGKSTTNIMITTIIIVIIVILLALIAVGLLLYCKAR

SEQ ID NO: 9193 - protein, 553 aa, Artificial Sequence
  derived and/or modified protein sequence (wt) from HRSV__BBC54581.1__F-del
MELPIFKTNAITTILAAVTLCFASSQNITEEFYQSTCSAVSKGYLSALRTGWYTSVITIELSNIKENKCNGTDAKVKLIKQELDKYKNAVTELQLLMQSTPAANSRARRELPRFMNYTLNNTKNTSVTLSKKRKRRFLGFLLGVGSAIASGIAVSKVLHLEGEVNKIKSALLSTNKAVVSLSNGVSVLTSKVLDLKNYIDKQLLPIVNKQSCSISNIETVIEFQQKNNRLLEITREFSVNAGVTTPVSTYMLTNSELLSLINDMPITNDQKKLMSSNVQIVRQQSYSIMSIIKEEVLAYVVQLPLYGVIDTPCWKLHTSPLCTTNTKEGSNICLTRTDRGWYCDNAGSVSFFPQAETCKVQSNRVFCDTMNSLTLPSEVNLCNIDIFNPKYDCKIMTSKTDVSSSVITSLGAIVSCYGKTKCTASNKNRGIIKTFSNGCDYVSNKGVDTVSVGNTLYYVNKQEGKSLYVKGEPIINFYDPLVFPSDEFDASISQVNEKINQSLAFIRKSDELLHNVNAGKSTTNIMITTIIIVIIVILLALIAVGLLLYCKAR

SEQ ID NO: 9194 - protein, 553 aa, Artificial Sequence
  derived and/or modified protein sequence (wt) from HRSV__BBC54571.1__F-del
MELPILKTNAITTILAAVTLCFASSQNITEEFYQSTCSAVSKGYLSALRTGWYTSVITIELSNIKENKCNGTDAKVKLIKQELDKYKNAVTELQLLMQSTPAANSRARRELPRLMNYTLKNTKNTNVTLSKKRKRRFLGFLLGVGSAIASGIAVSKVLHLEGEVNKIKSALLSTNKAVVSLSNGVSVLTSKVLDLKNYIDKQLLPIVNKQSCSISNIETVIEFQQKNNRLLEITREFSVNAGVTTPVSTYMLTNSELLSLINDMPITNDQKKLMSSNVQIVRQQSYSIMSIIKEEVLAYVVQLPLYGVIDTPCWKLHTSPLCTTNTKEGSNICLTRTDRGWYCDNAGSVSFFPQAETCKVQSNRVFCDTMNSLTLPSEVNLCNIDIFNPKYDCKIMTSKTDVSSSVITSLGAIVSCYGKTKCTASNKNRGIIKTFSNGCDYVSNKGVDTVSVGNTLYYVNKQEGKSLYVKGEPIINFYDPLVFPSDEFDASISQVNEKINQSLAFIRKSDELLHNVNAGKSTTNIMITTIIIVIIVILLALIAVGLLLYCKAR

SEQ ID NO: 9195 - protein, 553 aa, Artificial Sequence
  derived and/or modified protein sequence (wt) from HRSV__BBC54553.1__F-del
MELLILKTNAITTILAAVTLCFASSQNITEEFYQSTCSAVSKGYLSALRTGWYTSVITIELSNIKENKCNGTDAKVKLIKQELDKYKNAVTELQLLMQSTPAANSRARRELPRFMNYTLNNTKNTNVTLSKKRKRRFLGFLLGVGSAIASGIAVSKVLHLEGEVNKIKSALLSTNKAVVSLSNGVSVLTSKVLDLKNYIDKQLLPIVNKQSCSISNIETVIEFQQKNNRLLEITREFSVNAGVTTPVSTYMLTNSELLSLINDMPITNDQKKLMSSNVQIVRQQSYSIMSIIKEEVLAYVVQLPLYGVIDTPCWKLHTSPLCTTNTKEGSNICLTRTDRGWYCDNAGSVSFFPQAETCKVQSNRVFCDTMNSLTLPSEVNLCNIDIFNPKYDCKIMTSKTDVSSSVITSLGAIVSCYGKTKCTASNKNRGIIKTFSNGCDYVSNKGVDTVSVGNTLYYVNKQEGKSLYVKGEPIINFYDPLVFPSDEFDASISQVNEKINQSLAFIRKSDELLHNVNAGKSTTNIMITTIIIVIIIILLALIAVGLLLYCKAR

SEQ ID NO: 9196 - protein, 553 aa, Artificial Sequence
  derived and/or modified protein sequence (wt) from HRSV__BBC54565.1__F-del
MELPILKTNAITTILAAVTLCFASSQNITEEFYQSTCSAVSKGYLSALRTGWYTSVITIELSNIKENKCNGTDAKVKLIKQELDKYKNAVTELQMLMQSTPAANSRARRELPRFMNYTLNNTKNTNVTLSKKRKRRFLGFLLGVGSAIASGIAVSKVLHLEGEVNKIKSALLSTNKAAVSLSNGVSVLTSKVLDLKNYIDKQLLPIVNKQSCSISNIETVIEFQQKNNRLLEITREFSVNAGVTTPVSTYMLTNSELLSLINDMPITNDQKKLMSSNVQIVRQQSYSIMSIIKEEVLAYVVQLPLYGVIDTPCWKLHTSPLCTTNTKEGSNICLTRTDRGWYCDNAGSVSFFPQAETCKVQSNRVFCDTMNSLTLPSEVNLCNIDIFNPKYDCKIMTSKTDVSSSVITSLGAIVSCYGKTKCTASNKNRGIIKTFSNGCDYVSNKGVDTVSVGNTLYYVNKQEGKSLYVKGEPIINFYDPLVFPSDEFDASISQVNEKINQSLAFIRKSDELLHNVNAGKSTTNIMITTIIIVIIVILLALIAVGLLLYCKAR

SEQ ID NO: 9197 - protein, 553 aa, Artificial Sequence
  derived and/or modified protein sequence (wt) from HRSV__BBC54245.1__F-del
MELPILKTNAITTILAAVTLCFASSQNITEEFYQSTCSAVSKGYLSALRTGWYTSVITIELSNIKENKCNGTDAKVKLIKQELDKYKNAVTELQLLMQSTPAANSRARRELPRFMNYTLNNTKNTNVTLSKKRKRRFLGFLLGVGSAIASGIAVSKVLHLEGEVNKIKSALLSTNKAVVSLSNGVSVLTSKVLDLKNYIDKQLLPIVNKQSCSISNIETVIEFQQKNNRLLEITREFSVNAGVTTPVSTYMLTNSELLSLINDMPITNDQKKLMSSNVQIVRQQSYSIMSIIKEEVLAYVVQLQLYGVIDTPCWKLHTSPLCTTNTKEGSNICLTRTDRGWYCDNAGSVSFFPQAETCKVQSNRVFCDTMNSLTLPSEVNLCNIDIFNPKYDCKIMTSKTDVSSSVITSLGAIVSCYGKTKCTASNKNRGIIKTFSNGCDYVSNKGVDTVSVGNTLYYVNKQEGKSLYVKGEPIINFYDPLVFPSDEFDASISQVNEKINQSLAFIRKSDELLHNVNAGKSTTNIIQPTIIIVIIVILLALIAVGLLLYCKAR

SEQ ID NO: 9198 - protein, 553 aa, Artificial Sequence
  derived and/or modified protein sequence (wt) from HRSV__BBC54243.1__F-del
MELPILKTNAITTILAAVTLCFASGQNITEEFYQSTCSAVSKGYLSALRTGWYTSVITIELSNIKENKCNGTDAKVKLIKQELDKYKNAVTELQLLMQSTPAASSRARRELPRFMNYTLNNTKNTNVTLSKKRKRRFLGFLLGVGSAIASGIAVSKVLHLEGEVNKIKSALLSTNKAVVSLSNGVSVLTSKVLDLKNYIDKQLLPIVNKQSCSISNIETVIEFQQKNNRLLEITREFSVNAGVTTPVSTYMLTNSELLSLINDMPITNDQKKLMSSNVQIVRQQSYSIMSIIKEEVLAYVVQLPLYGVIDTPCWKLHTSPLCTTNTKEGSNICLTRTDRGWYCDNAGSVSFFPQAETCKVQSNRVFCDTMNSLTLPSEVNLCNIDIFNPKYDCKIMTSKTDVSSSVITSLGAIVSCYGKTKCTASNKNRGIIKTFSNGCDYVSNKGVDTVSVGNTLYYVNKQEGKSLYVKGEPIINFYDPLVFPSDEFDASISQVNEKINQSLAFIRKSDELLHNVNAGKSTTNIMITTIIIVIIVILLALIAVGLLLYCKAR

SEQ ID NO: 9199 - protein, 553 aa, Artificial Sequence
  derived and/or modified protein sequence (wt) from HRSV__BBC54238.1__F-del
MELPILKTNAITTILAAVTLCFASSQNITEEFYQSTCSAVSKGYLSALRTGWYTSVITIELSNIKENKCNGTDAKVKLIKQELDKYKNAVTELQLLMQSTPAANSRARRELPRFMNYTLNNTKNTNVTLSKKRKRRFLGFLLGVGSAIASGIAVSKVLHLEGEVNKIKSALLSTNKAVVSLSNGVSVLTSKVLDLKNYIDKQLLPIVNKQSCSISNIETVIEFQQKNNRLLEITREFSVNAGVTTPVSTYMLTNSELLSLINDMPITNDQKKLMSSNVQIVRQQSYSIMSIIKKEVLAYVVQLPLYGVIDTPCWKLHTSPLCTTNTKEGSNICLTRTDRGWYCDNAGSVSFFPQAETCKVQSNRVFCDTMNSLTLPSEVNLCNIDIFNPKYDCKIMTSKTDVSSSVITSLGAIVSCYGKTKCTASNKNRGIIKTFSNGCDYVSNKGVDTVSVGNTLYYVNKQEGKSLYVKGEPIINFYDPLVFPSDEFDASISQVNEKINQSLAFIRKSDELLHNVNAGKSTTNIMITTIIIVIIVILLALIAVGLLLYCKAR

SEQ ID NO: 9200 - protein, 553 aa, Artificial Sequence
  derived and/or modified protein sequence (wt) from HRSV__BBC54242.1__F-del
MELPILKTNAITTILAAVTLCFASSQNITEEFYQSTCSAVSKGYLSALRTGWYTSVITIELSNIKENKCNGTDAKVKLIKQELDKYKNAVTELQLLMQSTPAANSRARRELPRFMNYTLNNTKNTNVTLSKKRKRRFLGFLLGVGSAIASGIAVSKVLHLEGEVNKIKSALLSTNKAVVSLSNGVSVLTSKVLDLKNYIDKQLLPIVNKQSCSISNIETVIEFQQKNNRLLEITREFSVNAGVTTPVSTYMLTNSELLSLINDMPITNDQKKLMSSNVQIVRQQSYSIMSIIKEEVLAYVVQLPLYGVIDTPCWKLHTSPLCTTNTKEGSNICLTRTDRGWYCDNAGSVSFFPQAETCKVQSNRVFCDTMNSLTLPSEVNLCNIDIFNPKYDCKIMTSKTDVSSSVITSLGAIVSCYGKTKCTASNKNRGIIKTFSNGCDYVSNKGVDTVSVGNTLYYVNKQEGKSLYVKGEPIINFYDPLVFPSDEFDASISQINEKINQSLAFIRKSDELLHNVNAGKSTTNIMITTIIIVIIVILLALIAVGLLLYCKAR

SEQ ID NO: 9201 - protein, 553 aa, Artificial Sequence
  derived and/or modified protein sequence (wt) from HRSV__BBC54239.1__F-del
MELPILKTNAITTILAAVTLCFASSQNITEEFYQSTCSAVSKGYLSALRTGWYTSVITIELSNIKENKCNGTDAKVKLIKQELDKYKNAVTELQLLMQSTPAANSRARRELPRFMNYTLNNTKNTNVTLSKKRKRRFLGFLLGVGSAIASGIAVSKVLHLEGEVNKIKSALLSTNKAVVSLSNGVSVLTSKVLDLKNYIDKQLLPIVNKQSCSISNIETVIEYQQKNNRLLEITREFSVNAGVTTPVSTYMLTNSELLSLINDMPITNDQKKLMSSNVQIVRQQSYSIMSIIKEEVLAYVVQLPLYGVIDTPCWKLHTSPLCTTNTKEGSNICLTRTDRGWYCDNAGSVSFFPQAETCKVQSNRVFCDTMNSLTLPSEVNLCNIDIFNPKYDCKIMTSKTDVSSSVITSLGAIVSCYGKTKCTASNKNRGIIKTFSNGCDYVSNKGVDTVSVGNTLYYVNKQEGKSLYVKGEPIINFYDPLVFPSDEFDASISQVNEKINQSLAFIRKSDELLHNVNAGKSTTNIMITTIIIVIIVILLALIAVGLLLYCKAR

SEQ ID NO: 9202 - protein, 553 aa, Artificial Sequence
  derived and/or modified protein sequence (wt) from HRSV__BBC54235.1__F-del
MELPILKTNAITTILAAVTLCFASSQNITEEFYQSTCSAVSKGYLSALRTGWYTSVITIELSNIKENKCNGTDAKVKLIKQELDKYKNAVTELQLLMQSTPVANSRARRELPRFMNYTLNDTKNTNVTLSKKRKRRFLGFLLGVGSAIASGIAVSKVLHLEGEVNKIKSALLSTNKAVVSLSNGVSVLTSKVLDLKNYIDKQLLPIVNKQSCSISNIETVIEFQQKNNRLLEITREFSVNAGVTTPVSTYMLTNSELLSLINDMPITNDQKKLMSSNVQIVRQQSYSIMSIIKEEVLAYVVQLPLYGVIDTPCWKLHTSPLCTTNTKEGSNICLTRTDRGWYCDNAGSVSFFPQAETCKVQSNRVFCDTMNSLTLPSEVNLCNIDIFNPKYDCKIMTSKTDVSSSVITSLGAIVSCYGKTKCTASNKNRGIIKTFSNGCDYVSNKGVDTVSVGNTLYYVNKQEGKSLYVKGEPIINFYDPLVFPSDEFDASISQVNEKINQSLAFIRKSDELLHNVNAGKSTTNIMITTIIIVIIVILLALIAVGLLLYCKAR

SEQ ID NO: 9203 - protein, 553 aa, Artificial Sequence
  derived and/or modified protein sequence (wt) from HRSV__BBC54234.1__F-del
MELPILKTNAITTILAAVTFCFAFSQNITEEFYQSTCSAVSKGYLSALRTGWYTSVITIELSNIKENKCNGTDAKVKLIKQDLDKYKNAVTELQLLMQSTPAANNRARRELPRFMNYTLNNTKNTNVTLSKKRKRRFLGFLLGVGSAIASGIAVSKVLHLEGEVNKIKSALLSTNKAVVSLSNGVSVLTSKVLDLKNYIDKQLLPIVNKQSCSISNIETVIEFQQKNNRLLEITREFSVNAGVTTPVSTYMLTNSELLSLINDMPITNDQKKLMSSNVQIVRQQSYSIMSIIKEEVLAYVVQLPLYGVIDTPCWKLHTSPLCTTNTKEGSNICLTRTDRGWYCDNAGSVSFFPQAETCKVQSNRVFCDTMNSLTLPSEVNLCNIDIFNPKYDCKIMTSKTDVSSSVITSLGAIVSCYGKTKCTASNKNRGIIKTFSNGCDYVSNKGVDTVSVGNTLYYVNKQEGKSLYVKGEPIINFYDPLVFPSDEFDASISQVNEKINQSLAFIRKSDELLHNVNAGKSTTNIMITTIIIVIIVILLALIAVGLLLYCKAR

SEQ ID NO: 9204 - protein, 553 aa, Artificial Sequence
  derived and/or modified protein sequence (wt) from HRSV__BBC54236.1__F-del
MDLPILKTNAITTIFAAVTLCFASSQNITEEFYQSTCSAVSKGYLSALRTGWYTSVITIELSNIKENKCNGTDAKVKLIKQELDKYKNAVTELQLLMQSTPAANSRARRELPRFMNYTLNNTKNTNVTLSKKRKRRFLGFLLGVGSAIASGIAVSKVLHLEGEVNKIKSALLSTNKAVVSLSNGVSVLTSKVLDLKNYIDKQLLPIVNKQSCSISNIETVIEFQQKNNRLLEITREFSVNAGVTTPVSTYMLTNSELLSLINDMPITNDQKKLMSSNVQIVRQQSYSIMSIIKEEVLAYVVQLPLYGVIDTPCWKLHTSPLCTTNTKEGSNICLTRTDRGWYCDNAGSVSFFPQAETCKVQSNRVFCDTMNSLTLPSEVNLCNIDIFNPKYDCKIMTSKTDVSSSVITSLGAIVSCYGKTKCTASNKNRGIIKTFSNGCDYVSNKGVDTVSVGNTLYYVNKQEGKSLYVKGEPIINFYDPLVFPSDEFDASISQVNEKINQSLAFIRKSDELLHNVNVGKSTTNIMITTIIIVIIVILLALIAVGLLLYCKAR

SEQ ID NO: 9205 - protein, 553 aa, Artificial Sequence
  derived and/or modified protein sequence (wt) from HRSV__BBC54244.1__F-del
MELPILKTNAITTILAAVTLCFASSQNITEEFYQSTCSAVSKGYLSALRTGWYTSVITIELSNIKENKCNGTDAKVKLIKQELDKYKNAVTEVQLLMQSTPADNSRARKEQPRFIDYTLNNTKNTNVTLSKKRKRRFLGFLLGVGSAIASGIAVSKVMHLEGEVNKIKSALLSTNKAVVSLSNGVSVLTSKVLDLKNYIDKQLLPIVNKQSCSISNIETVIEFQQKNNRLLEITREFSVNAGVTTPVSTYMLTNSELLSLINDMPITNDQKKLMSSNVQIVRQQSYSIMSIIKEEVLAYVVQLPLYGVIDTPCWKLHTSPLCTTNTKEGSNICLTRTDRGWYCDNAGSVSFFPQAETCKVQSNRVFCDTMNSLTLPSEVNLCNIDIFNPKYDCKIMTSKTDVSSSVITSLGAIVSCYGKTKCTASNKNRGIIKTFSNGCDYVSNKGVDTVSVGNTLYYVNKQEGKSLYVKGEPIINFYDPLVFPSDEFDASISQVNEKINQSLAFIRKSDELLHNVNAGKSTTNIMITTIIIVIIVILLALIAVGLLLYCKAR

SEQ ID NO: 9206 - protein, 553 aa, Artificial Sequence
  derived and/or modified protein sequence (wt) from HRSV__BBC54186.1__F-del
MELPILKTNAITTILAAVTLCFASSQNITEEFYQSTCSAVSKGYLSALRTGWYTSVITIELSNIKENKCNGTDAKVKLIKQELDKYKNAVTELQLLMQSTPAANSRARRELPRFMNYTLNNTKNTNVTLSKKRKRRFLGFLLGVGSAIASGIAVSKVLHLEGEVNKIKSALLSTNKAVVSLSNGVSVLTSKVLDLKNYIDKQLLPIVNKQSCSISNIETVIEFQQKNNRLLEITREFSVNAGVTTPVSTYMLTNSELLSLINDMPITNDQKKLMSSNVQIVRQQSYSIMSIIREEVLAYVVQLPLYGVIDTPCWKLHTSPLCTTNTKEGSNICLTRTDRGWYCDNAGSVSFFPQAETCKVQSNRVFCDTMNSLTLPSEVNLCNIDIFNPKYDCKIMTSKTDVSSSVITSLGAIVSCYGKTKCTASNKNRGIIKTFSNGCDYVSNKGVDTVSVGNTLYYVNKQEGKSLYVKGEPIINFYDPLVFPSDEFDASISQVNEKINQSLAFIRKSDELLHNVNAGKSTTNIMITTIIIVIIVILLALIAVGLLLYCKAR

SEQ ID NO: 9207 - protein, 553 aa, Artificial Sequence
  derived and/or modified protein sequence (wt) from HRSV__BBC54178.1__F-del
MELPILKTNAITTILAAVTLCFASSQNITEEFYQSTCSAVSKGYLSALRTGWYTSVITIELSNIKENKCNGTDAKVKLIKQELDKYKNAVTELQLLMQSTPAANSRARRELPRFMNYTLNNTKDTNVTLSKKRKRRFLGFLLGVGSAIASGIAVSKVLHLEGEVNKIKSALLSTNKAVVSLSNGVSVLTSKVLDLKNYIDKQLLPIVNKQSCSISNIETVIEFQQKNNRLLEITREFSVNAGVTTPVSTYMLTNSELLSLINDMPITNDQKKLMSSNVQIVRQQSYSIMSIIKEEVLAYVVQLPLYGVIDTPCWKLHTSPLCTTNTKEGSNICLTRTDRGWYCDNAGSVSFFPQAETCKVQSNRVFCDTMNSLTLPSEVNLCNIDIFNPKYDCKIMTSKTDVSSSVITSLGAIVSCYGKTKCTASNKNRGIIKTFSNGCDYVSNKGVDTVSVGNTLYYVNKQEGKSLYVKGEPIINFYDPLVFPSDEFDASISQVNEKINQSLAFIRKSDELLHNVNAGKSTTNIMITTIIIVIIVILLALIAVGLLLYCKAR

SEQ ID NO: 9208 - protein, 553 aa, Artificial Sequence
  derived and/or modified protein sequence (wt) from HRSV__BBC54202.1__F-del
MELPILKTNAITTILAAVTLCFASSQNITEEFYQSTCSAVSKGYLSALRTGWYTSVITIELSNIKENKCNGTDAKVKLIKQELDKYKNAVTELQLLMQSTPAANSRARRELPRFMNYTLNNTKNTNVTLSKKRKRRFLGFLLGVGSAIASGIAVSKVLHLEGEVNKIKSALLSTNKAVVSLSNGVSVLTSKVLDLKNYIDKQLLPIVNKQSCSISNIETVIEFQQKNNRLLEITREFSVNAGVTTPVSTYMLTNSELLSLINDMPITNDQKKLMSSNVQIVRQQSYSIMSIIKEEVLAYVVQLPLYGVIDTPCWKLHTSPLCTTNTKEGSNICLTRTDRGWYCDNAGSVSFFPQAETCKVQSNRVFCDTMNSLTLPSEVNLCNIDIFNPKYDCKIMTSKTDVSSSVITSLGAIVSCYGKTKCTASNKNRGIIKTFSNGCDYVSNKGVDTVSVGNTLHYVNKQEGKSLYVKGEPIINFYDPLVFPSDEFDASISQVNEKINQSLAFIRKSDELLHNVNAGKSTTNIMITTIIIVIIVILLALIAVGLLLYCKAR

SEQ ID NO: 9209 - protein, 553 aa, Artificial Sequence
  derived and/or modified protein sequence (wt) from HRSV__BBC54151.1__F-del
MDLPILKTNAITTILAAVTLCFASSQNITEEFYQSTCSAVSKGYLSALRTGWYTSVITIELSNIKENKCNGTDAKVKLIKQELDKYKNAVTELQLLMQSTPASNNRARRELPRFMNYTLNNTKNTNVTLSKKRKRRFLGFLLGVGSAIASGIAVSKVLHLEGEVNKIKSALLSTNKAVVSLSNGVSVLTSKVLDLKNYIDKQLLPVVNKQSCSISNIETVIEFQQKNNRLLEITREFSVNAGVTTPVSTYMLTNSELLSLINDMPITNDQKKLMSNNVQIVRQQSYSIMSIIKEEVLAYVVQLPLYGVIDTPCWKLHTSPLCTTNTKEGSNICLTRTDRGWYCDNAGSVSFFPQAETCKVQSNRVFCDTMNSLTLPSEVNLCNIDIFNPKYDCKIMTSKTDVSSSVITSLGAIVSCYGKTKCTASNKNRGIIKTFSNGCDYVSNKGVDTVSVGNTLYYVNKQEGKSLYVKGEPIINFYDPLVFPSDEFDASISQVNEKINQSLAFIRKSDELLHNVNAGKSTTNIMITTIIIVIVVILLSLIAVGLLLYCKAR

SEQ ID NO: 9210 - protein, 553 aa, Artificial Sequence
  derived and/or modified protein sequence (wt) from HRSV__BBC54142.1__F-del
MELPILKTNAITTILAAITLCFASSQNITEEFFQSTCSAVSKGYLSALRTGWYTSVITIELSNIKENKCNGTDAKVKLIKQELDKYKNAVTELQLLMQSTPAANSRARRELPRFMNYTLNNTKNTNVTLSKKRKRRFLGFLLGVGSAIASGIAVSKVLHLEGEVNKIKSALLSTNKAVVSLSNGVSVLTSKVLDLKNYIDKQLLPIVNKQSCSISNIETVIEFQQKNNRLLEITREFSVNAGVTTPVSTYMLTNSELLSLINDMPITNDQKKLMSNNVQIVRQQSYSIMSIIKEEVLAYVVQLPLYGVIDTPCWKLHTSPLCTTNTKEGSNICLTRTDRGWYCDNAGSVSFFPQAETCKVQSNRVFCDTMNSLTLPSEVNLCNIDIFNPKYDCKIMTSKTDVSSSVITSLGAIVSCYGKTKCTASNKNRGIIKTFSNGCDYVSNKGVDTVSVGNTLYYVNKQEGKSLYVKGEPIINFYDPLVFPSDEFDASISQVNEKINQSLAFIRKSDELLHNVNAGKSTTNIMITTIIIVIIVILLSLIAVGLLLYCKAR

SEQ ID NO: 9211 - protein, 553 aa, Artificial Sequence
  derived and/or modified protein sequence (wt) from HRSV__BBC54134.1__F-del
MDLPILKTNAITTILAAVTLCFTSSQNITEEFYQSTCSAVSKGYLSALRTGWYTSVITIELSNIKENKCNGTDAKVKLIKQELDKYKNAVTELQLLMQSTPASNNRARRELPRFMNYTLNNTKNTNVTLSKKRKRRFLGFLLGVGSAIASGIAVSKVLHLEGEVNKIKSALLSTNKAVVSLSNGVSVLTSKVLDLKNYIDKQLLPIVNKQSCSISNIETVIEFQQKNNRLLEITREFSVNAGVTTPVSTYMLTNSELLSLINDMPITNDQKKLMSNNVQIVRQQSYSIMSIIKEEVLAYVVQLPLYGVIDTPCWKLHTSPLCTTNTKEGSNICLTRTDRGWYCDNAGSVSFFPQAETCKVQSNRVFCDTMNSLTLPSEVNLCNIDIFNPKYDCKIMTSKTDVSSSVITSLGAIVSCYGKTKCTASNKNRGIIKTFSNGCDYVSNKGVDTVSVGNTLYYVNKQEGKSLYVKGEPIINFYDPLVFPSDEFDASISQVNEKINQSLAFIRKSDELLHNVNAGKSTTNIMITTIIIVIVVILLSLIAVGLLLYCKAR

SEQ ID NO: 9212 - protein, 553 aa, Artificial Sequence
  derived and/or modified protein sequence (wt) from HRSV__BBC54170.1__F-del
MELPILKTNAITTIFAAVTLCFASSQNITEEFYQSTCSAVSKGYLSALRTGWYTSVITIELSNIKENKCNGTDAKVKLIKQELDKYKNAVTELQLLMQSTPAANSRARRELPRFMNYTLNNTKNTNVTLSKKRKRRFLGFLLGVGSAIASGIAVSKVLHLEGEVNKIKSALLSTNKAVVSLSNGVSVLTSKVLDLKNYIDKQLLPIVNKQSCSISNIETVIEFQQKNNRLLEITREFSVNAGVTTPVSTYMLTNSELLSLINDMPITNDQKKLMSSNVQIVRQQSYSIMSIIKEEVLAYVVQLPLYGVIDTPCWKLHTSPLCTTNTKEGSNICLTRTDRGWYCDNAGSVSFFPQAETCKVQSNRVFCDTMNSLTLPSEVNLCNIDIFNPKYDCKIMTSKTDVSSSVITSLGAIVSCYGKTKCTASNKNRGIIKTFSNGCDYVSNKGVDTVSVGNTLYYVNKQEGKSLYVKGEPIINFYDPLVFPSDEFDASISQVNEKINQSLAFIRKSDELLHNVNVGKSTTNIMITTIIIVIIVILLALIAVGLLLYCKAR

SEQ ID NO: 9213 - protein, 553 aa, Artificial Sequence
  derived and/or modified protein sequence (wt) from HRSV__BBC54210.1__F-del
MELPILKTNAITTILAAVTLCFASSQNITEEFYQSTCSAVSKGYLSALRTGWYTSVITIELSNIKENKCNGTDAKVKLIKQELDKYKNAVTELQLLMQSTPVANSRARRELPRFMNYTLNNTKNTNVTLSKKRKRRFLGFLLGVGSAIASGIAVSKVLHLEGEVNKIKSALLSTNKAVVSLSNGVSVLTSKVLDLKNYIDKQLLPIVNKQSCSISNIETVIEFQQKNNRLLEITREFSVNAGVTTPVSTYMLTNSELLSLINDMPITNDQKKLMSSNVQIVRQQSYSIMSIIKEEVLAYVVQLPLYGVIDTPCWKLHTSPLCTTNTKEGSNICLTRTDRGWYCDNAGSVSFFPQAETCKVQSNRVFCDTMNSLTLPSEVNLCNIDIFNPKYDCKIMTSKTDVSSSVITSLGAIVSCYGKTKCTASNKNRGIIKTFSNGCDYVSNKGVDTVSVGNTLYYVNKQEGKSLYVKGEPIINFYDPLVFPSDEFDASISQVNEKINQSLAFIRKSDELLHNVNAGKSTTNIMITTIIIVIIVILLALIAVGLLLYCKAR

SEQ ID NO: 9214 - protein, 553 aa, Artificial Sequence
  derived and/or modified protein sequence (wt) from HRSV__BBC54169.1__F-del
MELPILKTNAITTILAVVTLCFASSQNITEEFYQSTCSAVSKGYLSALRTGWYTSVITIELSNIKENKCNGTDAKVKLIKQELDKYKNAVTELQLLMQSTPAANSRARRELPRFMNYTLNNTKNTNVTLSKKRKRRFLGFLLGVGSAIASGIAVSKVLHLEGEVNKIKSALLSTNKAVVSLSNGVSVLTSKVLDLKNYIDKQLLPIVNKQSCSISNIETVIEFQQKNNRLLEITREFSVNAGVTTPVSTYMLTNSELLSLINDMPITNDQKKLMSSNVQIVRQQSYSIMSIIKEEVLAYVVQLPLYGVIDTPCWKLHTSPLCTTNTKEGSNICLTRTDRGWYCDNAGSVSFFPQAETCKVQSNRVFCDTMNSLTLPSEVNLCNIDIFNPKYDCKIMTSKTDVSSSVITSLGAIVSCYGKTKCTASNKNRGIIKTFSNGCDYVSNKGVDTVSVGNTLYYVNKQEGKSLYVKGEPIINFYDPLVFPSDEFDASISQVNEKINQSLAFIRKSDELLHNVNAGKSTTNIMITTIIIVIIVILLALIAVGLLLYCKAR

SEQ ID NO: 9215 - protein, 553 aa, Artificial Sequence
  derived and/or modified protein sequence (wt) from HRSV__BBC54213.1__F-del
MELPILKTNAITTILAAVTFCFAFSQNITEEFYQSTCSAVSKGYLSALRTGWYTSVITIELSNIKENKCNGTDAKVKLIKQELDKYKNAVTELQLLMQSTPAANNRARRELPRFMNYTLNNTKNTNVTLSKKRKRRFLGFLLGVGSAIASGIAVSKVLHLEGEVNKIKSALLSTNKAVVSLSNGVSVLTSKVLDLKNYIDKQLLPIVNKQSCSISNIETVIEFQQKNNRLLEITREFSVNAGVTTPVSTYMLTNSELLSLINDMPITNDQKKLMSSNVQIVRQQSYSIMSIIKEEVLAYVVQLPLYGVIDTPCWKLHTSPLCTTNTKEGSNICLTRTDRGWYCDNAGSVSFFPQAETCKVQSNRVFCDTMNSLTLPSEVNLCNIDIFNPKYDCKIMTSKTDVSSSVITSLGAIVSCYGKTKCTASNKNRGIIKTFSNGCDYVSNKGVDTVSVGNTLYYVNKQEGKSLYVKGEPIINFYDPLVFPSDEFDASISQVNEKINQSLAFIRKSDELLHNVNAGKSTTNIMITTIIIVIIVILLALIAVGLLLYCKAR

SEQ ID NO: 9216 - protein, 553 aa, Artificial Sequence
  derived and/or modified protein sequence (wt) from HRSV__BBC54203.1__F-del
MELPILKTNAITTILAAVTLCFASSQNITEEFYQSTCSAVSKGYLSALRTGWYTSVITIELSNIKENKCNGTDAKVKLIKQELDKYKNAVTELQLLMQSTPAANSRARRELPRFMNYTLNNTKNTNVTLSKKRKRRFLGFLLGVGSAIASGIAVSKVLHLEGEVNKIKSALLSTNKAVVSLSNGVSVLTSKVLDLKNYIDKQLLPIVNKQSCSISNIETVIEFQQKNNRLLEITREFSVNAGVTTPVSTYMLTNSELLSLINDMPITNDQKKLMSSNVQIVRQQSYSIMSIIKEEVLAYVVQLPLYGVIDTPCWKLHTSPLCTTNTKEGSNICLTRTDRGWYCDNAGSVSFFPLAETCKVQSNRVFCDTMNSLTLPSEVNLCNIDIFNPKYDCKIMTSKTDVSSSVITSLGAIVSCYGKTKCTASNKNRGIIKTFSNGCDYVSNKGVDTVSVGNTLYYVNKQEGKSLYVKGEPIINFYDPLVFPSDEFDASISQVNEKINQSLAFIRKSDELLHNVNAGKSTTNIMITTIIIVIIVILLALIAVGLLLYCKAR

SEQ ID NO: 9217 - protein, 553 aa, Artificial Sequence
  derived and/or modified protein sequence (wt) from HRSV__BBC54160.1__F-del
MELPILKTNAITTILAAVTLCFASSQNITEEFYQSTCSAVSKGYLSALRTGWYTSVITIELSNIKENKCNGTDAKVKLIKQELDKYKNAVTELQLLMQSTPAANSRARRELPRFMNYTLNNTKNTNVTLSKKRKRRFLGFLLGVGSAIASGIAVSKVLHLEGEVNKIKSALLSTNKAVVSLSNGVSVLTSKVLDLKNYIDKQLLPIVNKQSCSISNIETVIEFQQKNNRLLEITREFSVNAGVTTPVSTYMLTNSELLSLINDMPITNDQKKLMSSNVQIVRQQSYSIMSIIKEEVLAYVVQLPLYGVIDTPCWKLHTSPLCTTNTKEGSNICLTRTDRGWYCDNAGSVSFFPQAETCKVQSNRVFCDTMNSLTLPSEVNLCNIDIFNPKYDCKIMTSKTDVSSSVITSLGAIVSCYGKTKCTASNKNRGIIKTFSNGCDYVSNKGVDTVSVGNTLYYVNKQEGKSLYVKGEPIINFYDPLVFPSDEFDASISQVNEKINQSLAFIRKSDELLHNVNASKSTTNIMITTIIIVIIVILLALIAVGLLLYCKAR

SEQ ID NO: 9218 - protein, 553 aa, Artificial Sequence
  derived and/or modified protein sequence (wt) from HRSV__BBC54163.1__F-del
MELPILKTNAITTIFAAVTLCFASSQNITEEFYQSTCSAVSKGYLSALRTGWYTSVITIELSNIKENKCNGTDAKVKLIKQELDKYKNAVTELQLLMQSTPAANSRARRELPRFMNYTLNNTKNTNVTLSKKRKRRFLGFLLGVGSAIASGIAVSKVLHLEGEVNKIKSALLSTNKVVVSLSNGVSVLTSKVLDLKNYIDKQLLPIVNKQSCSISNIETVIEFQQKNNRLLEITREFSVNAGVTTPVSTYMLTNSELLSLINDMPITNDQKKLMSSNVQIVRQQSYSIMSIIKEEVLAYVVQLPLYGVIDTPCWKLHTSPLCTTNTKEGSNICLTRTDRGWYCDNAGSVSFFPQAETCKVQSNRVFCDTMNSLTLPSEVNLCNIDIFNPKYDCKIMTSKTDVSSSVITSLGAIVSCYGKTKCTASNKNRGIIKTFSNGCDYVSNKGVDTVSVGNTLYYVNKQEGKSLYVKGEPIINFYDPLVFPSDEFDASISQVNEKINQSLAFIRKSDELLHNVNVGKSTTNIMITTIIIVIIVILLALIAVGLLLYCKAR

SEQ ID NO: 9219 - protein, 553 aa, Artificial Sequence
  derived and/or modified protein sequence (wt) from HRSV__BBC54215.1__F-del
MELPILKTNAITTILAAVTFCFASSQNITEEFYQSTCSAVSKGYLSALRTGWYTSVITIELSNIKENKCNGTDAKVKLIKQELDKYKNAVTELQLLMQSTPAANSRARRELPRFMNYTLNNTKNTNVTLSKKRKRRFLGFLLGVGSAIASGIAVSKVLHLEGEVNKIKSALLSTNKAVVSLSNGVSVLTSKVLDLKNYIDKQLLPIVNKQSCSISNIETVIEFQQKNNRLLEITREFSVNAGVTTPVSTYMLTNSELLSLINDMPITNDQKKLMSSNVQIVRQQSYSIMSIIKEEVLAYVVQLPLYGVIDTPCWKLHTSPLCTTNTKEGSNICLTRTDRGWYCDNAGSVSFFPQAETCKVQSNRVFCDTMNSLTLPSEVNLCNIDIFNSKYDCKIMTSKTDVSSSVITSLGAIVSCYGKTKCTASNKNRGIIKTFSNGCDYVSNKGVDTVSVGNTLYYVNKQEGKSLYVKGEPIINFYDPLVFPSDEFDASISQVNEKINQSLAFIRKSDELLHNVNAGKSTTNIMITTIIIVIIVILLALIAIGLLLYCKAR

SEQ ID NO: 9220 - protein, 553 aa, Artificial Sequence
  derived and/or modified protein sequence (wt) from HRSV__BBC54156.1__F-del
MELPILKTNAITTILAAVTLCFASSQNITEEFYQSTCSAVSKGYLSALRTGWYTSVITIELSNIKENKCNGTDAKVKLIKQELDKYKNAVTELQLLMQSTPAANSRARRELPRFMNYTLNNTKNTNVTLSKKRKRRFLGFLLGVGSAIASGIAVSKVLHLEGEVNKIKSALLSTNKAVVSLSNGVSVLTSKVLDLKNYIDKQLLPIVNKQSCSISNIETVIEFQQKNNRLLEITREFSVNAGVTTPVSTYMLTNSELLSLINDMPVTNDQKKLMSSNVQIVRQQSYSIMSIIKEEVLAYVVQLPLYGVIDTPCWKLHTSPLCTTNTKEGSNICLTRTDRGWYCDNAGSVSFFPQAETCKVQSNRVFCDTMNSLTLPSEVNLCNIDIFNPKYDCKIMTSKTDVSSSVITSLGAIVSCYGKTKCTASNKNRGIIKTFSNGCDYVSNKGVDTVSVGNTLYYVNKQEGKSLYVKGEPIINFYDPLVFPSDEFDASISQVNEKINQSLAFIRKSDELLHNVNAGKSTTNIMITTIIIVIIVILLALIAVGLLLYCKAR

SEQ ID NO: 9221 - protein, 553 aa, Artificial Sequence
  derived and/or modified protein sequence (wt) from HRSV__BBC54179.1__F-del
MELPILKTNAITTILAAVTLCFASSQNITEEFYQSTCSAVSKGYLSALRTGWYTSVITIELSNIKENKCNGTDAKVKLIKQELDKYKNAVTELQLLMQSTPAANSRARRELPRFMNYTLNNTKNTNVTLSKKRKRRFLGFLLGVGSAIASGIAVSKVLHLEGEVNKIKSALLSTNKAVVSLSNGVSVLTSKVLDLKNYIDKQLLPIVNKQSCSISNIETVIEFQQKNNRLLEITREFSVNAGVTTPVSTYMLTNSELLSLINDMPITNDQKKLMSSNVQIVRQQSYSIMSIIKEEVLAYVVQLPLYGVIDTPCWKLHTSPLCTTNTKEGSNICLTRTDRGWYCDNAGSVSFFPQAETCKVQLNRVFCDTMNSLTLPSEVNLCNIDIFNPKYDCKIMTSKTDVSSSVITSLGAIVSCYGKTKCTASNKNRGIIKTFSNGCDYVSNKGVDTVSVGNTLYYVNKQEGKSLYVKGEPIINFYDPLVFPSDEFDASISQVNEKINQSLAFIRKSDELLHNVNAGKSTTNIMITTIIIVIIVILLALIAVGLLLYCKGR

SEQ ID NO: 9222 - protein, 553 aa, Artificial Sequence
  derived and/or modified protein sequence (wt) from HRSV__BBC54150.1__F-del
MDLPILKTNAITTIFAAVTLCFASSQNITEEFYQSTCSAVSKGYLSALRTGWYTSVITIELSNIKENKCNGTDAKVKLIKQELDKYKNAVTELQLLMQSTPASNNRARRELPRFMNYTLNNTKNTNVTLSKKRKRRFLGFLLGVGSAIASGIAVSKVLHLEGEVNKIKSALLSTNKAVVSLSNGVSVLTSKVLDLKNYIDKQLLPIVNKQSCSISNIETVIEFQQKNNRLLEITREFSVNAGVTTPVSTYMLTNSELLSLINDMPITNDQKKLMSNNVQIVRQQSYSIMSIIKEEVLAYVVQLPLYGVIDTPCWKLHTSPLCTTNTKEGSNICLTRTDRGWYCDNAGSVSFFPQAETCKVQSNRVFCDTMNSLTLPSEVNLCNIDIFNPKYDCKIMTSKTDVSSSVITSLGAIVSCYGKTKCTASNKNRGIIKTFSNGCDYVSNKGVDTVSVGNTLYYVNKQEGKSLYVKGEPIINFYDPLVFPSDEFDASISQVNEKINQSLAFIRKSDELLHNVNAGKSTTNIMITTIIIVIVVILLSLIAVGLLLYCKAR

SEQ ID NO: 9223 - protein, 553 aa, Artificial Sequence
  derived and/or modified protein sequence (wt) from HRSV__BBC54207.1__F-del
MELPILKTNAITTILAAVTLCFASSQNITEEFYQSTCSAVSKGYLSALRTGWYTSVITIELSNIKENKCNGTDAKVKLIKQELDKYKNAVTELQLLMQSTPAANNRARRELPRFMNYTLDNTKNTNVTLSKKRKRRFLGFLLGVGSAIASGIAVSKVLHLEGEVNKIKSALLSTNKAVVSLSNGVSVLTSKVLDLKNYIDKQLLPIVNKQSCSISNIETVIEFQQKNNRLLEITREFSVNAGVTTPVSTYMLTNSELLSLINDMPITNDQKKLMSSNVQIVRQQSYSIMSIIKEEVLAYVVQLPLYGVIDTPCWKLHTSPLCTTNTKEGSNICLTRTDRGWYCDNAGSVSFFPQAETCKVQSNRVFCDTMNSLTLPSEVNLCNIDIFNPKYDCKIMTSKTDVSSSVITSLGAIVSCYGKTKCTASNKNRGIIKTFSNGCDYVSNKGVDTVSVGNTLYYVNKQEGKSLYVKGEPIINFYDPLVFPSDEFDASISQVNEKINQSLAFIRKSDELLHNVNAGKSTTNIMITTIIIVIIVILLALIAVGLLLYCKAR

SEQ ID NO: 9224 - protein, 553 aa, Artificial Sequence
  derived and/or modified protein sequence (wt) from HRSV__BBC54194.1__F-del
MELPILKTNAITTILAAVTLCFASSQNITEEFYQSTCSAVSKGYLSALRTGWYTSVITIELSNIKENKCNGTDAKVKLIKQELDKYKNAVTELQLLMQSTPAANSRARRELPRFMYYTLNNTKNTNVTLSKKRKRRFLGFLLGVGSAIASGIAVSKVLHLEGEVNKIKSALLSTNKAVVSLSNGVSVLTSKVLDLKNYIDKQLLPIVNKQSCSISNIETVIEFQQKNNRLLEITREFSVNAGVTTPVSTYMLTNSELLSLINDMPITNDQKKLMSSNVQIVRQQSYSIMSIIKEEVLAYVVQLPLYGVIDTPCWKLHTSPLCTTNTKEGSNICLTRTDRGWYCDNAGSVSFFPQAETCKVQSNRVFCDTMNSLTLPSEVNLCNIDIFNPKYDCKIMTSKTDVSSSVITSLGAIVSCYGKTKCTASNKNRGIIKTFSNGCDYVSNKGVDTVSVGNTLYYVNKQEGKSLYVKGEPIINFYDPLVFPSDEFDASISQVNEKINQSLAFIRKSDELLHNVNAGKSTTNIMITTIIIVIIVILLALIAVGLLLYCKAR

SEQ ID NO: 9225 - protein, 553 aa, Artificial Sequence
  derived and/or modified protein sequence (wt) from HRSV__BBC54149.1__F-del
MELPILKTNAITTILAAVTLCFASSQNITEEFYQSTCSAVSKGYLSALRTGWYTSVITIELSNIKENKCNGTDAKVKLIKQELDKYKNAVTELQLLMQSTPAANSRARRELPRFMNYTLNNTKNTNVTLSKKRKRRFLGFLLGVGSAIASGIAVSKVLHLEGEVNKIKSALLSTNKAVVSLSNGVSVLTSKVLDLKNYIDKQLLPIVNKQSCSISNIETVIEFQQKNNRLLEITREFSVNAGVTTPVSTYMLTNSELLSLINDMPITNDQKKLMSSNVQIVRQQSYSIMSIIKEEVLAYVVQLPLYGVIDTPCWKLHTSPLCTTNTKEGSNICLTRTDRGWYCDNAGSVSFFPQAETCKVQSNRVFCDTMNSLTLPSEVNLCNIDIFNHKYDCKIMTSKTDVSSSVITSLGAIVSCYGKTKCTASNKNRGIIKTFSNGCDYVSNKGVDTVSVGNTLYYVNKQEGKSLYVKGEPIINFYDPLVFPSDEFDASISQVNEKINQSLAFIRKSDELLHNVNAGKSTTNIMITTIIIVIIVILLALIAVGLLLYCKAR

SEQ ID NO: 9226 - protein, 553 aa, Artificial Sequence
  derived and/or modified protein sequence (wt) from HRSV__BBC54138.1__F-del
MDLPILKTNAITTILAAVTLCFASSQNITEEFYQSTCSAISKGYLSALRTGWYTSVITIELSNIKENKCNGTDAKVKLIKQELDKYKNAVTELQLLMQSTPASNNRARRELPRFMNYTLNNTKNTNVTLSKKRKRRFLGFLLGVGSAIASGIAVSKVLHLEGEVNKIKSALLSTNKAVVSLSNGVSVLTSKVLDLKNYIDKQLLPIVNKQSCSISNIETVIEFQQKNNRLLEITREFSVNAGVTTPVSTYMLTNSELLSLINDMPITNDQKKLMSNNVQIVRQQSYSIMSIIKEEVLAYVVQLPLYGVIDTPCWKLHTSPLCTTNTKEGSNICLTRTDRGWYCDNAGSVSFFPQAETCKVQSNRVFCDTMNSLTLPSEVNLCNIDIFNPKYDCKIMTSKTDVSSSVITSLGAIVSCYGKTKCTASNKNRGIIKTFSNGCDYVSNKGVDTVSVGNTLYYVNKQEGKSLYVKGEPIINFYDPLVFPSDEFDASISQVNEKINQSLAFIRKSDELLHNVNAGKSTTNIMITTIIIVIVVILLSLIAVGLLLYCKAR

SEQ ID NO: 9227 - protein, 553 aa, Artificial Sequence
  derived and/or modified protein sequence (wt) from HRSV__BBC54199.1__F-del
MELPILKTNAITTIFAAVTLCFASSQNITEEFYQSTCSAVSKGYLSALRTGWYTSVITIELSNIKENKCNGTDAKVKLIKQELDKYKNAVTELQLLMQSTPAANSRARRELPRFMNYTLNNTKNTNVTLSKKRKRRFLGFLLGVGSATASGIAVSKVLHLEGEVNKIKSALLSTNKAVVSLSNGVSVLTSKVLDLKNYIDKQLLPIVNKQSCSISNIETVIEFQQKNNRLLEITREFSVNAGVTTPVSTYMLTNSELLSLINDMPITNDQKKLMSSNVQIVRQQSYSIMSIIKEEVLAYVVQLPLYGVIDTPCWKLHTSPLCTTNTKEGSNICLTRTDRGWYCDNAGSVSFFPQAETCKVQSNRVFCDTMNSLTLPSEVNLCNIDIFNPKYDCKIMTSKTDVSSSVITSLGAIVSCYGETKCTASNKNRGIIKTFSNGCDYVSNKGVDTVSVGNTLYYVNKQEGKSLYVKGEPIINFYDPLVFPSDEFDASISQVNEKINQSLAFIRKSDELLHNVNVGKSTTNIMITTIIIVIIVILLALIAVGLLLYCKAR

SEQ ID NO: 9228 - protein, 553 aa, Artificial Sequence
  derived and/or modified protein sequence (wt) from HRSV__BBC54220.1__F-del
MELPILKTNAITTIFAAVTLCFASSQNITEEFYQSTCSAVSKGYLSALRTGWYTSVITIELSNIKENKCNGTDAKVKLIKQELDKYKNAVTELQLLMQSTPAANSRARRELPRFMNYTLNNTKNTNVTLSKKRKRRFLGFLLGVGSAIASGIAVSKVLHLEGEVNKIKSALLSTNKAVVSLSNGVSVLTSKVLDLKNYIDKQLLPIVNKQSCSISNIETVIEFQQKNNRLLEITREFSVNAGVTTPVSTYMLTNSELLSLINDMPITNDQKKLMSSNVQIVRQQSYSIMSIIKEEVLAYVVQLPLYGVIDTPCWKLHTSPLCTTNTKEGSNICLTRTDRGWYCDNAGSVSFFPQAETCKVQSNRVFCDTMNSLTLPSEVNLCNIDIFNPKYDCKIMTSKTDVSSSVITSLGAIVSCYGKTKCTASNKNRGIIKTFSNGCDYVSNKGVDTVSVGNTLYYVNKQEGKSLYVKGEPIINFYDPLVFPSDEFDASISQVNEKINQSLAFIRKSDELLHNVNVGKSTTNVMITTIIIVIIVILLALIAVGLLLYCKAR

SEQ ID NO: 9229 - protein, 553 aa, Artificial Sequence
  derived and/or modified protein sequence (wt) from HRSV__BBC54181.1__F-del
MELPIIKTNAITTILAAVTLCFASSQNITEEFYQSTCSAVSKGYLSALRTGWYTSVITIELSNIKENKCNGTDAKVKLIKQELDKYKNAVTELQLLMQSTPAANSRARRELPRFMNYTLNNTKNTNVTLSKKRKRRFLGFLLGVGSAIASGIAVSKVLHLEGEVNKIKSALLSTNKAVVSLSNGVSVLTSKVLDLKNYIDKQLLPIVNKQSCSISNIETVIEFQQKNNRLLEITREFSVNAGVTTPVSTYMLTNSELLSLINDMPITNDQKKLMSSNVQIVRQQSYSIMSIIKEEVLAYVVQLPLYGVIDTPCWKLHTSPLCTTNTKEGSNICLTRTDRGWYCDNAGSVSFFPQAETCKVQSNRVFCDTMNSLTLPSEVNLCNIDIFNPKYDCKIMTSKTDVSSSVITSLGAIVSCYGKTKCTASNKNRGIIKTFSNGCDYVSNKGVDTVSVGNTLYYVNKQEGKSLYVKGEPIINFYDPLVFPSDEFDASISQVNEKINQSLAFIRKSDELLHNVNAGKSTTNIMITTIIIVIIVILLALIAVGLLLYCKAR

SEQ ID NO: 9230 - protein, 553 aa, Artificial Sequence
  derived and/or modified protein sequence (wt) from HRSV__BBC54132.1__F-del
MDLPILKTNAITTIFAAVTLCFASSQNITEEFYQSTCSAVSKGYLSALRTGWYTSVITIELSNIKENKCNGTDAKVKLIKQELDKYKNAVTELQLLMQSTPASNNRARRELPRFMNYTLNNTKNTNVTLSKKRKRRFLGFLLGVGSAIASGIAVSKVLHLEGEVNKIKSALLSTNKAVVSLSNGVSVLTSKVLDLKNYIDKQLLPIVNKQSCSISNIETVIEFQQKNNRLLEITREFSVNAGVTTPVSTYMLTNSELLSLINDMPITNDQKKLMSNNVQIVRQQSYSIMSIIKEEVLAYVVQLPLYGVIDTPCWKLHTSPLCTTNTKEGSNICLTRTDRGWYCDNAGSVSFFPQAETCKVQSNRVFCDTMNSLTLPSEVNLCNIDIFNPKYDCKIMTSKTDVSSSVITSLGAIVSCYGKIKCTASNKNRGIIKTFSNGCDYVSNKGVDTVSVGNTLYYVNKQEGKSLYVKGEPIINFYDPLVFPSDEFDASISQVNEKINQSLAFIRKSDELLHNVNAGKSTTNIMITTIIIVIVVILLSLIAVGLLLYCKAR

SEQ ID NO: 9231 - protein, 553 aa, Artificial Sequence
  derived and/or modified protein sequence (wt) from HRSV__BBC54146.1__F-del
MELPILKTNAITTILATVTLCFASSQNITEEFYQSTCSAVSKGYLSALRTGWYTSVITIELSNIKKNKCNGTDAKVKLIKQELDKYKNAVTELQLLMQSTPAANSRARRELPRFINYTLNNTKNTNVTLSKKRKRRFLGFLLGVGSAIASGIAVSKVLHLEGEVNKIKSALLSTNKAVVSLSNGVSVLTSKVLDLKNYIDKQLLPIVNKQSCSISNIETVIEFQQKNNRLLEITREFSVNAGVTTPVSTYMLTNSELLSLINDMPITNDQKKLMSSNVQIVRQQSYSIMSIIKEEVLAYVVQLPLYGVIDTPCWKLHTSPLCTTNTKEGSNICLTRTDRGWYCDNAGSVSFFPQAETCKVQSNRVFCDTMNSLTLPSEVNLCNIDIFNPKYDCKIMTSKTDVSSSVITSLGAIVSCYGKTKCTASNKNRGIIKTFSNGCDYVSNKGVDTVSVGNTLYYVNKQEGKSLYVKGEPIINFYDPLVFPSDEFDASISQVNEKINQSLAFIRKSDELLHNVNAGKSTTNIMITTIIIVIIVILLALIAVGLLLYCKAR

SEQ ID NO: 9232 - protein, 553 aa, Artificial Sequence
  derived and/or modified protein sequence (wt) from HRSV__BBC54122.1__F-del
MDLPILKTNAITTILAAVTLCFASSQNITEEFYQSTCSAVSKGYLSALRTGWYTSVITIELSNIKENKCNGTDAKVKLIKQELDKYKNAVTELQLLMQSTPASNNRARRELPRFMNYTLNNTKNTNVTLSKKRKRRFLGFLLGVGSAIASGIAVSKVLHLEGEVNKIKSALLSTNKAVVSLSNGVSVLTSKVLDLKNYIDKQLLPIVNKQSCSISNIETVIEFQQKNNRLLEITREFSVNAGVTTPVSTYMLTNSELLSLINDMPITNDQKKLMSNNVQIVRQQSYSIMSIIKEEVLAYVVQLPLYGVIDTPCWKLHTSPLCTTNTKEGSNICLTRTDRGWYCDNAGSVSFFPQAETCKVQSNRVFCDTMNSLTLPSEVNLCNIDIFNPKYDCKIMTSKTDVSSSVITSLGAIVSCYGKTKCTASNKNRGIIKTFSNGCDYVSNKGVDTVSVGNTLYYVNKQEGKSLYVKGEPIINFYDPLIFPSDEFDASISQVNEKINQSLAFIRKSDELLHNINAGKSTTNIMITTIIIVIVVILLSLIAVGLLLYCKAR

SEQ ID NO: 9233 - protein, 553 aa, Artificial Sequence
  derived and/or modified protein sequence (wt) from HRSV__BBC54124.1__F-del
MDLPILKTNAITTILAAVTLCFASSQNITEEFYQSTCSAVSKGYLSALRTGWYTSVITIELSNIKENKCNGTDAKVKLIKQELDKYKNAVTELQLLMQSTPASNNRARRELPRFMNYTLNNTKNTNVTLSKKRKRRFLGFLLGVGSAIASGIAVSKVLHLEGEVNKIKSALLSTNKAVVSLSNGVSVLTSKVLDLKNYIDKQLLPIVNKQSCSISNIETVIEFQQKNNRLLEITREFSVNAGVTTPVSTYMLTNSELLSLINDMPITNDQKKLMSNNVQIVRQQSYSIMSIIKEEVLAYVVQLPLYGVIDTPCWKLHTSPLCTTNTKEGSNICLTRTDRGWYCDNAGSVSFFPQAETCKVQSNRVFCDTMNSLTLPSEVNLCNIDIFNPKYDCKIMTSKTDVSSSVITSLGAIVSCYGKTKCTASNKNRGIIKTFSNGCDYVSNKGVDTVSVGNTLYYVNKQEGKSLYVKGEPIINFYDPLVFPSDEFDASISQVNEKINQSLAFIRKSDELLHNVNAGKSSTNIMITTIIIVIVVILLSLIAVGLLLYCKAR

SEQ ID NO: 9234 - protein, 553 aa, Artificial Sequence
  derived and/or modified protein sequence (wt) from HRSV__BBB35202.1__F-del
MDLPILKTNAITTILAAVTLCFASSQNITEEFYQSTCSAVSKGYLSALRTGWYTSVITIELSNIKENKCNGTDAKVKLIKQELDKYKNAVTELQLLMQSTPASNNRARRELPRFMNYTLNNTKNTNVTLSKKRKRRFLGFLLGVGSAIASGIAVSKVLHLEGEVNKIKSALLSTNKAVVSLSNGVSVLTSKVLDLKNYIDKQLLPIVNKQSCSISNIETVIEFQQKNNRLLEITREFSVNAGVTTPVSTYMLTNSELLSLINDMPITNDQKKLMSNNVQIVRQQSYSIMSIIKEEVLAYVVQLPLYGVIDTPCWKLHTSPLCTTNTKEGSNICLTRTDRGWYCDNAGSVSFFPQAETCKVQSNRVFCDTMNSLTLPSEVNLCNIDIFNPKYDCKIMTSKTDVSSSVITSLGAIVSCYGKTKCTASNKNRGIIKTFSNGCDYVSNKGVDTVSVGNTLYYVNKQEGKSLYVKGEPIINFYDPLVFPSDEFDASISQVNEKINQSLAFIRKSDELLHNVNAGKSTTNIMITTIIIVIVVILLSLIAVGLLLYCKAR

SEQ ID NO: 9235 - protein, 553 aa, Artificial Sequence
  derived and/or modified protein sequence (wt) from HRSV__BBB35201.1__F-del
MELPILKTNAITTILAAVTLCFASSQNITEEFYQSTCSAVSKGYLSALRTGWYTSVITIELSNIKENKCNGTDAKVKLIKQELDKYKNAVTELQLLMQSTPAANNRARRELPRFMNYTLNNTKNTNVTVSKKRKRRFLSFLLGVGSAIASGIAVSKVLHLEGEVNKIKSALLSTNKAVVSLSNGVSVLTSKVLDLKNYIDKQLLPIVNKQSCSISNIETVIEFQQKNNRLLEITREFSVNAGVTTPVSTYMLTNSELLSLINDMPITNDQKKLMSNNVQIVRQQSYSIMSIIKEEVLAYVVQLPLYGVIDTPCWKLHTSPLCTTNTKEGSNICLTRTDRGWYCDNAGSVSFFPQAETCKVQSNRVFCDTMNSLTLPSEVNLCNIDIFNPKYDCKIMTSKTDVSSSVITSLGAIVSCYGKTKCTASNKNRGIIKTFSNGCDYVSNKGVDTVSVGNTLYYVNKQEGKSLYVKGEPIINFYDPLVFPSDEFDASISQVNEKINQSLAFIRKSDELLHNVNAGKSTTNIMITTIIIVIIVILLSLIAVGLLLYCKAR

SEQ ID NO: 9236 - protein, 553 aa, Artificial Sequence
  derived and/or modified protein sequence (wt) from HRSV__BBB35192.1__F-del
MELPILKTNAITTIFAAVTLCFASSQNITEEFYQSTCSAVSKGYLSALRTGWYTSVITIELSNIKENKCNGTDAKVKLIKQELDKYKNAVTELQLLMQSTPAANNRARRELPRFMNYTLYNTKNNNVTLSKKRKRRFLGFLLGVGSAIASGIAVSKVLHLEGEVNKIKSALLSTNKAVVSLSNGVSVLTSKVLDLKNYIDKQLLPIVNKQSCSISNIETVIEFQQKNNRLLEITREFSVNAGVTTPVSTYMLTNSELLSLINDMPITNDQKKLMSNNVQIVRQQSYSIMSIIKEEVLAYVVQLPLYGVIDTPCWKLHTSPLCTTNTKEGSNICLTRTDRGWYCDNAGSVSFFPQAETCKVQSNRVFCDTMNSLTLPSEVNLCNIDIFNPKYDCKIMTSKTDVSSSVITSLGAIVSCYGKTKCTASNKNRGIIKTFSNGCDYVSNKGVDTVSVGNTLYYVNKQEGKSLYVKGEPIINFYDPLVFPSDEFDASISQVNEKINQSLAFIRKSDELLHNVNVGKSTTNIMITTIIIVIIVILLLLIAVGLFLYCKAR

SEQ ID NO: 9237 - protein, 553 aa, Artificial Sequence
  derived and/or modified protein sequence (wt) from HRSV__BBB35193.1__F-del
MELPILKTNAITTILAAVTLCFASSQNITEEFYQSTCSAVSKGYLSALRTGWYTSVITIELSNIKENKCNGTDAKVKLIKQELDKYKNAVTELQLLMQSTPAANSRARRELPRFRNYTLNNTKNTNVTLSKKRKRRFLGFLLGVGSAIASGIAVSKVLHLEGEVNKIKSALLSTNKAVVSLSNGVSVLTSKVLDLKNYIDKQLLPIVNKQSCSISNIETVIEFQQKNNRLLEITREFSVNAGVTTPVSTYMLTNSELLSLINDMPITNDQKKLMSNNVQIVRQQSYSIMSIIKEEVLAYVVQLPLYGVIDTPCWKLHTSPLCTTNTKEGSNICLTRTDRGWYCDNAGSVSFFPQAETCKVQSNRVFCDTMNSLTLPSEVNLCNIDIFNPKYDCKIMTSKTDVSSSVITSLGAIVSCYGKTKCTASNKNRGIIKTFSNGCDYVSNKGVDTVSVGNTLYYVNKQEGKSLYVKGEPIINFYDPLVFPSDEFDASISQVNEKINQSLAFIRKSDELLHNVNAGKSTTNIMITTIIIVIIVILLSLIAVGLLLYCKAR

SEQ ID NO: 9238 - protein, 553 aa, Artificial Sequence
  derived and/or modified protein sequence (wt) from HRSV__BBB35199.1__F-del
MDLPILKTNAITTILAAVTLCFASSQNITEEFYQSTCSAVSKGYLSALRTGWYTSVITIELSNIKENKCNGTDAKVKLIKQELDKYKNAVTELQLLMQSTPASNNRARRELPRFMNYTLNNTKNTNVTLSKKRKRRFLGFLLGVGSAIASGIAVSKVLHLEGEVNKIKSALLSTNKAVVSLSNGVSVLTSKVLDLKNYIDKQLLPIVNKQSCSISNIETVIEFQQKNNRLLEITREFSVNAGVTTPVSTYMLTNSELLSLINDMPITNDQKKLMSNNVQIVRQQSYSIMSIIKEEVLAYVVQLPLYGVIDTPCWKLHTSPLCTTNTKEGSNICLTRTDRGWYCDNAGSLSFFPQAETCKVQSNRVFCDTMNSLTLPSEVNLCNIDIFNPKYDCKIMTSKTDVSSSVITSLGAIVSCYGKTKCTASNKNRGIIKTFSNGCDYVSNKGVDTVSVGNTLYYVNKQEGKSLYVKGEPIINFYDPLVFPSDEFDASISQVNEKINQSLAFIRKSDELLHNVNAGKSTTNIMITTIIIVIVVILLSLIAVGLLLYCKAR

SEQ ID NO: 9239 - protein, 553 aa, Artificial Sequence
  derived and/or modified protein sequence (wt) from HRSV__BBB35184.1__F-del
MELPILKTNAITTILAAVTLCFASSQNITEEFYQSTCSAVSKGYLSALRTGWYTSVITIELSNIKENKCNGTDAKVKLIKQELDKYKNAVTELQLLMQSTPAANNRARRELPRFMNYTLNNTKNTNVTVSKKRKRRFLGFLLGVGSAIASGIAVSKVLHLEGEVNKIKSALLSTNKAVVSLSNGVSVLTSKVLDLKNYIDKQLLPIVNKQSCSISNIETVIEFQQKNNRLLEITREFSVNAGVTTPVSTYMLTNSELLSLINDMPITNDQKKLMSNNVQIVRQQSYSIMSIIKEEVLAYVVQLPLYGVIDTPCWKLHTSPLCTTNTKEGSNICLTRTDRGWYCDNAGSVSFFPQAETCKVQSNRVFCDTMNSLTLPSEVNLCNIDIFNSKYDCKIMTSKTDVSSSVITSLGAIVSCYGKTKCTASNKNRGIIKTFSNGCDYVSNKGVDTVSVGNTLYYVNKQEGKSLYVKGEPIINFYDPLVFPSDEFDASISQVNEKINQSLAFIRKSDELLHNVNAGKSTTNIMITTIIIVIIVILLSLIAVGLLLYCKAR

SEQ ID NO: 9240 - protein, 553 aa, Artificial Sequence
  derived and/or modified protein sequence (wt) from HRSV__BBB35126.1__F-del
MELPILKTNAITTILAAVTLCFASSQNITEEFYQSTCSAVSKGYLSALRTGWYTSVITIELSNIKENKCNGTDAKVKLIKQELDKYKNAVTELQLLMQSTPAANNRARRELPRFMNYTLNNTKNTNVTVSKKRKRRFLGFLLGVGSAIASGIAVSKVLHLEGEVNKIKSALLSTNKAVVSLSNGVSVLTSKVLDLKNYIDKQLLPIVNKQSCSISNIETVIEFQQKNNRLLEITREFSVNAGVTTPVSTYMLTNSELLSLINDMPITNDQKKLMSNNVQIVRQQSYSIMSIIKEEVLAYVVQLPLYGVIDTPCWKLHTSPLCTTNTKEGSNICLTRTDRGWYCDNAGSVSFFPQAETCKVQLNRVFCDTMNSLTLPSEVNLCNIDIFNPKYDCKIMTSKTDVSSSVITSLGAIVSCYGKTKCTASNKNRGIIKTFSNGCDYVSNKGVDTVSVGNTLYYVNKQEGKSLYVKGEPIINFYDPLVFPSDEFDASISQVNEKINQSLAFIRKSDELLHNVNAGKSTTNIMITTIIIVIIVILLSLIAVGLLLYCKAR

SEQ ID NO: 9241 - protein, 553 aa, Artificial Sequence
  derived and/or modified protein sequence (wt) from HRSV__BBB35133.1__F-del
MELPILKTNAITTILAAVTLCFASSQNITEEFYQSTCSAVSKGYLSALRTGWYTSVITIELSNIKENKCNGTDAKVKLIKQELDKYKNAVTELQLLMQSTPAANNRARRELPRFMNYTLNNTKNNNVTLSKKRKRRFLGFLLGVGSAIASGIAVSKVLHLEGEVNKIKSALLSTNKAVVSLSNGVSVLTSKVLDLKNYIDKQLLPIVNKQSCSISNIETVIEFQQKNNRLLEITREFSVNAGVTTPVSTYMLTNSELLSLINDMPITNDQKKLMSNNVQIVRQQSYSIMSIIKEEVLAYVVQLPLYGVIDTPCWKLHTSPLCTTNTKEGSNICLTRTDRGWYCDNAGSVSFFPQSETCKVQSNRVFCDTMNSLTLPSEVNLCNIDIFNPKYDCKIMTSKTDVSSSVITSLGAIVSCYGKTKCTASNKNRGIIKTFSNGCDYVSNKGVDTVSVGNTLYYVNKQEGKSLYVKGEPIINFYDPLVFPSDEFDASISQVNEKINQSLAFIRKSDELLHNVNVGKSTTNIMITTIIIVIIVILLLLIAVGLFLYCKAR

SEQ ID NO: 9242 - protein, 553 aa, Artificial Sequence
  derived and/or modified protein sequence (wt) from HRSV__BBB35130.1__F-del
MDLPILKTNAITTILAAVTLCFASSQNITEEFYQSTCSAVSKGYLSALRTGWYTSVITIELSNIKENKCNGTDAKVKLIKQELDKYKNAVTELQLLMQSTPAANNRARRELPRFMNYTLNNTKNNNVTLSKKRKRRFLGFLLGVGSAIASGIAVSKVLHLEGEVNKIKSALLSTNKAVVSLSNGVSVLTSKVLDLKNYIDKQLLPIVNKQSCSISNIETVIEFQQKNNRLLEITREFSVNAGVTTPVSTYMLTNSELLSLINDMPITNDQKKLMSNNVQIVRQQSYSIMSIIKEEVLAYVVQLPLYGVIDTPCWKLHTSPLCTTNTKEGSNICLTRTDRGWYCDNAGSVSFFPQAETCKVQSNRVFCDTMNSLTLPSEVNLCNIDIFNPKYDCKIMTSKTDVSSSVITSLGAIVSCYGKTKCTASNKNRGIIKTFSNGCDYVSNKGVDTVSVGNTLYYVNKQEGKSLYVKGEPIINFYDPLVFPSDEFDASISQVNEKINQSLAFIRKSDELLHNVNVGKSTTNIMITTIIIVIIVILLLLIAVGLFLYCKAR

SEQ ID NO: 9243 - protein, 553 aa, Artificial Sequence
  derived and/or modified protein sequence (wt) from HRSV__BBB35160.1__F-del
MELPILKANAITTILAAVTLCFASSQNITEEFYQSTCSAVSKGYLSALRTGWYTSVITIELSNIKENKCNGTDAKVKLIKQELDKYKNAVTELQLLMQSTPAANNRARRELPRFTNYTLNNTKNTNVTLSKKRKRRFLGFLLGVGSAIASGIAVSKVLHLEGEVNKIKSALLSTNKAVVSLSNGVSVLTSKVLDLKNYIDKQLLPIVNKQSCSISNIETVIEFQQKNNRLLEITREFSVNAGVTTPVSTYMLTNSELLSLINDMPITNDQKKLMSNNVQIVRQQSYSIMSIIKEEVLAYVVQLPLYGVIDTPCWKLHTSPLCTTNTKEGSNICLTRTDRGWYCDNAGSVSFFPQAETCKVQSNRVFCDTMNSLTLPSEVNLCNVDIFNPKYDCKIMTSKTDVSSSVITSLGAIVSCYGKTKCTASNKNRGIIKTFSNGCDYVSNKGVDTVSVGNTLYYVNKQEGKNLYVKGEPIINFYDPLVFPSDEFDASISQVNEKINQSLAFIRKSDELLHNVNAGKSTTNIMITTIIIVIIVILLSLIVVGLLLYCKAR

SEQ ID NO: 9244 - protein, 553 aa, Artificial Sequence
  derived and/or modified protein sequence (wt) from HRSV__BBB35162.1__F-del
MDLPILKTNAITAILAAVSLCFASSQNITEEFYQSTCSAVSKGYLSALRTGWYTSVITIELSNIKENKCNGTDAKVKLIKQELDKYKNAVTELQLLMQSTPAANNRARRELPRFMNYTLNNTKNNNVTLSKKRKRRFLGFLLGVGSAIASGIAVSKVLHLEGEVNKIKSALLTTNKAVVSLSNGVSVLTSKVLDLKNYIDKQLLPIVNKQSCSISNIETVIEFQQKNNRLLEITREFSVNAGVTTPVSTYMLTNSELLSLINDMPITNDQKKLMSNNVQIVRQQSYSIMSIIKEEVLAYVVQLPLYGVIDTPCWKLHTSPLCTTNTKEGSNICLTRTDRGWYCDNAGSVSFFPQAETCKVQSNRVFCDTMNSLTLPSEVNLCNIDIFNPKYDCKIMTSKTDVSSSVITSLGAIVSCYGKTKCTASNKNRGIIKTFSNGCDYVSNKGVDTVSVGNTLYYVNKQEGKSLYVKGEPIINFYDPLVFPSDEFDASISQVNEKINQSLTFIRKSDELLHNVNVGKSTTNIMITTIIIVIIVILLLLIAVGLFLYCKAR

SEQ ID NO: 9245 - protein, 553 aa, Artificial Sequence
  derived and/or modified protein sequence (wt) from HRSV__BBB35181.1__F-del
MELPILKTNAITTILAAVTLCFASSQNITEEFYQSTCSAVSKGYLSALRTGWYTSVITIELSNIKENKCNGTDAKVKLIKQELDKYKNAVTELQLLMQSTPAANSRARRELPRFMNYTLNNTKNTNVTLSKKRKRRFLGFLLGVGSAIASGIAVSKVLHLEGEVNKIKSALLSTNKAVVSLSNGVSVLTSKVLDLKNYIDKQLLPIVNKQSCSISNIETVIEFQQKNTRLLEITREFSVNAGVTTPVSTYMLTNSELLSLINDMPITNDQKKLMSNNVQIVRQQSYSIMSIIKEEVLAYVVQLPLYGVIDTPCWKLHTSPLCTTNTKEGSNICLTRTDRGWYCDNAGSVSFFPQAETCKVQSNRVFCDTMNSLTLPSEVNLCNIDIFNPKYDCKIMTSKTDVSSSVITSLGAIVSCYGKTKCTASNKNRGIIKTFSNGCDYVSNKGVDTVSVGNTLYYVNKQEGKSLYVKGEPIINFYDPLVFPSDEFDASISQVNEKINQSLAFIRKSDELLHNVNAGKSITNIMITTIIIVIIVILLSLIAVGLLLYCKAR

SEQ ID NO: 9246 - protein, 553 aa, Artificial Sequence
  derived and/or modified protein sequence (wt) from HRSV__BBB35165.1__F-del
MDLPILKTNAITAIFAAVSLCFASSQNITEEFYQSTCSAVSKGYLSALRTGWYTSVITIELSNIKENKCNGTDAKVKLIKQELDKYKNAVTELQLLMQSTPAANNRARRELPRFMNYTLNNTKNNNVTLSKKRKRRFLGFLLGVGSAIASGIAVSKVLHLEGEVNKIKSALLSTNKAVVSLSNGVSVLTSKVLDLKNYIDKQLLPIVNKQSCSISNIETVIEFQQKNNRLLEITREFSVNAGVTTPVSTYMLTNSELLSLINDMPITNDQKKLMSNNVQIVRQQSYSIMSIIKEEVLAYVVQLPLYGVIDTPCWKLHTSPLCTTNTKEGSNICLTRTDRGWYCDNAGSVSFFPQAETCKVQSNRVFCDTMNSLTLPSEVNLCNIDIFNPKYDCKIMTSKTDVSSSVITSLGAIVSCYGKTKCTASNKNRGIIKTFSNGCDYVSNKGVDTVSVGNTLYYVNKQEGKSLYVKGEPIINFYDPLVFPSDEFDASISQVNEKINQSLAFIRKSDELLHNVNVGKSTTNIMITTIIIVIIVILLLLIAVGLFLYCKAR

SEQ ID NO: 9247 - protein, 553 aa, Artificial Sequence
  derived and/or modified protein sequence (wt) from HRSV__BBB35121.1__F-del
MELPILKTNAITTILAAVTLCFVSSQNITEEFYQSTCSAVSKGYLSALRTGWYTSVITIELSNIKENKCNGTDAKVKLIKQELDKYKNAVTELQLLMQSTPAANNRARRELPRFMNYTLNNTKNTNVTVSKKRKRRFLGFLLGVGSAIASGIAVSKVLHLEGEVNKIKSALLSTNKAVVSLSNGVSVLTSKVLDLKNYIDKQLLPIVNKQSCSISNIETVIEFQQKNNRLLEITREFSVNAGVTTPVSTYMLTNSELLSLINDMPITNDQKKLMSNNVQIVRQQSYSIMSIIKEEVLAYVVQLPLYGVIDTPCWKLHTSPLCTTNTKEGSNICLTRTDRGWYCDNAGSVSFFPQAETCKVQSNRVFCDTMNSLTLPSEVNLCNIDIFNPKYDCKIMTSKTDVSSSVITSLGAIVSCYGKTKCTASNKNRGIIKTFSNGCDYVSNKGVDTVSVGNTLYYVNKQEGKSLYVKGEPIINFYDPLVFPSDEFDASISQVNEKINQSLAFIRKSDELLHNVNAGKSTTNIMITTIIIVIIVILLSLIAVGLLLYCKAR

SEQ ID NO: 9248 - protein, 553 aa, Artificial Sequence
  derived and/or modified protein sequence (wt) from HRSV__BBB35138.1__F-del
MELPILKTNAITTILAAVTLCFTSSQNITEEFYQSTCSAVSKGYLSALRTGWYTSVITIELSNIKENKCNGTDAKVKLIKQELDKYKNAVTELQLLMQSTPAANNRARRELPRFMNYTLNNTKNTNVTVSKKRKRRFLGFLLGVGSAIASGIAVSKVLHLEGEVNKIKSALLSTNKAVVSLSNGVSVLTSKVLDLKNYIDKQLLPIVNKQSCSISNIETVIEFQQKNNRLLEITREFSVNAGVTTPVSTYMLTNSELLSLINDMPITNDQKKLMSNNVQIVRQQSYSIMSIIKEEVLAYVVQLPLYGVIDTPCWKLHTSPLCTTNTKEGSNICLTRTDRGWYCDNAGSVSFFPQAETCKVQSNRVFCDTMNSLTLPSEVNLCNIDIFNPKYDCKIMTSKTDVSSSVITSLGAIVSCYGKTKCTASNKNRGIIKTFSNGCDYVSNKGVDTVSVGNTLYYVNKQEGKSLYVKGEPIINFYDPLVFPSDEFDASISQVNEKINQSLAFIRKSDELLHNVNAGKSTTNIMITTIIIVIIVILLSLIAVGLLLYCKAR

SEQ ID NO: 9249 - protein, 553 aa, Artificial Sequence
  derived and/or modified protein sequence (wt) from HRSV__BBB35176.1__F-del
MDLPILKTNAITAILAAVSLCFASSQNITEEFYQSTCSAVSKGYLSALRTGWYTSVITIELSNIKENKCNGTDTKVKLIKQELDKYKNAVTELQLLMQSTPAANNRARRELPRFMNHTLNNTKDNNVTLSKKRKRRFLGFLLGVGSAIASGIAVSKVLHLEGEVNKIKSALLSTNKAVVSLSNGVSVLTSKVLDLKNYIDKQLLPIVNKQSCSISNIETVIEFQQKNNRLLEITREFSVNAGVTTPVSTYMLTNSELLSLINDMPITNDQKKLMSNNVQIVRQQSYSIMSIIKEEVLAYVVQLPLYGVIDTPCWKLHTSPLCTTNTKEGSNICLTRTDRGWYCDNAGSVSFFPQAETCKVQSNRVFCDTMNSLTLPSEVNLCNIDIFNPKYDCKIMTSKTDVSSSVITSLGAIVSCYGKTKCTASNKNRGIIKTFSNGCDYVSNKGVDTVSVGNTLYYVNKQEGKSLYVKGEPIINFYDPLVFPSDEFDASISQVNEKINQSLAFIRKSDELLHNVNVGKSTTNIMITTIIIVIIVILLLLIAVGLFLYCKAR

SEQ ID NO: 9250 - protein, 553 aa, Artificial Sequence
  derived and/or modified protein sequence (wt) from HRSV__BBB35142.1__F-del
MELPILKTNAITTILAAVTLCFASSQNITEEFYQSTCSAVSKGYLSALRTGWYTSVITIELSNIKENKCNGTDAKVKLIKQELDKYKNAVTELQLLMQSTPAANNRARRELPRFMNYTLNNAKNTNVTVSKKRKRRFLGFLLGVGSAIASGIAVSKVLHLEGEVNKIKNALLSTNKAVVSLSNGVSVLTSKVLDLKNYIDKQLLPIVNKQSCSISNIETVIEFQQKNNRLLEITREFSVNAGVTTPVSTYMLTNSELLSLINDMPITNDQKKLMSNNVQIVRQQSYSIMSIIKEEVLAYVVQLPLYGVIDTPCWKLHTSPLCTTNTKEGSNICLTRTDRGWYCDNAGSVSFFPQAETCKVQSNRVFCDTMNSLTLPSEVNLCNIDIFNPKYDCKIMTSKTDVSSSVITSLGAIVSCYGKTKCTASNKNRGIIKTFSNGCDYVSNKGVDTVSVGNTLYYVNKQEGKSLYVKGEPIINFYDPLVFPSDEFDASISQVNEKINQSLAFIRKSDELLHNVNAGKSTTNIMITTIIIVIIVILLSLIAVGLLLYCKAR

SEQ ID NO: 9251 - protein, 553 aa, Artificial Sequence
  derived and/or modified protein sequence (wt) from HRSV__BBB35136.1__F-del
MELPILKTNAITTILAAVTLCFASSQNITEEFYQSTCSAVSKGYLSALRTGWYTSVITIELSNIKENKCNGTDAKVKLIKQELDKYKNAVTELQLLMQSTPAANNRARRELPRFMNYTLNNTKNTNVTVSKKRKRRFLGFLLGVGSAIASGIAVSKVLHLEGEVNKIKNALLSTNKAVVSLSNGVSVLTSKVLDLKNYIDKQLLPIVNKQSCSISNIETVIEFQQKNNRLLEITREFSVNAGVTTPVSTYMLTNSELLSLINDMPITNDQKKLMSNNVQIVRQQSYSIMSIIKEEVLAYVVQLPLYGVIDTPCWKLHTSPLCTTNTKEGSNICLTRTDRGWYCDNAGSVSFFPQAETCKVQSNRVFCDTMNSLTLPSEVNLCNIDIFNPKYDCKIMTSKTDVSSSVITSLGAIVSCYGKTKCTASNKNRGIIKTFSNGCDYVSNKGVDTVSVGNTLYYVNKQEGKSLYVKGEPIINFYDPLVFPSDEFDASISQVNEKINQSLAFIRKSDELLHNVNAGKSTTNIMITTIIIVIIVILLSLIAVGLLLYCKAR

SEQ ID NO: 9252 - protein, 553 aa, Artificial Sequence
  derived and/or modified protein sequence (wt) from HRSV__BBB35153.1__F-del
MDLPILKTNAITAILAAVSLCFASSQNITEEFYQSTCSAVSKGYLSALRTGWYTSVITIELSNIKENKCNGTDAKVKLIKQELDKYKNAVTELQLLMQSTPAANNRARRELPRFMNYTLNNTKNNNVTLSKKRKRRFLGFLLGVGSAIASGIAVSKVLHLEGEVNKIKSALLSTNKAVVSLSNGVSVLTSKVLDLKNYIDKQLLPIVNKQSCSISNIETVIEFQQKNNRLLEITREFSVNAGVTTPVSTYMLTNSELLSLINDMPITNDQKKLMSNNVQIVRQQSYSIMSIIKEEVLAYVVQLPLYGVIDTPCWKLHTSPLCTTNTKEGSNICLTRTDRGWYCDNAGSVSFFPQAETCKVQSNRVFCDTMNSLTLPSEVNLCNIDIFNPKYDCKIMTSKTDVSSSVITSLGAIVSCYGKTKCTASNKNRGITKTFSNGCDYVSNKGVDTVSVGNTLYYVNKQEGKSLYVKGEPIINFYDPLVFPSDEFDASISQVNEKINQSLAFIRKSDELLHNVNVGKSTTNIMITTIIIVIIVILLLLIAVGLFLYCKAR

SEQ ID NO: 9253 - protein, 553 aa, Artificial Sequence
  derived and/or modified protein sequence (wt) from HRSV__BBB35115.1__F-del
MELPILKANAITTILAAVTLCFASSQNITEEFYQSTCSAVSKGYLSALRTGWYTSVITIELSNIKENKCNGTDAKVKLIKQELDKYKNAVTELQLLMQSTPAANNRARRELPRFMNYTLNNTKNTNVTLSKKRKRRFLGFLLGVGSAIASGIAVSKVLHLEGEVNKIKSALLSTNKAVVSLSNGVSVLTSKVLDLKNYIDKQLLPIVNKQSCSISNIETVIEFQQKNNRLLEITREFSVNAGVTTPVSTYMLTNSELLSLINDMPITNDQKKLMSNNVQIVRQQSYSIMSIIKEEVLAYVVQLPLYGVIDTPCWKLHTSPLCTTNTKEGSNICLTRTDRGWYCDNAGSVSFFPQAETCKVQSNRVFCDTMNSLTLPSEVNLCNVDIFNPKYDCKIMTSKTDVSSSVITSLGAIVSCYGKTKCTASNKNRGIIKTFSNGCDYVSNKGVDTVSVGNTLYYVNKQEGKNLYVKGEPIINFYDPLVFPSDEFDASISQVNEKINQSLAFIRKSDELLHNVNAGKSTTNIMITTIIIVIIVILLSLIAVGLLLYCKAR

SEQ ID NO: 9254 - protein, 553 aa, Artificial Sequence
  derived and/or modified protein sequence (wt) from HRSV__BBB35150.1__F-del
MDLPILKTNAITTILATVSLCFASSQNITEEFYQSTCSAVSKGYLSALRTGWYTSVITIELSNIKENKCNGTDAKVKLIKQELDKYKNAVTELQLLMQSTPAANNRARRELPRFMNYTLNNTKNNNVTLSKKRKRRFLGFLLGVGSAIASGIAVSKVLHLEGEVNKIKSALLSTNKAVVSLSNGVSVLTSKVLDLKNYIDKQLLPIVNKQSCSISNIETVIEFQQKNNRLLEITREFSVNAGVTTPVSTYMLTNSELLSLINDMPITNDQKKLMSNNVQIVRQQSYSIMSIIKEEVLAYVVQLPLYGVIDTPCWKLHTSPLCTTNTKEGSNICLTRTDRGWYCDNAGSVSFFPQAETCKVQSNRVFCDTMNSLTLPSEVNLCNIDIFNPKYDCKIMTSKTDVSSSVITSLGAIVSCYGKTKCTASNKNRGIIKTFSNGCDYVSNKGVDTVSVGNTLYYVNKQEGKSLYVKGEPIINFYDPLVFPSDEFDASISQVNEKINQSLAFIRKSDELLHNVNVGKSTTNIMITTIIIVIIVILLLLIAVGLFLYCKAR

SEQ ID NO: 9255 - protein, 553 aa, Artificial Sequence
  derived and/or modified protein sequence (wt) from HRSV__BBB35097.1__F-del
MDLPILKTNAITTILAAVTLCFASSQNITEEFYQSTCSAVSKGYLSALRTGWYTSVITIELSNIKENKCNGTDAKVKLIKQELDKYKNAVTELQLLMQSTPAANNRARRELPRFMNYTLNNTKNTNVTLSKKRKRRFLGFLLGVGSAIASGIAVSKVLHLEGEVNKIKSALLSTNKAVVSLSNGVSVLTSKVLDLKNYIDKQLLPIVNKQSCSISNIETVIEFQQKNNRLLEITREFSVNAGVTTPVSTYMLTNSELLSLINDMPITNDQKKLMSNNVQIVRQQSYSIMSIIKEEVLAYVVQLPLYGVIDTPCWKLHTSPLCTTNTKEGSNICLTRTDRGWYCDNAGSVSFFPQAETCKVQSNRVFCDTMNSLTLPSEVNLCNIDIFNPKYDCKIMTSKTDVSSSVITSLGAIVSCYGKTKCTASNKNRGIIKTFSNGCDYVSNKGVDTVSVGNTLYYVNKQEGKSLYVKGEPIINFYDPLVFPSDEFDASISQVNEKINQSLAFIRKSDELLHNVNAGKSTTNIMITTIIIVIIVILLSLIAVGLLLYCKAR

SEQ ID NO: 9256 - protein, 553 aa, Artificial Sequence
  derived and/or modified protein sequence (wt) from HRSV__BBB35109.1__F-del
MELPILKTNAITTILAAVTLCFASSQNITEEFYQSTCSAVSKGYLSALRTGWYTSVITIELSNIKENKCNGTDAKVKLIKQELDKYKNAVTELQLLMQSTPAANNRARRELPRFMNYTLNNTKNTNVTLSKKRKRRFLGFLLGVGSAIASGIAVSKVLHLEGEVNKIKSALLSTNKAVVSLSNGVSVLTSKVLDLKNYIDKQLLPIVNKQSCSISNIETVIEFQQKNNRLLEITREFSVNAGVTTPVSTYMLTNSELLSLINDMPITNDQKKLMSNNVQIVRQQSYSIMSIIKEEVLAYVVQLPLYGVIDTPCWKLHTSPLCTTNTKEGSNICLTRTDRGWYCDNAGSVSFFPQAETCKVQSNRVFCDTMNSLTLPSEVNLCNIDIFNPKYDCKIMTSKTDVSSSVITSLGAIVSCYGKTKCTASNKNRGIIKTFSNGCDYVSNKGVDTVSVGNTLYYVNKQEGKSLYVKGEPIINFYDPLVFPSDEFDASISQVNEKINQSLAFIRKSDELLHNVNAGKSTTNIMITTIIIVIIVILLSLIAVGMLLYCKAR

SEQ ID NO: 9257 - protein, 553 aa, Artificial Sequence
  derived and/or modified protein sequence (wt) from HRSV__BBB35094.1__F-del
MELPILKTNAITTILAAVTLCFASSQNITEEFYQSTCSAVSKGYLSALRTGWYTSVITIELSNIKENKCNGTDAKVKLIKQELDKYKNAVTELQLLMQSTPAANNRARRELPRFMNYTLNNTKNTNVTLSKKRKRRFLGFLLGVGSAIASGIAVSKVLHLEGEVNKIKSALLSTNKAVVSLSNGVSVLTSKVLDLKNYIDKQLLPIVNKQSCSISNIETVIEFQQKNNRLLEITREFSVNAGVTTPVSTYMLTNSELLSLINDMPITNDQKKLMSNNVQIVRQQSYSIMSIIKEEVLAYVVQLPLYGVIDTPCWKLHTSPLCTTNTKEGSNICLTRTDRGWYCDNAGSVSFFPQAETCKVQLNRVFCDTMNSLTLPSEVNLCNIDIFNPKYDCKIMTSKTDVSSSVITSLGAIVSCYGKTKCTASNKNRGIIKTFSNGCDYVSNKGVDTVSVGNTLYYVNKQEGKSLYVKGEPIINFYDPLVFPSDEFDASISQVNEKINQSLAFIRKSDELLHNVNAGKSTTNIMITTIIIVIIVILLSLIAVGLLLYCKAR

SEQ ID NO: 9258 - protein, 553 aa, Artificial Sequence
  derived and/or modified protein sequence (wt) from HRSV__BBB35183.1__F-del
MELPILKTNAITTILAAVTLCFASSQNITEEFYQSTCSAVSKGYLSALRTGWYTSVITIELSNIKENKCNGTDAKVKLIKQELDKYKNAVTELQLLMQSTPAANSRARRELPRFMNYTLNNTKNTNVTLSKKRKRRFLGFLLGVGSAIASGIAVSKVLHLEGEVNKIKSALLSTNKAVVSLSNGVSVLTSKVLDLKNYIDKQLLPIVNKQSCSISNIETVIEFQQKNTRLLEITREFSVNAGVTTPVSTYMLTNSELLSLINDMPITNDQKKLMSNNVQIVRQQSYSIMSIIKEEVLAYVVQLPLYGVIDTPCWKLHTSPLCTTNTKEGSNICLTRTDRGWYCDNAGSVSFFPQAETCKVQSNRVFCDTMNSLTLPSEVNLCNIDIFNPKYDCKVMTSKTDVSSSVITSLGAIVSCYGKTKCTASNKNRGIIKTFSNGCDYVSNKGVDTVSVGNTLYYVNKQEGKSLYVKGEPIINFYDPLVFPSDEFDASISQVNEKINQSLAFIRKSDELLHNVNAGKSTTNIMITTIIIVIIVILLSLIAVGLLLYCKAR

SEQ ID NO: 9259 - protein, 553 aa, Artificial Sequence
  derived and/or modified protein sequence (wt) from HRSV__BBB35104.1__F-del
MELPILKTNAITTILAAVTLCFASSQNITEEFYQSTCSAVSKGYLSALRTGWYTSVITIELSNIKENKCNGTDAKVKLIKQELDKYKNAVTELQLLMQSTPAANNRARRELPRFMNYTLNNTKNTNVTLSKKRKRRFLGFLLGVGSAIASGIAVSKVLHLEGEVNKIKNALLSTNKAVVSLSNGVSVLTSKVLDLKNYIDKQLLPIVNKQSCSISNIETVIEFQQKNNRLLEITREFSVNAGVTTPVSTYMLTNSELLSLINDMPITNDQKKLMSNNVQIVRQQSYSIMSIIKEEVLAYVVQLPLYGVIDTPCWKLHTSPLCTTNTKEGSNICLTRTDRGWYCDNAGSVSFFPQAETCKVQSNRVFCDTMNSLTLPSEVNLCNIDIFNPKYDCKIMTSKTDVSSSVITSLGAIVSCYGKTKCTASNKNRGIIKTFSNGCDYVSNKGVDTVSVGNTLYYVNKQEGKSLYVKGEPIINFYDPLVFPSDEFDASISQVNEKINQSLAFIRKSDELLHNVNAGKSTTNIMITTIIIVIIVILLSLIAVGMLLYCKAR

SEQ ID NO: 9260 - protein, 553 aa, Artificial Sequence
  derived and/or modified protein sequence (wt) from HRSV__BBB35099.1__F-del
MELPILKTNAITTILAAVTLCFASSQNITEEFYQSTCSAVSKGYLSALRTGWYTSVITIELSNIKENKCNGTDSKVKLIKQELDKYKNAVTELQLLMQSTPAANNRARRELPRFMNYTLNNTKNTNVTLSKKRKRRFLGFLLGVGSAIASGIAVSKVLHLEGEVNKIKSALLSTNKAVVSLSNGVSVLTSKVLDLKNYIDKQLLPIVNKQSCSISNIETVIEFQQKNNRLLEITREFSVNAGVTTPVSTYMLTNSELLSLINDMPITNDQKKLMSNNVQIVRQQSYSIMSIIKEEVLAYVVQLPLYGVIDTPCWKLHTSPLCTTNTKEGSNICLTRTDRGWYCDNAGSVSFFPQAETCKVQSNRVFCDTMNSLTLPSEVNLCNIDIFNPKYDCKIMTSKTDVSSSVITSLGAIVSCYGKTKCTASNKNRGIIKTFSNGCDYVSNKGVDTVSVGNTLYYVNKQEGKSLYVKGEPIINFYDPLVFPSDEFDASISQVNEKINQSLAFIRKSDELLHNVNVGKSTTNIMITTIIIVIIVILLLLIAVGLFLYCKAR

SEQ ID NO: 9261 - protein, 553 aa, Artificial Sequence
  derived and/or modified protein sequence (wt) from HRSV__BBB35188.1__F-del
MDLPILKTNAITAILAAVSLYFASSQNITEEFYQSTCSAVSKGYLSALRTGWYTSVITIELSNIKENKCNGTDAKVKLIKQELDKYKNAVTELQLLMQSTPAANNRARRELPRFMNYTLNNTKNNNVTLSKKRKRRFLGFLLGVGSAIASGIAVSKVLHLEGEVNKIKSALLSTNKAVVSLSNGVSVLTSKVLDLKNYIDKQLLPIVNKQSCSISNIETVIEFQQKNNRLLEITREFSVNAGVTTPVSTYMLTNSELLSLINDMPITNDQKKLMSNNVQIVRQQSYSIMSIIKEEVLAYVVQLPLYGVIDTPCWKLHTSPLCTTNSKEGSNICLTRTDRGWYCDNAGSVSFFPQAETCKVQSNRVFCDTMNSLTLPSEVNLCNIDIFNPKYDCKIMTSKTDVSSSVITSLGAIVSCYGKTKCTASNKNRGIIKTFSNGCDYVSNKGVDTVSVGNTLYYVNKQEGKSLYVKGEPIINFYDPLVFPSDEFDASISQVNEKINQSLAFIRKSDELLHNVNVGKSTTNIMITTIIIVIIVILLLLIAVGLFLYCKAR

SEQ ID NO: 9262 - protein, 553 aa, Artificial Sequence
  derived and/or modified protein sequence (wt) from HRSV__AKA45871.1__F-del
MELPILKTNAITTILAAVTLCFASSQNITEEFYQSTCSAVSKGYLSALRTGWYTSVITIELSNIKENKCNGTDAKVKLIKQELDKYKNAVTELQLLMQSTPAANNRARRELPRFMNYTLNNTKNTNVTLSKKRKRRFLGFLLGVGSAIASGIAVSKVLHLEGEVNKIKSALLSTNKAVVSLSNGVSVLTSKVLDLKNYIDKQLLPIVNKQSCSISNIETVIEFQQKNNRLLEITREFSVNAGVTTPVSTYMLTNSELLSLINDMPITNDQKKLMSNNVQIVRQQSYSIMSIIKEEVLAYVVQLPLYGVIDTPCWKLHTSPLCTTNTKEGSNICLTRTDRGWYCDNAGSVSFFPQAETCKVQSNRVFCDTMNSLTLPSEVNLCNIDIFNPKYDCKIMTSKTDVSSSVITSLGAIVSCYGKTKCTASNKNRGIIKTFSNGCDYVSNKGVDTVSVGNTLYYVNKQEGKSLYVKGEPIINFYDPLVFPSDEFDASISQVNEKINQSLAFIRKSDELLHNVNAGKSTTNIMITTIIIVIIVILLSLIAVGLLLYCKAR

SEQ ID NO: 9263 - protein, 553 aa, Artificial Sequence
  derived and/or modified protein sequence (wt) from HRSV__ASV65838.1__F-del
MELPILKTNAITTILAAVTLCFASSQNITEEFYQSTCSAVSKGYLSALRTGWYTSVITIELSNIKENKCNGTDAKVKLIKQELDKYKNAVTELQLLMQSTQAANSRARRELPRFMNYTLNNTKNTNVTLSKKRKRRFLGFLLGVGSAIASGIAVSKVLHLEGEVNKIKSALLSTNKAVVSLSNGVSVLTSKVLDLKNYIDKQLLPIVNKQSCSISNIETVIEFQQKNNRLLEITREFSVNAGVTTPVSTYMLTNSELLSLINDMPITNDQKKLMSSNVQIVRQQSYSIMSIIKEEVLAYVVQLPLYGVIDTPCWKLHTSPLCTTNTKEGSNICLTRTDRGWYCDNAGSVSFFPQAETCKVQSNRVFCDTMNSLTLPSEVNLCNIDIFNPKYDCKIMTSKTDVSSSVITSLGAIVSCYGKTKCTASNKNRGIIKTFSNGCDYVSNKGVDTVSVGNTLYYVNKQEGKSLYVKGEPIINFYDPLVFPSDEFDASISQVNEKINQSLAFIRKSDELLHNVNAGKSTTNIMITTIIIVIIVILLALIAVGLLLYCKAR

SEQ ID NO: 9264 - protein, 553 aa, Artificial Sequence
  derived and/or modified protein sequence (wt) from HRSV__AGG39373.1__F-del
MELPILKTNAITTILAAVTLCFASSQNITEEFYQSTCSAVSKGYLSALRTGWYTSVITIELSSIKENKCNGTDAKVKLIKQELDKYKNAVTELQLLMQSTPAANNRARRELPRFMNYTLNNTKTTNVTLSRKRKRRFLGFLLGVGSAIASGIAVSKVLHLEGEVNKIKSALLSTNKAVVSLSNGVSVLTSKVLDLKNYIDKQLLPIVNKQSCSISNIETVIEFQQKNNRLLEITREFSVNAGVTTPVSTYMLTNSELLSLINDMPITNDQKKLMSNNVQIVRQQSYSIMSIIKEEVLAYVVQLPLYGVIDTPCWKLHTSPLCTTNTKEGSNICLTRTDRGWYCDNAGSVSFFPQAETCKVQSNRVFCDTMNSLTLPSEVNLCNIDIFNPKYDCKIMTSKTDVSSSVITSLGAIVSCYGKTKCTASNKNRGIIKTFSNGCDYVSNKGVDTVSVGNTLYYVNKQEGKSLYVKGEPIINFYDPLVFPSDEFDASISQVNEKINQSLAFIRKSDELLHNVNAGKSTTNIMITTIIIVIIVILLSLIAVGLLLYCKAR

SEQ ID NO: 9265 - protein, 553 aa, Artificial Sequence
  derived and/or modified protein sequence (wt) from HRSV__AII22107.1__F-del
MELLILKTNAITTILAAVTLCFASSQNITEEFYQSTCSAVSKGYLSALRTGWYTSVITIELSNIKENKCNGTDAKVKLIKQELDKYKNAVTELQLLMQSTPAANSRARRELPRFMNYTLNNTKNTNVTLSKKRKRRFLGFLLGVGSAIASGIAVSKVLHLEGEVNKIKSALLSTNKAVVSLSNGVSVLTSKVLDLKNYIDKQLLPIVNKQSCSISNIETVIEFQQKNNRLLEITREFSVNAGVTTPVSTYMLTNSELLSLINDMPITNDQKKLMSSNVQIVRQQSYSIMSIIKEEVLAYVVQLPLYGVIDTPCWKLHTSPLCTTNTKEGSNICLTRTDRGWYCDNAGSVSFFPQAETCKVQSNRVFCDTMNSLTLPSEVNLCNIDIFNPKYDCKIMTSKTDVSSSVITSLGAIVSCYGKTKCTASNKNRGIIKTFSNGCDYVSNKGVDTVSVGNTLYYVNKQEGKSLYVKGEPIINFYDPLVFPSDEFDASISQVNEKINQSLAFIRKSDELLHNVNAGKSTTNIMITTIIIVIIVILLALIAVGLLLYCKAR

SEQ ID NO: 9266 - protein, 553 aa, Artificial Sequence
  derived and/or modified protein sequence (wt) from HRSV__AGG39400.1__F-del
MELPILKTNAITTILAAVTLCFASSQNITEEFYQSTCSAVSKGYLSALRTGWYTSVITIELSNIKENKCNGTDAKVKLIKQELDKYKNAVTELQLLMQSTPAANNRARRELPRFMNYTLNNTKNTNVTLSKKRKRRFLGFLLGVGSAIASGIAVSKVLHLEGEVNKIKSALLSTNKAVVSLSNGVSVLTSKVLDLKNYIDKQLLPIVNKQSCSISNIETVIEFQQKNNRLLEITREFSVNAGVTTPVSTYMLTNSELLSLINDMPITNDQKKLMSNNVQIVRQQSYSIMSIIKEEVLAYVVQLPLYGVIDTPCWKLHTSPLCTTNTKEGSNICLTRTDRGWYCDNAGSVSFFPQAETCKVQSNRVFCDTMNSLTLPSEVNLCNIDIFNPKYDCKIMTSKTDVSSSVITSLGAIVSCYGKTKCTASNKNRGIIKTFSNGCDYVSNKGVDTVSVGNTLYYVNKQEGKSLYVKGEPIINFYDPLVFPSDEFDASISQVNEKINQSLAFIRKSDELLHNVNVGKSTTNIMITTIIIVIIVILLLLIAVGLFLYCKAR

SEQ ID NO: 9267 - protein, 553 aa, Artificial Sequence
  derived and/or modified protein sequence (wt) from HRSV__AGG39457.1__F-del
MELPILKTNAITTILAAVTLCFASSQNITEEFYQSTCSAVSKGYLSALRTGWYTSVITIELSNIKENKCNGTDAKVKLIKQELDKYKNAVTELQLLMQSTPAANNRARRELPRFMNYTLNNTKNNNVTLSKKRKRRFLGFLLGVGSAIASGIAVSKVLHLEGEVNKIKSALLSTNKAVVSLSNGVSVLTSKVLDLKNYIDKQLLPIVNKQSCSISNIETVIEFQQKNNRLLEITREFSVNAGVTTPVSTYMLTNSELLSLINDMPITNDQKKLMSNNVQIVRQQSYSIMSIIKEEVLAYVVQLPLYGVIDTPCWKLHTSPLCTTNTKEGSNICLTRTDRGWYCDNAGSVSFFPQAETCKVQSNRVFCDTMNSLTLPSEVNLCNIDIFNPKYDCKIMTSKTDVSSSVITSLGAIVSCYGKTKCTASNKNRGIIKTFSNGCDYVSNKGVDTVSVGNTLYYVNKQEGKSLYVKGEPIINFYDPLVFPSDEFDASISQVNEKINQSLAFIRKSDELLHNVNVGKSTTNIMITTIIIVIIVILLLLIAVGLFLYCKAR

SEQ ID NO: 9268 - protein, 553 aa, Artificial Sequence
  derived and/or modified protein sequence (wt) from HRSV__ARR29240.1__F-del
MELLIHRSSAIFLTLAINALYLTSSQNITEEFYQSTCSAVSRGYLSALRTGWYTSVITIELSNIKETKCNGTDTKVKLIKQELDKYKNAVTELQLLMQNTPAANNRARREAPQYMNYIINTTKNLNVSISKKRKRRFLGFLLGVGSAIASGIAVSKVLHLEGEVNKIKNALLSTNKAVVSLSNGVSVLTSKVLDLKNYINNQLLPIVNQQSCRISNIETVIEFQQKNSRLLEITREFSVNAGVTTPLSTYMLTNSELLSLINDMPITNDQKKLMSSNVQIVRQQSYSIMSIIKEEVLAYVVQLPIYGVIDTPCWKLHTSPLCTTNIKEGSNICLTRTDRGWYCDNAGSVSFFPQADTCKVQSNRVFCDTMNSLTLPSEVSLCNTDIFNSKYDCKIMTSKTDISSSVITSLGAIVSCYGKTKCTASNKNRGIIKTFSNGCDYVSNKGVDTVSVGNTLYYVNKLEGKNLYVKGEPIINYYDPLVFPSDEFDASISQVNEKINQSLAFIRRSDELLHNVNTGKSTTNIMITAIIIVIIVVLLSLIAIGLLLYCKAK

SEQ ID NO: 9269 - protein, 553 aa, Artificial Sequence
  derived and/or modified protein sequence (wt) from HRSV__ARR29251.1__F-del
MELPILKTNAITTILAAVTLCFASSQNITEEFYQSTCSAVSKGYLSALRTGWYTSVITIELSNIKENKCNGTDAKVKLIKQELDKYKNAVTELQLLMQSTPAANSRARRELPRFVNYTLNNTKNTNVTLSKKRKRRFLGFLLGVGSAIASGIAVSKVLHLEGEVNKIKSALLSTNKAVVSLSNGVSVLTSKVLDLKNYIDKQLLPIVNKQSCSISNIETVIEFQQKNNRLLEITREFSVNAGVTTPVSTYMLTNSELLSLINDMPITNDQKKLMSSNVQIVRQQSYSIMSIIKEEVLAYVVQLPLYGVIDTPCWKLHTSPLCTTNTKEGSNICLTRTDRGWYCDNAGSVSFFPQAETCKVQSNRVFCDTMNSLTLPSEVNLCNIDIFNPKYDCKIMTSKTDVSSSVITSLGAIVSCYGKTKCTASNKNRGIIKTFSNGCDYVSNKGVDTVSVGNTLYYVNKQEGKSLYVKGEPIINFYDPLVFPSDEFDASISQVNEKINQSLAFIRKSDELLHNVNAGKSTTNIMITTIIIVIIVILLALIAVGLLLYCKAR

SEQ ID NO: 9270 - protein, 553 aa, Artificial Sequence
  derived and/or modified protein sequence (wt) from HRSV__ARR29189.1__F-del
MELPILKTNAITTILAAVTLCFASSQNITEEFYQSTCSAVSKGYLSALRTGWYTSVITIELSNIKENKCNGTDAKVKLIKQELDKYKNAVTELQLLMQSTPAANSRARRELPRFMNYTLDNTKNTNVTLSKKRKRRFLGFLLGVGSAIASGIAVSKVLHLEGEVNKIKSALLSTNKAVVSLSNGVSVLTSKVLDLKNYIDKQLLPIVNKQSCSISNIETVIEFQQKNNRLLEITREFSVNAGVTTPVSTYMLTNSELLSLINDMPITNDQKKLMSSNVQIVRQQSYSIMSIIKEEVLAYVVQLPLYGVIDTPCWKLHTSPLCTTNTKEGSNICLTRTDRGWYCDNAGSVSFFPQAETCKVQSNRVFCDTMNSLTLPSEVNLCNIDIFNPKYDCKIMTSKTDVSSSVITSLGAIVSCYGKTKCTASNKNRGIIKTFSNGCDYVSNKGVDTVSVGNTLYYVNKQEGKSLYVKGEPIINFYDPLVFPSDEFDASISQVNEKINQSLAFIRKSDELLHNVNAGKSTTNIMITTIIIVIIVILLALIAVGLLLYCKAR

SEQ ID NO: 9271 - protein, 553 aa, Artificial Sequence
  derived and/or modified protein sequence (wt) from HRSV__ARR29207.1__F-del
MELLIHRSSAIFLTLAINALYLTSSQNITEEFYQSTCSAVSRGYLSALRTGWYTSVITIELSNIKETKCNGTDTKVKLIKQELDKYKNAVTELQLLMQNTPAVNNRARREAPQYMNYTINTTKNLNVSISKKRKRRFLGFLLGVGSAIASGIAVSKVLHLEGEVNKIKNALQSTNKAVVSLSNGVSVLTSKVLDLKNYINNQLLPIVNEQSCRISNIETVIEFQQKNSRLLEITREFSVNAGVTTPLSTYMLTNSELLSLINDMPITNDQKKLMSSNVQIVRQQSYSIMSIIKEEVLAYVVQLPIYGVIDTPCWKLHTSPLCTTNIKEGSNICLTRTDRGWYCDNAGSVSFFPQADTCKVQSNRVFCDTMNSLTLPSEVSLCNTDIFNSKYDCKIMTSKTDISSSVITSLGAIVSCYGKTKCTASNKNRGIIKTFSNGCDYVSNKGVDTVSVGNTLYYVNKLEGKNLYVKGEPIINYYDPLVFPSDEFDASISQVNEKINQSLAFIRRSDELLHNVNTGKSTTNIMITAIIIVIIVVLLSLIAIGLLLYCKAK

SEQ ID NO: 9272 - protein, 553 aa, Artificial Sequence
  derived and/or modified protein sequence (wt) from HRSV__AUH15164.1__F-del
MELLIHRSSAIFLTLAINALYLTSSQNITEEFYQSTCSAVSRGYLSALRTGWYTSVITIELSNIKETKCNGTDTKVKLIKQELDKYKNAVTELQLLMQNTPAANNRARREAPQYMNYTINTTKNLNVSISKKRKRRFLGFLLGVGSAIASGIAVSKVLHLEGEVNKIKNALLSTNKAVVSLSNGVSVLTSKVLDLKNYINNQLLPIVNQQSCRISNIETVIEFQQKNSRLLEITREFSVNAGVTTPLSTYMLTNSELLSLINDMPITNDQKKLMSSNVQIVRQQSYSIMSIIKEEVLAYVVQLPIYGVIDTPCWKLHTSPLCTTNIKEGSNICLTRTDRGWYCDNAGSVSFFPQADTCKVQSNRVFCDTMNSLTLPSEVSLCNTDIFNSKYDCKIMTSKTDISSSVITSLGAIVSCYGETKCTASNKNRGIIKTFSNGCDYVSNKGVDTVSVGNTLYYVNKLEGKNLYVKGEPIINYYDPLVFPSDEFDASISQVNEKINQSLAFIRRSDELLHNVNTGKSTTNIMITAIIIVIIVVLLSLIAIGLLLYCKAK

SEQ ID NO: 9273 - protein, 553 aa, Artificial Sequence
  derived and/or modified protein sequence (wt) from HRSV__ATV81343.1__F-del
MELLIHRSSAIFLTLAINALYLTSSQNITEEFYQSTCSAVSRGYFSALRTGWYTSVITIELSNIKETKCNGTDTKVKLIKQELDKYKNAVTELQLLMQNTPAANNRARREAPQYMNYTINTTKNPNVSISKKRKRRFLGFLLGVGSAIASGIAVSKVLHLEGEVNKIKNALLSTNKAVVSLSNGVSVLTSKVLDLKNYINNQLLPIVNQQSCRISNIETVIEFQQKNSRLLEITREFSVNAGVTTPLSTYMLTNSELLSLINDMPITNDQKKLMSSNVQIVRQQSYSIMSIIKEEVLAYVVQLPIYGVIDTPCWKLHTSPLCTTNIKEGSNICLTRTDRGWYCDNAGSVSFFPQADTCKVQSNRVFCDTMNSLTLPSEVSLCNTDIFNSKYDCKIMTSKTDISSSVITSLGAIVSCYGKTKCTASNKNRGIIKTFSNGCDYVSNKGVDTVSVGNTLYYVNKLEGKNLYVKGEPIINYYDPLVFPSDEFDASISQVNEKINQSLAFIRRSDELLHNVNTGKSTTNIMITAIIIVIIVVLLSLIAIGLLLYCKAK

SEQ ID NO: 9274 - protein, 553 aa, Artificial Sequence
  derived and/or modified protein sequence (wt) from HRSV__AUC68654.1__F-del
MELPILKTNAITTILAAVTLCFASSQNITEEFYQSTCSAVSKGYLSALRTGWYTSVITIELSNIKENKCNGTDAKVKLIKQELDKYKNAVTELQLLMQSTPAANNRARRELPRFMNYTLNNAKNTNVTLSKKRKRRFLGFLLGVGSAIASGIAVSKVLHLEGEVNKIKSALLSTNKAVVSLSNGVSVLTSKVLDLKNYIDKQLLPIVNKQSCSISNIETVIEFQQKNNRLLEITREFSVNAGVTTPVSTYMLTNSELLSLINDMPITNDQKKLMSNNVQIVRQQSYSIMSIIKEEVLAYVVQLPLYGVIDTPCWKLHTSPLCTTNTKEGSNICLTRTDRGWYCDNAGSVSFFPQAETCKVQSNRVFCDTMNSLTLPSEVNLCNIDIFNPKYDCKIMTSKTDVSSSVITSLGAIVSCYGKTKCTASNKNRGIIKTFSNGCDYVSNKGVDTVSVGNTLYYVNKQEGKSLYVKGEPIINFYDPLVFPSDEFDASISQVNEKINQSLAFIRKSDELLHNVNAGKSTTNIMITTIIIVIIVILLLLIAVGLFLYCKAR

SEQ ID NO: 9275 - protein, 553 aa, Artificial Sequence
  derived and/or modified protein sequence (wt) from HRSV__AUC68577.1__F-del
MELMIHKSSAIFLTLAINALYLTSSQNITEEFYQSTCSAVSRGYFSALRTGWYTSVITIELSNIKETKCNGTDTKVKLIKQELDKYKNAVTELQLLMQNTPAVNNRARREAPQYMNYTVNTTKNLNVSISKKRKRRFLGFLLGVGSAIASGIAVSKVLHLEGEVNKIKNALLSTNKAVVSLSNGVSVLTSKVLDLKNYINNQLLPIVNQQSCRISNIETVIEFQQKNSRLLEITREFSVNAGVTTPLSTYMLTNSELLSLINDMPITNDQKKLMSSNVQIVRQQSYSIMSIIKEEVLAYVVQLPIYGVIDTPCWKLHTSPLCTTNIKEGSNICLTRTDRGWYCDNAGSVSFFPQADTCKVQSNRVFCDTMNSLTLPSEVSLCNTDIFNSKYDCKIMTSKTDISSSVITSLGAIVSCYGKTKCTASNKNRGIIKTFSNGCDYVSNKGVDTVSVGNTLYYVNKLEGKNLYVKGDPIINYYDPLVFPSDEFDASISQVNEKINQSLAFIRRSDELLHNVNTGKSTTNIMITTIIIVIIVVLLSLIAIGLLLYCKAK

SEQ ID NO: 9276 - protein, 553 aa, Artificial Sequence
  derived and/or modified protein sequence (wt) from HRSV__AUC68566.1__F-del
MELPIIKANAITTILIAVTFCFASSQNITEEFYQSTCSAVSKGYLSALRTGWYTSVITIELSNIKENKCNGTDAKVKLIKQELDKYKNAVTELQLLMQSTPAANNRARRELPRFMNYTLNNAKKTNVTLSKKRKRRFLGFLLGVGSAIASGIAVSKVLHLEGEVNKIKSALLSTNKAVVSLSNGVSVLTSKVLDLKNYIDKQLLPIVNKQSCSISNIETVIEFQQKNNRLLEITREFSVNAGVTTPVSTYMLTNSELLSLINDMPITNDQKKLMSNNVQIVRQQSYSIMSIIKEEVLAYVVQLPLYGVIDTPCWKLHTSPLCTTNTKEGSNICLTRTDRGWYCDNAGSVSFFPQADTCKVQSNRVFCDTMNSLTLPSEVNLCNIDIFNPKYDCKIMTSKTDVSSSVITSLGAIVSCYGKTKCTASNKNRGIIKTFSNGCDYVSNKGVDTVSVGNTLYYVNKQEGKSLYVKGEPIINFYDPLVFPSDEFDASISQVNEKINQSLAFIRKSNELLHNVNAGKSTTNIMITTIIIVIIVILLSLIAVGLLLYCKAR

SEQ ID NO: 9277 - protein, 553 aa, Artificial Sequence
  derived and/or modified protein sequence (wt) from HRSV__AUC68555.1__F-del
MELPILKTNAITTILAAATLCFASSQNITEEFYQSTCSAVSKGYLSALRTGWYTSVITIELSNIKENKCNGTDAKVKLIKQELDKYKNAVTELQLLMQSTPAANNRARRELPRFMNYTLNNTKNTNVTLSKKRKRRFLGFLLGVGSAIASGIAVSKVLHLEGEVNKIKSALLSTNKAVVSLSNGVSVLTSKVLDLKNYIDKQLLPIVNKQSCSISNIETVIEFQQKNNRLLEITREFSVNAGVTTPVSTYMLTNSELLSLINDMPITNDQKKLMSNNVQIVRQQSYSIMSIIKEEVLAYVVQLPLYGVIDTPCWKLHTSPLCTTNTKEGSNICLTRTDRGWYCDNAGSVSFFPQAETCKVQSNRVFCDTMNSLTLPSEVNLCNIDIFNPKYDCKIMTSKTDVSSSVITSLGAIVSCYGKTKCTASNKNRGIIKTFSNGCDYVSNKGVDTVSVGNTLYYVNKQEGKSLYVKGEPIINFYDPLVFPSDEFDASISQVNEKINQSLAFIRKSDELLHNVNAGKSTTNIMITTIIIVIIVILLSLIAVGLLLYCKAR

SEQ ID NO: 9278 - protein, 553 aa, Artificial Sequence
  derived and/or modified protein sequence (wt) from HRSV__AUC68478.1__F-del
MELLIHRSSAIFLTLAINALYLTSSQNITEEFYQSTCSAVSRGYFSALRTGWYTSVITIELSNIKETKCNGTDTKAKLIKQELDKYKNAVTELQLLMQNTPAANNRARREAPQYMNYTVNTTKNLNVSISKKRKRRFLGFLLGVGSAIASGIAVSKVLHLEGEVNKIKNALLSTNKAVVSLSNGVSVLTSKVLDLKNYINNQLLPIVNQQSCRISNIETVIEFQQKNSRLLEITREFSVNAGVTTPLSTYMLTNSELLSLINDMPITNDQKKLMSSNVQIVRQQSYSIMSIIKEEVLAYVVQLPIYGVIDTPCWKLHTSPLCTTNIKEGSNICLTRTDRGWYCDNAGSVSFFPQADTCKVQSNRVFCDTMNSLTLPSEVSLCNTDIFNSKYDCKIMTSKTDISSSVITSLGAIVSCYGKTKCTASNKNRGIIKTFSNGCDYVSNKGVDTVSVGNTLYYVNKLEGKNLYVKGEPIINYYDPLVFPSDEFDASISQVNEKINQSLAFIRRSDELLHNVNTGKSTTNIMITTIIIVIIVVLLSLIAIGLLLYCKAK

SEQ ID NO: 9279 - protein, 553 aa, Artificial Sequence
  derived and/or modified protein sequence (wt) from HRSV__AUC68445.1__F-del
MELPILKTNAITTILAAVTLCFASSQNITEEFYQSTCSAVSKGYLSALRTGWYTSVITIELSNIKENKCNGTDAKVKLIKQELDKYKNAVTELQLLMQSTPAANNRARRELPRFMSYTLNNTKNTNVTLSKKRKRRFLGFLLGVGSAIASGIAVSKVLHLEGEVNKIKSALLSTNKAVVSLSNGVSVLTSKVLDLKNYIDKQLLPIVNKQSCSISNIETVIEFQQKNNRLLEITREFSVNAGVTTPVSTYMLTNSELLSLINDMPITNDQKKLMSNNVQIVRQQSYSIMSIIKEEVLAYVVQLPLYGVIDTPCWKLHTSPLCTTNTKEGSNICLTRTDRGWYCDNAGSVSFFPQAETCKVQSNRVFCDTMNSLTLPSEVNLCNIDIFNPKYDCKIMTSKTDVSSSVITSLGAIVSCYGKTKCTASNKNRGIIKTFSNGCDYVSNKGVDTVSVGNTLYYVNKQEGKSLYVKGEPIINFYDPLVFPSDEFDASISQVNEKINQSLAFIRKSDELLHNVNAGKSTTNIMITTIIIVIIVILLSLIVVGLLLYCKAR

SEQ ID NO: 9280 - protein, 553 aa, Artificial Sequence
  derived and/or modified protein sequence (wt) from HRSV__AUC68500.1__F-del
MELMIHKSSAIFLTLAINALYLTSSQNITEEFYQSTCSAVSRGYFSALRTGWYTSVITIELSNIKETKCNGTDTKVKLIKQELDKYKNAVTELQLLMQNTPAVNNRARREAPQYMNYTINTTKNLNVSISKKRKRRFLGFLLGVGSAIASGIAVSKVLHLEGEVNKIKNALLSTNKAVVSLSNGVSVLTSKVLDLKNYINNQLLPIVNQQSCRISNIETVIEFQQKNSRLLEITREFSVNAGVTTPLSTYMLTNSELLSLINDMPITNDQKKLMSSNVQIVRQQSYSIMSIIKEEVLAYVVQLPIYGVIDTPCWKLHTSPLCTTNIKEGSNICLTRTDRGWYCDNAGSVSFFPQADTCKVQSNRVFCDTMNSLTLPSEVSLCNTDIFNSKYDCKIMTSKTDISSSVITSLGAIVSCYGKTKCTASNKNRGIIKTFSNGCDYVSNKGVDTVSVGNTLYYVNKLEGKNLYVKGEPIINYYDPLVFPSDEFDASISQVNEKINQSLAFIRRSDELLHNVNTGKSTTNIMITTIIIVIIVVLLSLIAIGLLLYCKAK

SEQ ID NO: 9281 - protein, 553 aa, Artificial Sequence
  derived and/or modified protein sequence (wt) from HRSV__AUC68522.1__F-del
MELPILKTNAITTILAAVTFCFASSQNITEEFYQSTCSAVSKGYLSALRTGWYTSVITIELSNIKENKCNGTDAKVKLIKQELDKYKNAVTELQLLMQSTPAANNRARRELPRFMNYTLNNTKNTNVTLSKKRKRRFLGFLLGVGSAIASGIAVSKVLHLEGEVNKIKSALLSTNKAVVSLSNGVSVLTSKVLDLKNYIDKQLLPIVNKQSCSISNIETVIEFQQKNNRLLEITREFSVNAGVTTPVSTYMLTNSELLSLINDMPITNDQKKLMSNNVQIVRQQSYSIMSIIKEEVLAYVVQLPLYGVIDTHCWKLHTSPLCTTNTKEGSNICLTRTDRGWYCDNAGSVSFFPQAETCKVQSNRVFCDTMNSLTLPSEVNLCNIDIFNPKYDCKIMTSKTDVSSSVITSLGAIVSCYGKTKCTASNKNRGIIKTFSNGCDYVSNKGVDTVSVGNTLYYVNKQEGKSLYVKGEPIINFYDPLVFPSDEFDASISQVNEKINQSLAFIRKSDELLHNVNAGKSTTNIMITTIIIVIIVILLSLIAVGLLLYCKAR

SEQ ID NO: 9282 - protein, 553 aa, Artificial Sequence
  derived and/or modified protein sequence (wt) from HRSV__AUC68291.1__F-del
MELPILKTNAITTILAAVTLCFASSQNITEEFYQSTCSAVSKGYLSALRTGWYTSVITIELSNIKENKCNGTDAKVKLIKQELDKYKNAVTELQLLMQSTPAANNRARRELPRFMNYTLNNTKNTNVTLSKKRKRRFLGFLLGVGSAIASGIAVSKVLHLEGEVNKIKSALLSTNKAVVSLSNGVSVLTSKVLDLKNYIDKQLLPIVNKQSCSISNIETVIEFQQKNNRLLEITREFSVNAGVTTPVSTYMLTNSELLSLINDMPITNDQKKLMSNNVQIVRQQSYSIMSIIKEEVLAYVVQLPLYGVIDTPCWKLHTSPLCTTNTKEGSNICLTRTDRGWYCDNAGSVSFFPQAETCKVQSNRVFCDTMNSLTLPSEVNLCNIDIFNPKYDCKIMTSKTDVSSSVITSLGAIVSCYGKTKCTASNKNRGIIKTFSNGCDYVSNKGVDTVSVGNTLYYVNKQEGKSLYVKGEPIINFYDPLVFPSDEFDASISQVNEKINQSLAFIRKSDELLHNVNVGKSTTNIMITTITIVITVILLLLIAVGLFLYCKAR

SEQ ID NO: 9283 - protein, 553 aa, Artificial Sequence
  derived and/or modified protein sequence (wt) from HRSV__AUC68149.1__F-del
MELPILKTNAITTILAAVTLCFASSQNITEEFYQSTCSAVSKGYFSALRTGWYTSVITIELSNIKENKCNGTDAKVKLIKQELDKYKNAVTELQLLMQSTPAANNRARRELPRFMNYTLNNTKNTNVTLSKKRKRRFLGFLLGVGSAIASGIAVSKVLHLEGEVNKIKSALLSTNKAVVSLSNGVSVLTSKVLDLKNYIDKQLLPIVNKQSCSISNIETVIEFQQKNNRLLEITREFSVNAGVTTPVSTYMLTNSELLSLINDMPITNDQKKLMSNNVQIVRQQSYSIMSIIKEEVLAYVVQLPLYGVIDTPCWKLHTSPLCTTNTKEGSNICLTRTDRGWYCDNAGSVSFFPQAETCKVQSNRVFCDTMNSLTLPSEVNLCNIDIFNPKYDCKIMTSKTDVSSSVITSLGAIVSCYGKTKCTASNKNRGIIKTFSNGCDYVSNKGVDTVSVGNTLYYVNKQEGKSLYVKGEPIINFYDPLVFPSDEFDASISQVNEKINQSLAFIRKSDELLHNVNAGKSTTNIMITTIIIVIIVILLSLIAVGLLLYCKAR

SEQ ID NO: 9284 - protein, 553 aa, Artificial Sequence
  derived and/or modified protein sequence (wt) from HRSV__AUC68094.1__F-del
MELPILKTNAITTILAAVTLCFASSQNITEEFYQATCSAVSKGYLSALRTGWYTSVITIELSNIKENKCNGTDAKVKLIKQELDKYKNAVTELQLLMQSTPAANNRARRELPRFMNYTLNNTKNTNVTLSKKRKRRFLGFLLGVGSAIASGIAVSKVPHLEGEVNKIKSALLSTNKAVVSLSNGVSVLTSKVLDLKNYIDKQLLPIVNKQSCSISNIETVIEFQQKNNRLLEITREFSVNAGVTTPVSTYMLTNSELLSLINDMPITNDQKKLMSNNVQIVRQQSYSIMSIIKEEVLAYVVQLPLYGVIDTPCWKLHTSPLCTTNTKEGSNICLTRTDRGWYCDNAGSVSFFPQAETCKVQSNRVFCDTMNSLTLPSEVNLCNIDIFNPKYDCKIMTSKTDVSSSVITSLGAIVSCYGKTKCTASNKNRGIIKTFSNGCDYVSNKGVDTVSVGNTLYYVNKQEGKSLYVKGEPIINFYDPLVFPSDEFDASISQVNEKINQSLAFIRKSDELLHNVNAGKSTTNIMITTIIIVIIVILLSLIAVGLLLYCKAR

SEQ ID NO: 9285 - protein, 553 aa, Artificial Sequence
  derived and/or modified protein sequence (wt) from HRSV__AMA67097.1__F-del
MELLIHRSSAVFLTLAINALYLTSSQNITEEFYQSTCSAVSRGYLSALRTGWYTSVITIELSNIKETKCNGTDTKVKLIKQELDKYKNAVTELQLLMQNTPAANNRARREAPQYMNYTINTTKNLNVSISKKRKRRFLGFLLGVGSAIASGIAVSKVLHLEGEVNKIKNALLSTNKAVVSLSNGVSVLTSKVLDLKNYINNQLLPIVNQQSCRISNIETVIEFQQKNSRLLEITREFSVNAGVTTPLSTYMLTNSELLSLINDMPITNDQKKLMSSNVQIVRQQSYSIMSIIKEEVLAYVVQLPIYGVIDTPCWKLHTSPLCTTNIKEGSNICLTRTDRGWYCDNAGSVSFFPQADTCKVQSNRVFCDTMNSLTLPSEVSLCNTDIFNSKYDCKIMTSKTDISSSVITSLGAIVSCYGKTKCTASNKNRGIIKTFSNGCDYVSNKGVDTVSVGNTLYYVNKLEGKNLYVKGEPIINYYDPLVFPSDEFDASISQVNEKINQSLAFIRRSDELLHNVNAGKSTTNIMITAIIIVIIVVLLSLIAIGLLLYCRAK

SEQ ID NO: 9286 - protein, 553 aa, Artificial Sequence
  derived and/or modified protein sequence (wt) from HRSV__AMA66866.1__F-del
MELPILKTNAITTILATVTLCFASSQNITEEFYQSTCSAVSKGYLSALRTGWYTSVITIELSNIKENKCNGTDAKVKLIKQELDKYKNAVTELQLLMQSTPAANNRARRELPRFMNYTLNNTKNTNVTLSKKRKRRFLGFLLGVGSAIASGIAVSKVLHLEGEVNKIKSALLSTNKAVVSLSNGVSVLTSKVLDLKNYIDKQLLPIVNKQSCSISNIETVIEFQQKNNRLLEITREFSVNAGVTTPVSTYMLTNSELLSLINDMPITNDQKKLMSNNVQIVRQQSYSIMSIIKEEVLAYVVQLPLYGVIDTPCWKLHTSPLCTTNTKEGSNICLTRTDRGWYCDNAGSVSFFPQAETCKVQSNRVFCDTMNSLTLPSEVNLCNIDIFNPKYDCKIMTSKTDVSSSVITSLGAIVSCYGKTKCTASNKNRGIIKTFSNGCDYVSNKGVDTVSVGNTLYYVNKQEGKSLYVKGEPIINFYDPLVFPSDEFDASISQVNEKINQSLAFIRKSDELLHNVNAGKSTTNIMITTIIIVIIVILLSLIAVGLLLYCKAR

SEQ ID NO: 9287 - protein, 553 aa, Artificial Sequence
  derived and/or modified protein sequence (wt) from HRSV__AMA66580.1__F-del
MELPILKANAITTILIAVTFCFASSQNITEEFYQSTCSAVSKGYLSALRTGWYTSVITIELSNIKENKCNGTDAKVKLIKQELDKYKNAVTELQLLMQSTPAANNRARRELPRFMNYTLNNAKKTNVTLSKKRKRRFLGFLLGVGSAIASGIAVSKVLHLEGEVNKIKSALLSTNKAVVSLSNGVSVLTSKVLDLKNYIDKQLLPIVNKQSCSISNIETVIEFQQKNNRLLEITREFSVNAGVTTPVSTYMLTNSELLSLINDMPITNDQKKLMSNNVQIVRQQSYSIMSIIKEEVLAYVVQLPLYGVIDTPCWKLHTSPLCTTNTKEGSNICLTRTDRGWYCDNAGSVSFFPQAETCKVQSNRVFCDTMNSLTLPSEVNLCNVDIFNPKYDCKIMTSKTDVSSSVITSLGAIVSCYGKTKCTASNKNRGIIKTFSNGCDYVSNKGVDTVSVGNTLYYVNKQEGKSLYVKGEPIINFYDPLVFPSDEFDASISQVNEKINQSLAFIRKSDELLHNVNAGKSTTNIMITTIIIVIIVILLSLIAVGLLLYCKAR

SEQ ID NO: 9288 - protein, 553 aa, Artificial Sequence
  derived and/or modified protein sequence (wt) from HRSV__AIZ95750.1__F-del
MELLIHRSSAIFLTIAINALYLTSSQNITEEFYQSTCSAVSRGYFSALRTGWYTSVITIELSNIKETKCNGTDTKVKLIKQELDKYKNAVTELQLLMQNTPAANNRARREAPQYMNYTINTTKNLNVSISKKRKRRFLGFLLGVGSAIASGIAVSKVLHLEGEVNKIKNALLSTNKAVVSLSNGVSVLTSKVLDLKNYINNQLLPIVNQQSCRISNIETVIEFQQKNSRLLEITREFSVNAGVTTPLSTYMLTNSELLSLINDMPITNDQKKLMSSNVQIVRQQSYSIMSIIKEEVLAYVVQLPIYGVIDTPCWKLHTSPLCTTNIKEGSNICLTRTDRGWYCDNAGSVSFFPQADTCKVQSNRVFCDTMNSLTLPSEVSLCNTDIFNSKYDCKIMTSKTDISSSVITSLGAIVSCYGKTKCTASNKNRGIIKTFSNGCDYVSNKGVDTVSVGNTLYYVNKLEGKNLYVKGEPIINYYDPLVFPSDEFDASISQVNEKINQSLAFIRRSDELLHNVNTGKSTTNIMITAIIIVIIVVLLSLIAIGLLLYCKAK

SEQ ID NO: 9289 - protein, 553 aa, Artificial Sequence
  derived and/or modified protein sequence (wt) from HRSV__AIZ95541.1__F-del
MELPILKTNAITTILAAVTLCFASSQNITEEFYQSTCSAVSKGYLSALRTGWYTSVITIELSNIKENKCNGTDAKVKLIKQELDKYKNAVTELQLLMQSTPAANNRARRELPRFMNYTLNNTKNTNVTLSKKRKRRFLGFLLGVGSAIASGIAVSKVLHLEGEVNKIKSALLSTNKAVVSLSNGVSVLTSKVLDLKNYIDKQLLPIVNKQSCSISNIETVIEFQQKNNRLLEITREFSVNAGVTTPVSTYMLTNSELLSLINDMPITNDQKKLMSNNVQIVRQQSYSIMSIIKEEVLAYVVQLPLYGVIDTPCWKLHTSPLCTTNTKEGSNICLTRTDRGWYCDNAGSVSFFPQAETCKVQSNRVFCDTMNSLTLPSEVNLCNIDIFNPKYDCKIMTSKTDVSSSVITSLGAIVSCYGKTKCTASNKNRGIIKTFSNGCDYVSNKGVDTVSVGNTLYYVNKQEGKSLYVKGEPIINFYDPLVFPSDEFDASISQVNEKINQSLAFIRKSDELLHNVNAGKSTTNIMITTIIIVIIVILLLLIAVGLFLYCKAR

SEQ ID NO: 9290 - protein, 553 aa, Artificial Sequence
  derived and/or modified protein sequence (wt) from HRSV__AIZ95519.1__F-del
MELPILKTNAITTIFAAVTLCFASSQNITEEFYQSTCSAVSKGYLSALRTGWYTSVITIELSNIKENKCNGTDAKVKLIKQELDKYKNAVTELQLLMQSTPAANNRARRELPRFMNYTLNNTKNTNVTLSKKRKRRFLGFLLGVGSAIASGIAVSKVLHLEGEVNKIKSALLSTNKAVVSLSNGVSVLTSKVLDLKNYIDKQLLPIVNKQSCSISNIETVIEFQQKNNRLLEITREFSVNAGVTTPVSTYMLTNSELLSLINDMPITNDQKKLMSNNVQIVRQQSYSIMSIIKEEVLAYVVQLPLYGVIDTPCWKLHTSPLCTTNTKEGSNICLTRTDRGWYCDNAGSVSFFPQAETCKVQSNRVFCDTMNSLTLPSEVNLCNIDIFNPKYDCKIMTSKTDVSSSVITSLGAIVSCYGKTKCTASNKNRGIIKTFSNGCDYVSNKGVDTVSVGNTLYYVNKQEGKSLYVKGEPIINFYDPLVFPSDEFDASISQVNEKINQSLAFIRKSDELLHNVNAGKSTTNIMITTIIIVIIVILLSLIAVGLLLYCKAR

SEQ ID NO: 9291 - protein, 553 aa, Artificial Sequence
  derived and/or modified protein sequence (wt) from HRSV__AHY21419.1__F-del
MELPILKTNAITTILAAVTLCFASSQNITEEFYQATCSAVSKGYLSALRTGWYTSVITIELSNIKENKCNGTDAKVKLIKQELDKYKNAVTELQLLMQSTPAANNRARRELPRFMNYTLNNTKNTNVTLSKKRKRRFLGFLLGVGSAIASGIAVSKVLHLEGEVNKIKSALLSTNKAVVSLSNGVSVLTSKVLDLKNYIDKQLLPIVNKQSCSISNIETVIEFQQKNNRLLEITREFSVNAGVTTPVSTYMLTNSELLSLINDMPITNDQKKLMSNNVQIVRQQSYSIMSIIKEEVLAYVVQLPLYGVIDTPCWKLHTSPLCTTNTKEGSNICLTRTDRGWYCDNAGSVSFFPQAETCKVQSNRVFCDTMNSLTLPSEVNLCNIDIFNPKYDCKIMTSKTDVSSSVITSLGAIVSCYGKTKCTASNKNRGIIKTFSNGCDYVSNKGVDTVSVGNTLYYVNKQEGKSLYVKGEPIINFYDPLVFPSDEFDASISQVNEKINQSLAFIRKSDELLHNVNAGKSTTNIMITTIIIVIIVILLSLIAVGLLLYCKAR

SEQ ID NO: 9292 - protein, 553 aa, Artificial Sequence
  derived and/or modified protein sequence (wt) from HRSV__AHY21331.1__F-del
MELLIHRSSAIFLTLAINALYLTSSQNITEEFYQSTCSAVSRGYFSALRTGWYTSVITIELSNIKETKCNGTDTKVKLIKQELDKYKNAVTELQLLMQNTPAVNNRARREAPQHMNYTINTTKNLNVSISKKRKRRFLGFLLGVGSAIASGIAVSKVLHLEGEVNKIKNALLSTNKAVVSLSNGVSVLTSKVLDLKNYINNQLLPIVNKQSCRISNIETVIEFQQKNSRLLEITREFSVNAGVTTPLSTYMLTNSELLSLINDMPITNDQKKLMSSNVQIVRQQSYSIMSIIKEEVLAYVVQLPIYGVIDTHCWKLHTSPLCTTNIKEGSNICLTRTDRGWYCDNAGSVSFFPQADTCKVQSNRVFCDTMNSLTLPSEVSLCNTDIFNSKYDCKIMTSKTDISSSVITSLGAIVSCYGKTKCTASNKNRGIIKTFSNGCDYVSNKGVDTVSVGNTLYYVNKLEGKNLYVKGEPIINYYDPLVFPSDEFDASISQVNEKINQSLAFIRRSDELLHNVNTGKSTTNIMITTIIIVIIVVLLSLIAIGLLLYCKAK

SEQ ID NO: 9293 - protein, 553 aa, Artificial Sequence
  derived and/or modified protein sequence (wt) from HRSV__AHY21165.1__F-del
MELMIHKSSAIFLTLAINALYLTSSQNITEEFYQSTCSAVSRGYFSALRTGWYTSVITIELSNIKETKCNGTDTKVKLIKQELDKYKNAVTELQLLMQNTPAVNNRARREAPQYMNYTINTTKNLNVSISKKRKRRFLGFLLGVGSAIASGIAVSKVLHLEGEVNKIKNALLSTNKAVVSLSNGVSVLTSKVLDLKNYINNQLLPIVNQQSCRISNIETVIEFQQKNSRLLEITREFSVNAGVTTPLSTYMLTNSELLSLINDMPITNDQKKLMSSNVQIVRQQSYSIMSIIKEEVLAYVVQLPIYGVIDTPCWKLHTSPLCTTNIKEGSNICLTRTDRGWYCDNAGSVSFFPQADTCKVQSNRVFCDTMNSLTLPSEVSLCNTDIFNSKYDCKIMTSKTDISSSVITSLGAIVSCYGKTKCTASNKNRGIIKTFSNGCDYVSNKGVDTVSVGNTLYYVNKLEGKNLYVKGDPIINYYDPLVFPSDEFDASISQVNEKINQSLAFIRRSDELLHNVNTGKSTTNIMITTIIIVIIVVLLSLIAIGLLLYCKAK

SEQ ID NO: 9294 - protein, 553 aa, Artificial Sequence
  derived and/or modified protein sequence (wt) from HRSV__AHY21143.1__F-del
MELPIIKANAITTILIAVTFCFASSQNITEEFYQSTCSAVSKGYLSALRTGWYTSVITIELSNIKENKCNGTDAKVKLIKQELDKYKNAVTELQLLMQSTPAANNRARRELPRFMNYTLNNAKKTNVTLSKKRKRRFLGFLLGVGSAIASGIAVSKVLHLEGEVNKIKSALLSTNKAVVSLSNGVSVLTSKVLDLKNYIDKQLLPIVNKQSCSISNIETVIEFQQKNNRLLEITREFSVNAGVTTPVSTYMLTNSELLSLINDMPITNDQKKLMSNNVQIVRQQSYSIMSIIKEEVLAYVVQLPLYGVIDTPCWKLHTSPLCTTNTKEGSNICLTRTDRGWYCDNAGSVSFFPQADTCKVQSNRVFCDTMNSLTLPSEVNLCNIDIFNPKYDCKIMTSKTDVSSSVITSLGAIVSCYGKTKCTASNKNRGIIKTFSNGCDYVSNKGVDTVSVGNTLYYVNKQEGKSLYVKGEPIINFYDPLVFPSDEFDASISQVNEKINQSLAFIRKSDELLHNVNAGKSTTNIMITTIIIVIIVILLSLIAVGLLLYCKAR

SEQ ID NO: 9295 - protein, 553 aa, Artificial Sequence
  derived and/or modified protein sequence (wt) from HRSV__AHY21132.1__F-del
MELLIHRSSAIFLTLAINALYLTSSQNITEEFYQSTCSAVSRGYFSALRTGWYTSVITIELSNIKETKCNGTDTKVKLIKQELDKYKNAVTELQLLMQNTPAANNRARREAPQYMNYTINTTKNLNVSISKKRKRRFLGFLLGVGSAIASGIAVSKVLHLEGEVNKIKNALLSTNKAVVSLSNGVSVLTSKVLDLKNYINNQLLPIVNQQSCRISNIETVIEFQQKNSRLLEITREFSVNAGVTTPLSTYMLTNSELLSLINDMPITNDQKKLMSSNVQIVRQQSYSIMSIIKEEVLAYVVQLPIYGVIDTPCWKLHTSPLCTTNIKEGSNICLTRTDRGWYCDNAGSVSFFPQADTCKVQSNRVFCDTMNSLTLPSEVSLCNTDIFNSKYDCKIMTSKTDISSSVITSLGAIVSCYGKTKCTASNKNRGIIKTFSNGCDYVSNKGVDTVSVGNTLYYVNKLEGKNLYVKGEPIINYYDPLVFPSDEFDASISQVNEKINQSLAFIRRSDELLHNVNTGKSTTNIMITTIIIVIIVVLLSLIAIGLLLYCKAK

SEQ ID NO: 9296 - protein, 553 aa, Artificial Sequence
  derived and/or modified protein sequence (wt) from HRSV__AGG39478.1__F-del
MELLIHRSSAIFLTLAINALYLTSSQNITEEFYQSTCSAVSRGYFSALRTGWYTSVITIELSNIKETKCNGTDTKVKLIKQELDKYKNAVTELQLLMQNTPAANNRARREAPQYMNYTINTTKNLNVSISKKRKRRFLGFLLGVGSAIASGIAVSKVLHLEGEVNKIKNALLSTNKAVVSLSNGVSVLTSKVLDLKNYINNQLLPIVNQQSCRISNIETVIEFQQKNSRLLEITREFSVNAGVTTPLSTYMLTNSELLSLINDMPITNDQKKLMSSNVQIVRQQSYSIMSIIKEEVLAYVVQLPIYGVIDTPCWKLHTSPLCTTNIKEGSNICLTRTDRGWYCDNAGSVSFFPQADTCKVQSNRVFCDTMNSLTLPSEVSLCNTDIFNSKYDCKIMTSKTDISSSVITSLGAIVSCYGKTKCTASNKNRGIIKTFSNGCDYVSNKGVDTVSVGNTLYYVNKLEGKNLYVKGEPIINYYDPLVFPSDEFDASISQVNEKINQSLAFIRRSDELLHNVNAGKSTTNIMITAIIIVIIVVLLSLIAIGLLLYCKAK

SEQ ID NO: 9297 - protein, 553 aa, Artificial Sequence
  derived and/or modified protein sequence (wt) from HRSV__ATV93506.1__F-del
MELPILKTNAITTILAAVTLCFASSQNITEEFYQSTCSAVSKGYLSALRTGWYTSVITIELSNIKENKCNGTDAKVKLIKQELDKYKNAVTELQLLMQSTPAANSRARRELPRFMNYTLNNTKNTNATLSKKRKRRFLGFLLGVGSAIASGIAVSKVLHLEGEVNKIKSALLSTNKAVVSLSNGVSVLTSKVLDLKNYIDKQLLPIVNKQSCSISNIETVMEFQQKNNRLLEITREFSVNAGVTTPVSTYMLTNSELLSLINDMPITNDQKKLMSSNVQIVRQQSYSIMSIIKEEVLAYVVQLPLYGVIDTPCWKLHTSPLCTTNTKEGSNICLTRTDRGWYCDNAGSVSFFPQAETCKVQSNRVFCDTMNSLTLPSEVNLCNIDIFNPKYDCKIMTSKTDVSSSVITSLGAIVSCYGKTKCTASNKNRGIIKTFSNGCDYVSNKGVDTVSVGNTLYYVNKQEGKSLYVKGEPIINFYDPLVFPSDEFDASISQVNEKINQSLAFIRKSDELLHNVNAGKSTTNIMITTIIIVIIVILLALIAVGLLLYCKAR

SEQ ID NO: 9298 - protein, 553 aa, Artificial Sequence
  derived and/or modified protein sequence (wt) from HRSV__ATV93509.1__F-del
MELPILKTNAITTILAAVILCFASSQNITEEFYQSTCSAVSKGYLSALRTGWYTSVITIELSNIKENKCNGTDAKVKLIKQELDKYKNAVTELQLLMQSTPAANSRARRELPRFMNYTLNNAKNTNVTLSKKRKRRFLGFLLGVGSAIASGIAVSKVLHLEGEVNKIKSALLSTNKAVVSLSNGVSVLTSKVLDLKNYIDKQLLPIVNKQSCSISNIETVIEFQQKNNRLLEITREFSVNAGVTTPVSTYMLTNSELLSLINDMPITNDQKKLMSSNVQIVRQQSYSIMSIIKEEVLAYVVQLPLYGVIDTPCWKLHTSPLCTTNTKEGSNICLTRTDRGWYCDNAGSVSFFPQAETCKVQSNRVFCDTMNSLTLPSEVNLCNIDIFNPKYDCKIMTSKTDVSSSVITSLGAIVSCYGKTKCTASNKNRGIIKTFSNGCDYVSNKGVDTVSVGNTLYYVNKQEGKSLYVKGEPIINFYDPLVFPSDEFDASISQVNEKINQSLAFIRKSDELLHNVNAGKSTTNIMITTIIIVIIVILLALIAVGLLLYCKAR

SEQ ID NO: 9299 - protein, 553 aa, Artificial Sequence
  derived and/or modified protein sequence (wt) from HRSV__AIZ95717.1__F-del
MELPTIKANAITTILIAVTFCFASSQNITEEFYQSTCSAVSKGYLSALRTGWYTSVITIELSNIKENKCNGTDAKVKLIKQELDKYKNAVTELQLLMQSTPAANNRARRELPRVMNYTLNNAKKTNVTLSKKRKRRFLGFLLGVGSAIASGIAVSKVLHLEGEVNKIKSALLSTNKAVVSLSNGVSVLTSKVLDLKNYIDKQLLPIVNKQSCSISNIETVIEFQQKNNRLLEITREFSVNAGVTTPVSTYMLTNSELLSLINDMPITNDQKKLMSNNVQIVRQQSYSIMSIIKEEVLAYVVQLPLYGVIDTPCWKLHTSPLCTTNTKEGSNICLTRTDRGWYCDNAGSVSFFPQADTCKVQSNRVFCDTMNSLTLPSEVNLCNIDIFNPKYDCKIMTSKTDVSSSVITSLGAIVSCYGKTKCTASNKNRGIIKTFSNGCDYVSNKGVDTVSVGNTLYYVNKQEGKSLYVKGEPIINFYDPLVFPSDEFDASISQVNEKINQSLAFIRKSDELLHNVNAGKSTTNIMITTIIIVIIVILLSLIAVGLLLYCKAR

SEQ ID NO: 9300 - protein, 553 aa, Artificial Sequence
  derived and/or modified protein sequence (wt) from HRSV__ATV81354.1__F-del
MDLPILKTNAITTILATVTLCFASSQNITEEFYQSTCSAVSKGYLSALRTGWYTSVITIELSNIKENKCNGTDAKVKLIKQELDKYKNAVTELQLLMQSTPASNNRARRELPRFMNYTLNNTKNTNITLSKKRKRRFLGFLLGVGSAIASGIAVSKVLHLEGEVNKIKSALLSTNKAVVSLSNGVSVLTSKVLDLKNYIDKQLLPIVNKQSCSISNIETVIEFQQKNNRLLEITREFSVNAGVTTPVSTYMLTNSELLSLINDMPITNDQKKLMSNNVQIVRQQSYSIMSIIKEEVLAYVVQLPLYGVIDTPCWKLHTSPLCTTNTKEGSNICLTRTDRGWYCDNAGSVSFFPQAETCKVQSNRVFCDTMNSLTLPSEVNLCNIDIFNPKYDCKIMTSKTDVSSSVITSLGAIVSCYGKTKCTASNKNRGIIKTFSNGCDYVSNKGVDTVSVGNTLYYVNKQEGKSLYVKGEPIINFYDPLVFPSDEFDASISQVNEKINQSLAFIRKSDELLHNVNAGKSTTNIMITTIIIVIVVILLSLIAVGLLLYCKAR

SEQ ID NO: 9301 - protein, 553 aa, Artificial Sequence
  derived and/or modified protein sequence (wt) from HRSV__ART28317.1__F-del
MELPILKTNAITTIFAAVTLCFASSQNITEEFYQSTCSAVSKGYLSALRTGWYTSVITIELSNIKENKCNGTDTKVKLIKQELDKYKNAVTELQLLMQSTPAANNRARRELPRFMNYTLNNTKNNNVTLSKKRKRRFLGFLLGVGSAIASGIAVSKVLHLEGEVNKIKSALLSTNKAVVSLSNGVSVLTSKVLDLKNYIDKQLLPIVNKQSCSISNIGTVIEFQQKNNRLLEITREFSVNAGVTTPVSTYMLTNSELLSLINDMPITNDQKKLMSNNVQIVRQQSYSIMSIIKEEVLAYVVQLPLYGVIDTPCWKLHTSPLCTTNTKEGSNICLTRTDRGWYCDNAGSVSFFPKAETCKVQSNRVFCDTMNSLTLPSEVNLCNIDIFNPKYDCKIMTSKTDVSSSVITSLGAIVSCYGKTKCTASNKNRGIIKTFSNGCDYVSNKGVDTVSVGNTLYYVNKQEGKSLYVKGEPIINFYDPLVFPSDEFDASISQVNEKINQSLAFIRKSDELLHNVNVGKSTTNIMITTIIIVIIVILLLLIAVGLFLYCKAR

SEQ ID NO: 9302 - protein, 553 aa, Artificial Sequence
  derived and/or modified protein sequence (wt) from HRSV__BBA57901.1__F-del
MELLIHRSSAIFLTLAINALYLTSSQNITEEFYQSTCSAVSRGYLSALRTGWYTSVITIELSNIKETKCNGTDTKVKLIKQELDKYKNAVTELQLLMQNTPAVNNRARREAPQYMNYTINTTKNLNVSISKKRKRRFLGFLLGVGSAIASGIAVSKVLHLEGEVNKIKNALQLTNKAVVSLSNGVSVLTSRVLDLKNYINNQLLPMVNRQSCRISNIETVIEFQQKNSRLLEITREFSVNAGVTTPLSTYMLTNSELLSLINDMPITNDQKKLMSSNVQIVRQQSYSIMSIIKEEVLAYVVQLPIYGVIDTPCWKLHTSPLCTTNIKEGSNICLTRTDRGWYCDNAGSVSFFPQADTCKVQSNRVFCDTMNSLTLPSEVSLCNTDIFNSKYDCKIMTSKTDISSSVITSLGAIVSCYGKTKCTASNKNRGIIKTFSNGCDYVSNKGVDTVSVGNTLYYVNKLEGKNLYVKGEPIINYYDPLVFPSDEFDASISQVNEKINQSLAFIRRSDELLHNVNTGKSTTNIMITAIIIVIIVVLLSLIAIGLLLYCKAK

SEQ ID NO: 9303 - protein, 553 aa, Artificial Sequence
  derived and/or modified protein sequence (wt) from HRSV__ASZ70099.1__F-del
MELPILKTNAITTILAAVTLCFASSQNITEEFYQSTCSAVSKGYLSALRTGWYTSVITIELSNIKENKCNGTDAKVKLIKQELDKYKNAVTELQLLMQSTPAANSRARRELPRFMNYTLNNNKNTNVTLSKKRKRRFLGFLLGVGSAIASGIAVSKVLHLEGEVNKIKSALLSTNKAVVSLSNGVSVLTSKVLDLKNYIDKQLLPIVNKQSCSISNIETVIEFQQKNNRLLEITREFSVNAGVTTPVSTYMLTNSELLSLINDMPITNDQKKLMSSNVQIVRQQSYSIMSIIKEEVLAYVVQLPLYGVIDTPCWKLHTSPLCTTNTKEGSNICLTRTDRGWYCDNAGSVSFFPQAETCKVQSNRVFCDTMNSLTLPSEVNLCNIDIFNPKYDCKIMTSKTDVSSSVITSLGAIVSCYGKTKCTASNKNRGIIKTFSNGCDYVSNKGVDTVSVGNTLYYVNKQEGKSLYVKGEPIINFYDPLVFPSDEFDASISQVNEKINQSLAFIRKSDELLHNVNAGKSTTNIMITTIIIVIIVILLALIAVGLLLYCKAR

SEQ ID NO: 9304 - protein, 553 aa, Artificial Sequence
  derived and/or modified protein sequence (wt) from HRSV__ART28361.1__F-del
MELPILKTNAITTILAAVTLCFASSQNITEEFYQSTCSAVSKGYLSALRTGWYTSVITIELSNIKENKCNGTDAKVKLIKQELDKYKNAVTELQLLMQSTPAANSRARRELPRFMNYTLNNTKTTNVTLSKKRKRRFLGFLLGVGSAIASGIAVSKVLHLEGEVNKIKSALLSTNKAVVSLSNGVSVLTSKVLDLKNYIDKQLLPIVNKQSCSISNIETVIEFQQKNNRLLEITREFSVNAGVTTPVSTYMLTNSELLSLINDMPITNDQKKLMSSNVQIVRQQSYSIMSIIKEEVLAYVVQLPLYGVIDTPCWKLHTSPLCTTNTKEGSNICLTRTDRGWYCDNAGSVSFFPQAETCKVQSNRVFCDTMNSLTLPSEVNLCNIDIFNPKYDCKIMTSKTDVSSSVITSLGAIVSCYGKTKCTASNKNRGIIKTFSNGCDYVSNKGVDTVSVGNTLYYVNKQEGKSLYVKGEPIINFYDPLVFPSDEFDASISQVNEKINQSLAFIRKSDELLHNVNAGKSTTNIMITTIIIVIIVIVLALIAVGLLLYCKAR

SEQ ID NO: 9305 - protein, 553 aa, Artificial Sequence
  derived and/or modified protein sequence (wt) from HRSV__AQX36844.1__F-del
MELPILKTNAITTILAAVTLCFASSQNITEEFYQSTCSAVSKGYLSALRTGWYTSVITIELSNIKENKCNGTDAKVKLIKQELDKYKNAVTELQLLMQSTPAANSRARRELPRFMNYTLNNTKNTNVTLSKKRKRRFLGFLLGVGSAIASGIAVSKVLHLEGEVNKIKSALLSTNKAVVSLSNGVSVLTSKVLDLKNYIDKQLLPIVNKQSCSISNIETVIEFQQKNNRLLEITREFSVNAGVTTPVSTYMLTNSELLSLINDMPITNDQKKLMSSNVQIVRQQSYSIMSIIKEEVLAYVVQLPLYGVIDTPCWKLHTSPLCTTNTKEGSNICLTRTDRGWYCDNAGSVSFFPQAETCKAQSNRVFNNTITSLTLPSEVNLCNIDIFNPKYDCKIMTSKTDVSSSVITSLGAIVSCYGKTKCTASNKNRGIIKTFSNGCDYVSNKGVDTVSVGNTLYYVNKQEGKSLYVKGEPIINFYDPLVFPSDEFDASISQVNEKINQSLAFIRKSDELLHNVNAGKSTTNIMITTIIIVIIVILLALIAVGLLLYCKAR

SEQ ID NO: 9306 - protein, 553 aa, Artificial Sequence
  derived and/or modified protein sequence (wt) from HRSV__ASK05520.1__F-del
MELLIHRSSAIFLTLAINALYLTSSQNITEEFYQSTCSAVSRGYLSALRTGWYTSVITIELSNIKETKCNGTDTKVKLIKQELDKYKNAVTELQLLMQNTPAVNNRARREAPQHMNYTINTTKNLNVSISKKRKRRFLGFLLGVGSAIASGIAVSKVLHLEGEVNKIKNALQLTNKAVVSLSNGVSVLTSKVLDLKNYINNQLLPIVNQQSCRISNIETVIEFQQKNSRLLEITREFSVNAGVTTPLSTYMLTNSELLSLINDMPITNDQKKLMSSNVQIVRQQSYSIMSIIKEEVLAYVVQLPIYGVIDTPCWKLHTSPLCTTNIKEGSNICLTRTDRGWYCDNAGSVSFFPQADTCKVQSNRVFCDTMNSLTLPSEVSLCNTDIFNSKYDCKIMTSKTDISSSVITSLGAIVSCYGKTKCTASNKNRGIIKTFSNGCDYVSNKGVDTVSVGNTLYYVNKLEGKNLYVKGEPIINYYDPLVFPSDEFDASISQVNEKINQSLAFIRRSDELLHNVNTGKSTTNIMITTIIIVIIVVLLSLIAIGLLLYCKAK

SEQ ID NO: 9307 - protein, 553 aa, Artificial Sequence
  derived and/or modified protein sequence (wt) from HRSV__ART28427.1__F-del
MELPILKTNAITTILAAVTLCFASSQNITEEFYQSTCSAVSKGYLSALRTGWYTSVITIELSNIKENKCNGTDAKVKLIKQELDKYKNAVTELQLLMQSTPAANSRARRELPRFMNYTLNNTKNTNVTLSKKRKRRFLEFLLGVGSAIASGIAVSKVLHLEGEVNKIKSALLSTNKAVVSLSNGVSVLTSKVLDLKNYIDKQLLPIVNKQSCSISNIETVIEFQQKNNRLLEITREFSVNAGVTTPVSTYMLTNSELLSLINDMPITNDQKKLMSNNVQIVRQQSYSIMSIIKEEVLAYVVQLPLYGVIDTPCWKLHTSPLCTTNTKEGSNICLTRTDRGWYCDNAGSVSFFPQADTCKVQSNRVFCDTMNSLTLPSEVNLCNIDIFNPKYDCKIMTSKTDVSSSVITSLGAIVSCYGKTKCTASNKNRGIIKTFSNGCDYVSNKGVDTVSVGNTLYYVNKQEGKSLYVKGEPIINFYDPLVFPSDEFDASISQVNEKINQSLAFIRKSDELLHNVNAGKSTTNIMITTIIIVIIVILLSLIAVGLLLYCKAR

SEQ ID NO: 9308 - protein, 553 aa, Artificial Sequence
  derived and/or modified protein sequence (wt) from HRSV__ART28297.1__F-del
MELPILKTNAITTILAAVTLCFASSQNITEEFYQSTCSAVSKGYLSALRTGWYTSVITIELSNIKENKCNGTDAKVKLIKQELDKYKNAVTELQLLMQSTPAANSRARRELPRFMNYTLNNTKNTNVTLSKKRKRRFLGFLLGVGSAIASGIAVSKVLHLEGEVNKIKSALLSTNKAVVSLSNGVSVLTSKVLDLKNYIDKQLLPIVNKQSCSISNIETVIEFQQKNNRLLEITREFSVNAGVTTPVSTYMLTNSELLSLINDMPITNDQKKLMSSNVQIVRQQSYSIMSIIKEEVLAYVVQLPLYGVIDTPCWKLHTSPLCTTNTKEGSNICLTRTDRGWYCDNAGSVSFFPQAETCKVQSNRVFCDTMNSLTLPSEVNLCNIDIFNPKYDCKIMTSKTDVSSSVITSLGAIVSCYGKTKCTASNKNRGIIKTFSNGCDYVSNKGVDTVSVGNTLYYVNKQEGKSLYVKGEPIINFYDPLVFPSDEFDASISQVNEKINQSLSFIRKSDELLHNVNVGKSTTNIMITTIIIVIIVILLALIAVGLLLYCKAR

SEQ ID NO: 9309 - protein, 553 aa, Artificial Sequence
  derived and/or modified protein sequence (wt) from HRSV__ART28328.1__F-del
MDSPILKTNAITAILAAVSLCFASSQNITEEFYQSTCSAVSKGYLSALRTGWYTSVITIELSNIKENKCNGTDAKVKLIKQELDKYKNAVTELQLLMQSTPAANNRARRELPRFMNYTLNNTKNNNITLSKKRKRRFLGFLLGVGSAIASGIAVSKVLHLEGEVNKIKSALLSTNKAVVSLSNGVSVLTSKVLDLKNYIDKQLLPIVNKQSCSISNIETVIEFQQKNNRLLEITREFSVNAGVTTPVSTYMLTNSELLSLINDMPITNDQKKLMSNNVQIVRQQSYSIMSIIKEEVLAYVVQLPLYGVIDTPCWKLHTSPLCTTNTKEGSNICLTRTDRGWYCDNAGSVSFFPQAETCKVQSNRVFCDTMNSLTLPSEVNLCNIDIFNPKYDCKIMTSKTDVSSSVITSLGAIVSCYGKTKCTASNKNRGIIKTFSNGCDYVSNKGVDTVSVGNTLYYVNKQEGKSLYVKGEPIINFYDPLVFPSDEFDASISQVNEKINQSLAFIRKSDELLHNVNVGKSTTNIMITTIIIVIIVILLLLIAVGLFLYCKAR

SEQ ID NO: 9310 - protein, 553 aa, Artificial Sequence
  derived and/or modified protein sequence (wt) from HRSV__ARQ15966.1__F-del
MELPILKTNAITTILAAVTLCFASSQNITEEFYQSTCSAVSKGYLSALRTGWYTSVITIELSNIKENKCNGTDAKVKLIKQELDKYKNAVTELQLLMQSTPAANSRARRELPRFMNYTLYNTKNTNVTLSKKRKRRFLGFLLGVGSAIASGIAVSKVLHLEGEVNKIKSALLSTNKAVVSLSNGVSVLTSKVLDLKNYIDKQLLPIVNKQSCSISNIETVIEFQQKNNRLLEITREFSVNAGVTTPVSTYMLTNSELLSLINDMPITNDQKKLMSSNVQIVRQQSYSIMSIIKEEVLAYVVQLPLYGVIDTPCWKLHTSPLCTTNTKEGSNICLTRTDRGWYCDNAGSVSFFPQAETCKVQSNRVFCDTMNSLTLPSEVNLCNIDIFNPKYDCKIMTSKTDVSSSVITSLGAIVSCYGKTKCTASNKNRGIIKTFSNGCDYVSNKGVDTVSVGNTLYYVNKQEGKSLYVKGEPIINFYDPLVFPSDEFDASISQVNEKINQSLAFIRKSDELLHNVNAGKSTTNIMITTIIIVIIVILLALIAVGLLLYCKAR

SEQ ID NO: 9311 - protein, 553 aa, Artificial Sequence
  derived and/or modified protein sequence (wt) from HRSV__ARN61507.1__F-del
MELPILKTNAITTILAAVTLCFASSQNITEEFYQSTCSAVSKGYLSALRTGWYTSVITIELSNIKENKCNGTDAKVKLIKQELDKYKNAVTELQLLMQSTPAANSRARRELPRFMNYTLNNTKNTNVTLSKKRKRRFLGFLLGVGSAIASGIAVSKVLHLEGEVNKIKSALLSTNKAVVSLSNGVSVLTSKVLDLKNYIDKQLLPIVNKQSCSISNIETVIEFQQKNNRLLEITREFSVNAGVTTPVSTYMLTNSELLSLINDMPITNDQKKLMSSNVQIVRQQSYSIMSIIKEEVLAYVVQLPLYGVIDTPCWKLHTSPLCTTNTKEGSNICLTRTDRGWYCDNAGSVSFFPQAETCKVQSNRVFCDTMNSLTLPSEVNLCNIDIFNPKYDCKIMTSKTDVSSSVITSLGAIVSCYGKTKCTASNKNRGIIKTFSNGCDYVSNKGVDTVSVGNTLYYVNKQEGKGLYVKGEPIINFYDPLVFPSDEFDASISQVDEKINQSLAFLRKSDELLHNVNAGKSTTNIMITTIIIVIIVILLALIAVGLLLYCKAR

SEQ ID NO: 9312 - protein, 553 aa, Artificial Sequence
  derived and/or modified protein sequence (wt) from HRSV__ARA15413.1__F-del
MELLIHRSSAIFLTLAINALYLTSSQNITEEFYQSTCSAVSRGYLSALRTGWYTSVITIELSNIKETKCNGTDTKVKLIKQELDKYKNAVTELQLLMQNTPAVNNRARREAPQYMNYTINTTKNLNVSISKKRKRRFLGFLLGVGSAIASGIAVSKVLHLEGEVNKIKSALQLTNKAVVSLSNGVSVLTSKVLDLKNYINNQLLPIVNQQSCRISNIETVIEFQQKNSRLLEITREFSVNAGVTTPLSTYMLTNSELLSLINDMPITNDQKKLMSSNVQIVRQQSYSIMSIIKEEVLAYVVQLPIYGVIDTPCWKLHTSPLCTTNIKEGSNICLTRTDRGWYCDNAGSVSFFPQADTCKVQSNRVFCDTMNSLTLPSEVSLCNTDIFNSKYDCKIMTSKTDISSSVITSLGAIVSCYGKTKCTASNKNRGIIKTFSNGCDYVSNKGVDTVSVGNTLYYVNKLEGKNLYVKGEPIINYYDPLVFPSDEFDASISQVNEKINQSLAFIRRSDELLHNVNTGKSTTNIMITAIIIVIIVVLLSLIAIGLLLYCKAK

SEQ ID NO: 9313 - protein, 553 aa, Artificial Sequence
  derived and/or modified protein sequence (wt) from HRSV__AGG39394.1__F-del
MELPILKANAITTILAAVTFCFASSQNITEEFYQSTCSAVSKGYLSALRTGWYTSVITIELSNIKENKCNGTDAKVKLIKQELDKYKNAVTELQLLMQSTSAANNRARRELPRFMNYTLNNTKKTNVTLSKKRKRRFLGFLLGVGSAIASGIAVSKVLHLEGEVNKIKSALLSTNKAVVSLSNGVSVLTSKVLDLKNYIDKQLLPIVNKQSCRISNIETVIEFQQKNNRLLEITREFSVNAGVTTPVSTYMLTNSELLSLINDMPITNDQKKLMSNNVQIVRQQSYSIMSIIKEEVLAYVVQLPLYGVIDTPCWKLHTSPLCTTNTKEGSNICLTRTDRGWYCDNAGSVSFFPQAETCKVQSNRVFCDTMNSLTLPSEVNLCNVDIFNPKYDCKIMTSKTDVSSSVITSLGAIVSCYGKTKCTASNKNRGIIKTFSNGCDYVSNKGVDTVSVGNTLYYVNKQEGKSLYVKGEPIINFYDPLVFPSDEFDASISQVNEKINQSLAFIRKSDELLHHVNAGKSTTNIMITTIIIVIIVILLSLIAVGLLLYCKAR

SEQ ID NO: 9314 - protein, 553 aa, Artificial Sequence
  derived and/or modified protein sequence (wt) from HRSV__APW78845.1__F-del
MELLIHRPSAIFLTLAINALYLTSSQNITEEFYQSTCSAVSRGYLSALRTGWYTSVITIELSNIKETKCNGTDTKVKLIKQELDKYKNAVTELQLLMQNTPAVNNRARREAPQYMNYTINTTKNPNVSISKKRKRRFLGFLLGVGSAIASGIAVSKVLHLEGEVNKIKNALQSTNKAVVSLSNGVSVLTSKVLDLKNYINNQLLPIVNQQSCRISNIETVIEFQQKNSRLLEITREFSVNAGVTTPLSTYMLTNSELLSLINDMPITNDQKKLMSSNVQIVRQQSYSIMSIIKEEVLAYVVQLPIYGVIDTPCWKLHTSPLCTTNIKEGSNICLTRTDRGWYCDNAGSVSFFPQADTCKVQSNRVFCDTMNSLTLPSEVSLCNTDIFNSKYDCKIMTSKTDISSSVITSLGAIVSCYGKTKCTASNKNRGIIKTFSNGCDYVSNKGVDTVSVGNTLYYVNKLEGKNLYVKGEPIINYYDPLVFPSDEFDASISQVNEKINQSLAFIRRSDELLHNVNTGKSTTNIMITAIIIVIIVVLLSLIAIGLLLYCKAK

SEQ ID NO: 9315 - protein, 553 aa, Artificial Sequence
  derived and/or modified protein sequence (wt) from HRSV__APW78867.1__F-del
MELLIHRSSAIFLTLAINALYLTSSQNITEEFYQSTCSAVSRGYLSALRTGWYTSVITIELSNIKETKCNGTDTKVKLIKQELDKYRNAVTELQLLMQNTPAANNRARREAPQYMNYTINTTKNLNVSISKKRKRRFLGFLLGVGSAIASGIAVSKVLHLEGEVNKIKNALLSTNKAVVSLSNGVSVLTSKVLDLKNYINNQLLPIVNQQSCRISNIETVIEFQQKNSRLLEITREFSVNAGVTTPLSTYMLTNSELLSLINDMPITNDQKKLMSSNAQIVRQQSYSIMSIIKEEVLAYVVQLPIYGVIDTPCWKLHTSPLCTTNIKEGSNICLTRTDRGWYCDNAGSVSFFPQADTCKVQSNRVFCDTMNSLTLPSEVSLCNTDIFNSKYDCKIMTSKTDISSSVITSLGAIVSCYGKTKCTASNKNRGIIKTFSNGCDYVSNKGVDTVSVGNTLYYVNKLEGKNLYVKGEPIINYYDPLVFPSDEFDASISQVNEKINQSLAFIRRSDELLHNVNTGKSTTNIMITAIIIVIIVVLLSLIAIGLLLYCKAK

SEQ ID NO: 9316 - protein, 553 aa, Artificial Sequence
  derived and/or modified protein sequence (wt) from HRSV__APW78900.1__F-del
MELLIHRSSAIFLTLAINALYLTSSQNITEEFYQSTCSAVSRGYLSALRTGWYTSVITIELSNIKETKCNGTDTKVKLIKQELDKYKNAVTELQLLMQNTPAVNNRARREAPQYMNCTINTTKNLNVSISKKRKRRFLGFLLGVGSAIASGIAVSKVLHLEGEVNKIKNALQLTNKAVVSLSNGVSVLTSKVLDLKNYINNQLLPIVNQQSCRISNIETVIEFQQKNSRLLEITREFSVNAGVTTPLSTYMLTNSELLSLINDMPITNDQKKLMSSNVQIVRQQSYSIMSIIKEEVLAYVVQLPIYGVIDTPCWKLHTSPLCTTNIKEGSNICLTRTDRGWYCDNAGSVSFFPQADTCKVQSNRVFCDTMNSLTLPSEVSLCNTDIFNSKYDCKIMTSKTDISSSVITSLGAIVSCYGKTKCTASNKNRGIIKTFSNGCDYVSNKGVDTVSVGNTLYYVNKLEGKNLYVKGEPIINYYDPLVFPSDEFDASISQVNEKINQSLAFIRRSDELLHNVNTGKSTTNIMITAIIIVIIVVLLSLIAIGLLLYCKAK

SEQ ID NO: 9317 - protein, 553 aa, Artificial Sequence
  derived and/or modified protein sequence (wt) from HRSV__APW78878.1__F-del
MELLIHRSSAIFLTLAINALYLTSSQNITEEFYQSTCSAVSRGYLSALRTGWYTSVITIELSNIKETKCNGTDTKVKLIKQELDKYKNAVTELQLLMQNTQAANNRARREAPQYMNYTINTTKNLNVSISKKRKRRFLGFLLGVGSAIASGIAVSKVLHLEGEVNKIKNALLSTNKAVVSLSNGVSVLTSKVLDLKNYINNQLLPIVNQQSCRISNIETVIEFQQKNSRLLEITREFSVNAGVTTPLSTYMLTNSELLSLINDMPITNDQKKLMSSNVQIVRQQSYSIMSIIKEEVLAYVVQLPIYGVIDTPCWKLHTSPLCTTNIKEGSNICLTRTDRGWYCDNAGSVSFFPQADTCKVQSNRVFCDTMNSLTLPSEVSLCNTDIFNSKYDCKIMTSKTDISSSVITSLGAIVSCYGKTKCTASNKNRGIIKTFSNGCDYVSNKGVDTVSVGNTLYYVNKLEGKNLYVKGEPIINYYDPLVFPSDEFDASISQVNEKINQSLAFIRRSDELLHNVNTGKSTTNIMITAIIIVIIVVLLSLIAIGLLLYCKAK

SEQ ID NO: 9318 - protein, 553 aa, Artificial Sequence
  derived and/or modified protein sequence (wt) from HRSV__APW78779.1__F-del
MELLIYRSSAIFLTLAINALYLTSSQNITEEFYQSTCSAVSKGYLSALRTGWYTSVITIELSNIKETKCNGTDTKVKLIKQELDKYKNAVTELQLLMQNTPAANNRARREAPQYMNYTINTTKNLNVSISKKRKRRFLGFLLGVGSAIASGIAVSKVLHLEGEVNKIKNALLSTNKAVVSLSNGVSVLTSKVLDLKNYINNQLLPIVNQQSCRISNIETVIEFQQKNSRLLEITREFSVNAGVTTPLSTYMLTNSELLSLINDMPITNDQKKLMSSNVQIVRQQSYSIMSIIKEEVLAYVVQLPIYGVIDTPCWKLHTSPLCTTNIKEGSNICLTRTDRGWYCDNAGSVSFFPQADTCKVQSNRVFCDTMNSLTLPSEVSLCNTDIFNSKYDCKIMTSKTDISSSVITSLGAIVSCYGKTKCTASNKNRGIIKTFSNGCDYVSNKGVDTVSVGNTLYYVNKLEGKNLYVKGEPIINYYDPLVFPSDEFDASISQVNEKINQSLAFIRRSDELLHNVNTGKSTTNIMITAIIIVIIVVLLSLIAIGLLLYCKAK

SEQ ID NO: 9319 - protein, 553 aa, Artificial Sequence
  derived and/or modified protein sequence (wt) from HRSV__APW78702.1__F-del
MELLIHRSSAIFLTLAINALYLTSSQNITEEFYQSTCSAVSRGYLSALRSGWYTSVITIELSNIKETKCNGTDTKVKLIKQELDKYKNAVTELQLLMQNTPAVNNRARREAPQYMNYTINTTKNLNVSISKKRKRRFLGFLLGVGSAIASGIAVSKVLHLEGEVNKIKNALQSTNKAVVSLSNGVSVLTSKVLDLKNYINNQLLPIVNQQSCRISNIETVIEFQQKNSRLLEITREFSVNAGVTTPLSTYMLTNSELLSLINDMPITNDQKKLMSSNVQIVRQQSYSIMSIIKEEVLAYVVQLPIYGVIDTPCWKLHTSPLCTTNIKEGSNICLTRTDRGWYCDNAGSVSFFPQADTCKVQSNRVFCDTMNSLTLPSEVSLCNTDIFNSKYDCKIMTSKTDISSSVITSLGAIVSCYGKTKCTASNKNRGIIKTFSNGCDYVSNKGVDTVSVGNTLYYVNKLEGKNLYVKGEPIINYYDPLVFPSDEFDASISQVNEKINQSLAFIRRSDELLHNVNTGKSTTNIMITAIIIVIIVVLLLLIAIGLLLYCKAK

SEQ ID NO: 9320 - protein, 553 aa, Artificial Sequence
  derived and/or modified protein sequence (wt) from HRSV__APW78713.1__F-del
MELLIHRSSAIFLTLAIKALYLTSSQNITEEFYQSTCSAVSRGYLSALRTGWYTSVITIELSNIKETKCNGTDTKVKLIKQELDKYKNAVTELQLLMQNTPAVNNRARREAPQYMNYTINTTKNLNVSISKKRKRRFLGFLLGVGSAIASGIAVSKVLHLEGEVNKIKNALQSTNKAVVSLSNGVSVLTSKVLDLKNYINNQLLPIVNQQSCRISNIETVIEFQQKNSRLLEITREFSVNAGVTTPLSTYMLTNSELLSLINDMPITNDQKKLMSSNVQIVRQQSYSIMSIIKEEVLAYVVQLPIYGVIDTPCWKLHTSPLCTTNIKEGSNICLTRTDRGWYCDNAGSVSFFPQADTCKVQSNRVFCDTMNSLTLPSEVSLCNTDIFNSKYDCKIMTSKTDISSSVITSLGAIVSCYGKTKCTASNKNRGIIKTFSNGCDYVSNKGVDTVSVGNTLYYVNKLEGKNLYVKGEPIINYYDPLVFPSDEFDASISQVNEKINQSLAFIRRSDELLHNVNTGKSTTNIMITAIIIVIIVVLLSLIAIGLLLYCKAK

SEQ ID NO: 9321 - protein, 553 aa, Artificial Sequence
  derived and/or modified protein sequence (wt) from HRSV__APW78680.1__F-del
MELLIHRSSAIFLTLAINALYLTSSQNITEEFYQSTCSAVSRGYFSALRTGWYTSVITIELSNIKETKCNGTDTKVKLIKQELDKYKNAVTELQLLMQNTPAANNRARREAPQYMNYTINTTKNLNASISKKRKRRFLGFLLGVGSAIASGIAVSKVLHLEGEVNKIKNALLSTNKAVVSLSNGVSVLTSKVLDLKNYINNQLLPIVNQQSCRISNIETVIEFQQKNSRLLEITREFSVNAGVTTPLSTYMLTNSELLSLINDMPITNDQKKLMSSNVQIVRQQSYSIMSIIKEEVLAYVVQLPIYGVIDTPCWKLHTSPLCTTNIKEGSNICLTRTDRGWYCDNAGSVSFFPQADTCKVQSNRVFCDTMNSLTLPSEVSLCNTDIFNSKYDCKIMTSKTDISSSVITSLGAIVSCYGKTKCTASNKNRGIIKTFSNGCDYVSNKGVDTVSVGNTLYYVNKLEGKNLYVKGEPIINYYDPLVFPSDEFDASISQVNEKINQSLAFIRRSDELLHNVNTGKSTTNIMITAIIIVIIVVLLSLIAIGLLLYCKAK

SEQ ID NO: 9322 - protein, 553 aa, Artificial Sequence
  derived and/or modified protein sequence (wt) from HRSV__APW78658.1__F-del
MELLIHRSSAIFLTLAINALYLTSSQNITEEFYQSTCSAVSRGYWSALRTGWYTSVITIELSNIKETKCNGTDTKVKLIKQELDKYKNAVTELQLLMQNTPAVNNRARREAPQYMDYTINTTKNLNVSISKKRKRRFLGFLLGVGSAIASGIAVSKVLHLEGEVNKIKNALQLTNKAVVSLSNGVSVLTSKVLDLKNYINNQLLPIVNQQSCRISNIETVIEFQQKNSRLLEITREFSVNAGVTTPLSTYMLTNSELLSLINDMPITNDQKKLMSSNVQIVRQQSYSIMSIIKEEVLAYVVQLPIYGVIDTPCWKLHTSPLCTTNIKEGSNICLTRTDRGWYCDNAGSVSFFPQADTCKVQSNRVFCDTMNSLTLPSEVSLCNTDIFNSKYDCKIMTSKTDISSSVITSLGAIVSCYGKTKCTASNKNRGIIKTFSNGCDYVSNKGVDTVSVGNTLYYVNKLEGKNLYVKGEPIINYYDPLVFPSDEFDASISQVNEKINQSLAFIRRSDELLHNVNTGKSTTNIMITAIIIVIIVVLLSLIAIGLLLYCKAK

SEQ ID NO: 9323 - protein, 553 aa, Artificial Sequence
  derived and/or modified protein sequence (wt) from HRSV__APW78647.1__F-del
MELLIHRSSAIFLTLAINALYLTSSQNITEEFYQSTCSAVSRGYFSALRTGWYTSVITIELSNIKETKCNGTDTKVKLIKQELDKYKNAVTELQLLMQNTPAANNRARREAPQYMNYTINTTKNPNASISKKRKRRFLGFLLGVGSAIASGIAVSKVLHLEGEVNKIKNALLSTNKAVVSLSNGVSVLTNKVLDLKNYINNQLLPIVNQQSCRISNIETVIEFQQKNSRLLEITREFSVNAGVTTPLSTYMLTNSELLSLINDMPITNDQKKLMSSNVQIVRQQSYSIMSIIKEEVLAYVVQLPIYGVIDTPCWKLHTSPLCTTNIKEGSNICLTRTDRGWYCDNAGSVSFFPQADTCKVQSNRVFCDTMNSLTLPSEVSLCNTDIFNSKYDCKIMTSKTDISSSVITSLGAIVSCYGKTKCTASNKNRGIIKTFSNGCDYVSNKGVDTVSVGNTLYYVNKLEGKNLYVKGEPIINYYDPLVFPSDEFDASISQVNEKINQSLAFIRRSDELLHNVNTGKSTTNIMITAIIIVIIVVLLSLIAIGLLLYCKAK

SEQ ID NO: 9324 - protein, 553 aa, Artificial Sequence
  derived and/or modified protein sequence (wt) from HRSV__APW78636.1__F-del
MELLIHRSSAIFLTFAINTLYLTSSQNITEEFYQSTCSAVSRGYLSALRTGWYTSVITIELSNIKETKCNGTDTKVKLIKQELDKYKNAVTELQLLMQNTPAANNRARREAPQYMNYTINTTKNLNVSISKKRKRRFLGFLLGVGSAIASGIAVSKVLHLEGEVNKIKNALLSTNKAVVSLSNGVSVLTSKVLDLKNYINNQLLPIVNQQSCRISNIETVIEFQQKNSRLLEITREFSVNAGVTTPLSTYMLTNSELLSLINDMPITNDQKKLMSSNVQIVRQQSYSIMSIIKEEVLAYVVQLPIYGVIDTPCWKLHTSPLCTTNIKEGSNICLTRTDRGWYCDNAGSVSFFPQADTCKVQSNRVFCDTMNSLTLPSEVSLCNTDIFNSKYDCKIMTSKTDISSSVITSLGAIVSCYGKTKCTASNKNRGIIKTFSNGCDYVSNKGVDTVSVGNTLYYVNKLEGKNLYVKGEPIINYYDPLVFPSDEFDASISQVNEKINQSLAFIRRSDELLHNVNTGKSTTNIMITAIIIVIIVVLLSLIAIGLLLYCKAK

SEQ ID NO: 9325 - protein, 553 aa, Artificial Sequence
  derived and/or modified protein sequence (wt) from HRSV__AOS48870.1__F-del
MELLIHRSSAIFLTLAINALYLTSSQNITEEFYQSTCSAVSRGYLSALRTGWYTSVITIELSNIKETKCNGTDTKVKLIKQELDKYKNAVTELQLLMQNTPAVNNRARREAPQYMNYTINTTKSLNVSISKKRKRRFLGFLLGVGSAIASGIAVSKVLHLEGEVNKIKNALQSTNKAVVSLSNGVSVLTSKVLDLKNYINNQLLPIVNKQSCRISNIETVIEFQQKNSRLLEITREFSVNAGVTTPLSTYMLTNSELLSLINDMPITNDQKKLMSSNVQIVRQQSYSIMSIIKEEVLAYVVQLPIYGVIDTPCWKLHTSPLCTTNIKEGSNICLTRTDRGWYCDNAGSVSFFPQADTCKVQSNRVFCDTMNSLTLPSEVSLCNTDIFNSKYDCKIMTSKTDISSSVITSLGAIVSCYGKTKCTASNKNRGIIKTFSNGCDYVSNKGVDTVSVGNTLYYVNKLEGKNLYVKGEPIINYYDPLVFPSDEFDASISQVNEKINQSLAFIRRSDELLHNVNTGKSTTNIMITAIIIVIIVVLLSLIAIGLLLYCKAK

SEQ ID NO: 9326 - protein, 553 aa, Artificial Sequence
  derived and/or modified protein sequence (wt) from HRSV__APW78614.1__F-del
MELLIHRSSAIFLTLAINALYLTSSQNITEEFYQSTCSAVSRGYLSALRTGWYTSVITIELSNIKETKCNGTDTKVKLIKQELDKYKNAVTELQLLMQNTPAVNNRARREAPQYMNYTINTTKNLNVSISKKRKRRFLGFLLGVGSAIASGIAVSKVLLLEGEVNKIKNALQSTNKAVVSLSNGVSVLTSKVLDLKNYINNQLLPIVNQQSCRISNIETVIEFQQKNSRLLEITREFSVNAGVTTPLSTYMLTNSELLSLINDMPITNDQKKLMSSNVQIVRQQSYSIMSIIKEEVLAYVVQLPIYGVIDTPCWKLHTSPLCTTNIKEGSNICLTRTDRGWYCDNAGSVSFFPQADTCKVQSNRVFCDTMNSLTLPSEVSLCNTDIFNSKYDCKIMTSKTDISSSVITSLGAIVSCYGKTKCTASNKNRGIIKTFSNGCDYVSNKGVDTVSVGNTLYYVNKLEGKNLYVKGEPIINYYDPLVFPSDEFDASISQVNEKINQSLAFIRRSDELLHNVNTGKSTTNIMITAIIIVIIVVLLSLIAIGLLLYCKAK

SEQ ID NO: 9327 - protein, 553 aa, Artificial Sequence
  derived and/or modified protein sequence (wt) from HRSV__AMT78905.1__F-del
MELLIHRSSAIFLTLAINTLYLTSSQNITEEFYQSTCSAVSRGYFSALRTGWYTSVITIELSNIKETKCNGTDTKVKLIKQELDKYKNAVTELQLLMQNTPAANNRARREAPQYMNYTINTTKNLNVSISKKRKRRFLGFLLGVGSAIASGIAVSKVLHLEGEVNKIKNALLSTNKAVVSLSNGVSVLTSKVLDLKNYINNQLLPIVNQQSCRISNIETVIEFQQKNSRLLEITREFSVNAGVTTPLSTYMLTNSELLSLINDMPITNDQKKLMSSNVQIVRQQSYSIMSIIKEEVLAYVVQLPIYGVIDTPCWKLHTSPLCTTNIKEGSNICLTRTDRGWYCDNAGSVSFFPQADTCKVQSNRVFCDTMNSLTLPSEVSLCNTDIFNSKYDCKIMTSKTDISSSVITSLGAIVSCYGKTKCTASNKNRGIIKTFSNGCDYVSNKGVDTVSVGNTLYYVNKLEGKNLYVKGEPIINYYDPLVFPSDEFDASISQVNEKINQSLAFIRRSDELLHNVNTGKSTTNIMITAIIIVIIVVLLSLIAIGLLLYCKAK

SEQ ID NO: 9328 - protein, 553 aa, Artificial Sequence
  derived and/or modified protein sequence (wt) from HRSV__AMT77402.1__F-del
MELLIHRSSAIFLTLAINALYLTSSQNITEEFYQSTCSAVSRGYLSALRTGWYTSVITIELSNIKETKCNGTDTKVKLIKQELDKYKNAVTELQLLMQNTPAANNRARREAPQYMNYTINTTKNLNVSISKKRKRRFLGFLLGVGSAIASGIAVSKVLHLEGEVNKIKNALLSTNKAVVSLSNGVSVLTSKVLDLKNYINNQLLPIVNQQSCRISNIETVIEFQQKNSRLLEITREFSVNAGVTTPLSTYMLTNSELLSLINDMPITNDQKKLMSNNVQIVRQQSYSIMSIIKEEVLAYVVQLPIYGVIDTPCWKLHTSPLCTTNIKEGSNICLTRTDRGWYCDNAGSVSFFPQADTCKVQSNRVFCDTMNSLTLPSEVSLCNTDIFNSKYDCKIMTSKTDISSSVITSLGAIVSCYGKTKCTASNKNRGIIKTFSNGCDYVSNKGVDTVSVGNTLYYVNKLEGKNLYVKGEPIINYYDPLVFPSDEFDASISQVNEKINQSLAFIRRSDELLHNVNTGKSTTNIMITAIIIVIIVVLLSLIAIGLLLYCKAK

SEQ ID NO: 9329 - protein, 553 aa, Artificial Sequence
  derived and/or modified protein sequence (wt) from HRSV__AOZ15479.1__F-del
MELPILKTNAITTILAAVTLCFASSQNITEEFYQSTCSAVSKGYLSALRTGWYTSVITIELSNIKENKCNGTDAKVKLIKQELDKYKNAVTELQLLMQSTSAANSRARRELPRFMNYTLNNTKNTNVTLSKKRKRRFLGFLLGVGSAIASGIAVSKVLHLEGEVNKIKSALLSTNKAVVSLSNGVSVLTSKVLDLKNYIDKQLLPIVNKQSCSISNIETVIEFQQKNNRLLEITREFSVNAGVTTPVSTYMLTNSELLSLINDMPITNDQKKLMSSNVQIVRQQSYSIMSIIKEEVLAYVVQLPLYGVIDTPCWKLHTSPLCTTNTKEGSNICLTRTDRGWYCDNAGSVSFFPQAETCKVQSNRVFCDTMNSLTLPSEVNLCNIDIFNPKYDCKIMTSKTDVSSSVITSLGAIVSCYGKTKCTASNKNRGIIKTFSNGCDYVSNKGVDTVSVGNTLYYVNKQEGKSLYVKGEPIINFYDPLVFPSDEFDASISQVNEKINQSLAFIRKSDELLHNVNAGKSTTNIMITTIIIVIIVILLASIAVGLLLYCKAR

SEQ ID NO: 9330 - protein, 553 aa, Artificial Sequence
  derived and/or modified protein sequence (wt) from HRSV__AGN28484.1__F-del
MELLIHRSSAIFLTFAINALYLTSSQNITEEFYQSTCSAVSRGYLSALRTGWYTSVITIELSNIKETKCNGTDTKVKLIKQELDKYKNAVTELQLLMQNTPAANNRARREAPQYMNYTINTTKNLNVSISKKRKRRFLGFLLGVGSAIASGIAVSKVLHLEGEVNKIKNALLSTNKAVVSLSNGVSVLTSKVLDLKNYINNQLLPIVNQQSCRISNIETVIEFQQKNSRLLEITREFSVNAGVTTPLSTYMLTNSELLSLINDMPITNDQKKLMSSNVQIVRQQSYSIMSIIKEEVLAYVVQLPIYGVIDTPCWKLHTSPLCTTNIKEGSNICLTRTDRGWYCDNAGSVSFFPQADTCKVQSNRVFCDTMNSLTLPSEVSLCNTDIFNSKYDCKIMTSKTDISSSVITSLGAIVSCYGKTKCTASNKNRGIIKTFSNGCDYVSNKGVDTVSVGNTLYYVNKLEGKNLYVKGEPIINYYDPLVFPSDEFDASISQVNEKINQSLAFIRRSDELLHNVNTGKSTTNIMITAIIIVIIVVLLSLIAIGLLLYCKAK

SEQ ID NO: 9331 - protein, 553 aa, Artificial Sequence
  derived and/or modified protein sequence (wt) from HRSV__AHX57240.1__F-del
MELPILKTNAITTILAAVTLCFASSQNITEEFYQSTCSAVSKGYLSALRTGWYTSVITIELSNIKENKCNGTDAKVKLIKQELDKYKNAVTELQLLMQSTPAANSRARRELPRFMNYTLNNTKNTNVTLSKKRKRRFLGFLLGVGSAIASGIAVSKVLHLEGEVNKIKSALLSTNKAVVSLSNGVSVLTSKVLDLKNYIDKQLLPIVNKQSCSISNIETVIEFQQKNNRLLEITREFSVNAGVTTPVSTYMLTNGELLSLINDMPITNDQKKLMSSNVQIVRQQSYSIMSIIKEEVLAYVVQLPLYGVIDTPCWKLHTSPLCTTNTKEGSNICLTRTDRGWYCDNAGSVSFFPQAETCKVQSNRVFCDTMNSLTLPSEVNLCNIDIFNPKYDCKIMTSKTDVSSSVITSLGAIVSCYGKTKCTASNKNRGIIKTFSNGCDYVSNKGVDTVSVGNTLYYVNKQEGKSLYVKGEPIINFYDPLVFPSDEFDASISQVNEKINQSLAFIRKSDELLYNVNAGKSTTNIMITTIIIVIIVILLALIAIGLLLYCKAR

SEQ ID NO: 9332 - protein, 553 aa, Artificial Sequence
  derived and/or modified protein sequence (wt) from HRSV__AHX57031.1__F-del
MELPILKTNAITTILAAVTLCFASSQNITEEFYQSTCSAVSKGYLSALRTGWYTSVITIELSNIKENKCNGTDAKVKLIKQELDKYKNAITELQLLMQSTPAANSRARRELPRFMNYTLNNTKNTNVTLSKKRKRRFLGFLLGVGSAIASGIAVSKVLHLEGEVNKIKSALLSTNKAVVSLSNGVSVLTSKVLDLKNYIDKQLLPIVNKQSCSISNIETVIEFQQKNNRLLEITREFSVNAGVTTPVSTYMLTNSELLSLINDMPITNDQKKLMSSNVQIVRQQSYSIMSIIKEEVLAYVVQLPLYGVIDTPCWKLHTSPLCTTNTKEGSNICLTRTDRGWYCDNAGSVSFFPQAETCKVQSNRVFCDTMNSLTLPSEVNLCNIDIFNPKYDCKIMTSKTDVSSSVITSLGAIVSCYGKTKCTASNKNRGIIKTFSNGCDYVSNKGVDTVSVGNTLYYVNKQEGKSLYVKGEPIINFYDPLVFPSDEFDASISQVNEKINQSLAFIRKSDELLHNVNAGKSTTNIMITTIIIVIIVILLALIAVGLLLYCKAR

SEQ ID NO: 9333 - protein, 553 aa, Artificial Sequence
  derived and/or modified protein sequence (wt) from HRSV__AOS48980.1__F-del
MELLIHRSSAIFLTLAINALYLTSSQNITEEFYQSTCSAVSRGYLSALRTGWYTSVITIELSNIKETKCNGTDTKVKLIKQELDKYKNAVTELQLLMQNTPAVNNRARREAPQYMNYTINTTKNLNVSISKKRKRRFLGFLLGVGSAIASGIAVSKVLHLEGEVNKIKNALQSTNKAVVSLSNGVSVLTSKVLDLKNYINNQLLPIVNQQSCRISNIETVIEFQQKNSRLLEITREFSINAGVTTPLSTYMLTNSELLSLINDMPITNDQKKLMSSNVQIVRQQSYSIMSIIKEEVLAYVVQLPIYGVIDTPCWKLHTSPLCTTNIKEGSNICLTRTDRGWYCDNAGSVSFFPQADTCKVQSNRVFCDTMNSLTLPSEVSLCNTDIFNSKYDCKIMTSKTDISSSVITSLGAIVSCYGKTKCTASNKNRGIIKTFSNGCDYVSNKGVDTVSVGNTLYYVNKLEGKNLYVKGEPIINYYDPLVFPSDEFDASISQVNEKINQSLAFIRRSDELLHNVNTGKSTTNIMITAIIIVIIVVLLSLIAIGLLLYCKAK

SEQ ID NO: 9334 - protein, 553 aa, Artificial Sequence
  derived and/or modified protein sequence (wt) from HRSV__AOS48848.1__F-del
MELLIHRSSAIFLTLAINALYLTSSQNITEEFYQSTCSAVSRGYLSALRTGWYTSVITIELSNIKETKCNGTDTKVKLIKQELDKYKNAVTELQLLMQNTPAANNRARREAPQYMNYTINTTKNLNVSISKKRKRRFLGFLLGVGSAIASGIAVSKVLHLEGEVNKIKNALLSTNKAVVSLSNGVSVLTSKVLDLKNYINNQLLPIVNQQSCRISNIETVIEFQQKNSRLLEITREFSVNAGVTTPLSTYMLTNSELLSLINDMPITNDQKKLMSSNVQIVRQQSYSIMSIIKEEVLAYVVQLPIYGVIDTPCWKLHTSPLCTTNIKEGSNICLTRTDRGWYCDNAGSVSFFPQADTCKVQSNRVFCDTMNSLTLPSEVSLCNTDIFNSKYDCKIMTSKTDISSSVITSLGAIVSCYGKTKCTASNKNRGIIKTFSNGCDYVSNKGVDTVSVGNTLYYVNKLEGKNLYVKGEPIINYYDPLVFPSDEFDASISQVNEKINQSLAFIRRSDELLHNVNTGKSTTNIMITAIIIVIIVVLLSLIAIGLLLYYKAK

SEQ ID NO: 9335 - protein, 553 aa, Artificial Sequence
  derived and/or modified protein sequence (wt) from HRSV__AOS48815.1__F-del
MELPILKTNAIITILAAVTLCFASSQNITEEFYQSTCSAVSKGYLSALRTGWYTSVITIELSNIKENKCNGTDAKVKLIKQELDKYKNAVTELQLLMQSTPAANNRARRELPRFMNYTLNNTKNTNVTLSKKRKRRFLGFLLGVGSAIASGIAVSKVLHLEGEVNKIKSALLSTNKAVVSLSNGVSVLTSKVLDLKNYIDKQLLPIVNKQSCSISNIETVIEFQQKNNRLLEITREFSVNAGVTTPVSTYMLTNSELLSLINDMPITNDQKKLMSSNVQIVRQQSYSIMSIIKEEVLAYVVQLPLYGVIDTPCWKLHTSPLCTTNTKEGSNICLTRTDRGWYCDNAGSVSFFPQAETCKVQSNRVFCDTMNSLTLPSEVNLCNIDIFNPKYDCKIMTSKTDVSSSVITSLGAIVSCYGKTKCTASNKNRGIIKTFSNGCDYVSNKGVDTVSVGNTLYYVNKQEGKSLYVKGEPIINFYDPLVFPSDEFDASISQVNEKINQSLAFIRKSDELLHNVNAGKSTTNIMITTIIIVIIVILLALIAVGLLLYCKAR

SEQ ID NO: 9336 - protein, 553 aa, Artificial Sequence
  derived and/or modified protein sequence (wt) from HRSV__AOS48738.1__F-del
MELLIHRSSAIFLNLAINALYLTSSQNITEEFYQSTCSAVSRGYLSALRTGWYTSVITIELSNIKETKCNGTDTKVKLIKQELDKYKNAVTELQLLMQNTPAVNNRARREAPQYMNYTINTTKNLNVSISKKRKRRFLGFLLGVGSAIASGIAVSKVLHLEGEVNKIKNALQLTNKAVVSLSNGVSVLTSKVLDLKNYINNQLLPIVNQQSCRISNIETVIEFQQKNSRLLEITREFSVNAGVTTPLSTYMLTNSELLSLINDMPITNDQKKLMSSNVQIVRQQSYSIMSIIKEEVLAYVVQLPIYGVIDTPCWKLHTSPLCTTNIKEGSNICLTRTDRGWYCDNAGSVSFFPQADTCKVQSNRVFCDTMNSLTLPSEVSLCNTDIFNSKYDCKIMTSKTDISSSVITSLGAIVSCYGKTKCTASNKNRGIIKTFSNGCDYVSNKGVDTVSVGNTLYYVNKLEGKNLYVKGEPIINYYDPLVFPSDEFDASISQVNEKINQSLAFIRRSDELLHNVNTGKSTTNIMITAIIIVIIVVLLSLIAIGLLLYCKAK

SEQ ID NO: 9337 - protein, 553 aa, Artificial Sequence
  derived and/or modified protein sequence (wt) from HRSV__AOS49068.1__F-del
MELLIHRSSAIFLTLAINTLYLTSSQNITEEFYQSTCSAVSRGYFSALRTGWYTSVITIELSNIKETKCNGTDTKVKLIKQELDKYKNAVTELQLLMQNTPAANNRARREAPQYMNYTINTTKNLNVSISKKRKRRFLGFLLGVGSAIASGIAVSKVLHLEGEVNKIKNALLSTNKAVVSLSNGVSVLTSKVLDLKNYINNQLLPIVNQQSCRISNIETVIEFQQKNSRLLEITREFSVNAGVTTPLSTYMLTNSELLSLINDMPITNDQKKLMSSNVQIVRQQSYSIMSIIKEEVLAYVVQLPIYGVIDTPCWKLHTSPLCTTNIKEGSNICLTRTDRGWYCDNAGSVSFFPQADTCKVQSNRVFCDTMNSLTLPSEVSLCNTDIFNSKYDCKIMTSKTDISSSVITSLGAIVSCYGKTKCTASNKNRGIIKTFSNGCDYVSNKGVDTVSVGNTLYYVNKLEGKNLYVKGEPIINYYDPLVFPSDEFDASISQVNEKINQSLAFIRRSDELLHNVNTGKSTTNIMIIAIIIVIIVVLLSLIAIGLLLYCKAK

SEQ ID NO: 9338 - protein, 553 aa, Artificial Sequence
  derived and/or modified protein sequence (wt) from HRSV__AOS48727.1__F-del
MELPILKTNAITTILAAVTLCFASSQNITEEFYQSTCSAVSKGYLSALRTGWYTSVITIELSNIKENKCNGTDAKVKLIKQELDKYKNAVTELQLLMQSTPAANSRARRELPRFMNYTLNNTKNTNVTLSKKRKRRFLGFLLGVGSAIASGIAVSKVLHLEGEVNKIKSALLSTNKAVVSLSNGVSVLTSKVLDLKNYIDKQLLPIVNKQSCSISNIETVIEFQQKNNRLLEITREFSVNAGVTTPVSTYMLTNSELLSLINDMPITNDQKKLMSSNVQIVRQQSYSIMSIIKEEVLAYVVQLPLYGVIDTPCWKLHTSPLCTTNTKEGSNICLTRTDRGWYCDNAGSVSFFPQAETCKVQSNRVFCDTMNSLTLPNEVNLCNIDIFNPKYDCKIMTSKTDVSSSVITSLGAIVSCYGKTKCTASNKNRGIIKTFSNGCDYVSNKGVDTVSVGNTLYYVNKQEGKSLYVKGEPIINFYDPLVFPSDEFDASISQVNEKINQSLAFIRKSDELLHNVNAGKSTTNIMITTIIIVIIVILLALIAVGLLIYCKAR

SEQ ID NO: 9339 - protein, 553 aa, Artificial Sequence
  derived and/or modified protein sequence (wt) from HRSV__AOS48716.1__F-del
MDLPILKTNAITAILAAVSLCFASSQNITEEFYQSTCSAVSKGYLSALRTGWYTSVITIELSNIKENKCNGTDAKVKLIKQELDKYKNAVTELQLLMQSTPAANNRARRELPRFMNYTLNNTKNNNITLSKKRKRRFLGFLLGVGSAIASGIAVSKVLHLEGEVNKIKSALLSTNKAVVSLSNGVSVLTSKVLDLKNYIDKQLLPIVNKQSCSISNIETVIEFQQKNNRLLEITREFSVNAGVTTPVSTYMLTNSELLSLINDMPITNDQKKLMSNNVQIVRQQSYSIMSIIKEEVLAYVVQLPLYGVIDTPCWKLHTSPLCTTNTKEGSNICLTRTDRGWYCDNAGSVSFFPQSETCKVQSNRVFCDTMNSLTLPSEVNLCNIDIFNPKYDCKIMTSKTDVSSSVITSLGAIVSCYGKTKCTASNKNRGIIKTFSNGCDYVSNKGVDTVSVGNTLYYVNKQEGKSLYVKGEPIINFYDPLVFPSDEFDASISQVNEKINQSLAFIRKSDELLHNVNVGKSTTNIMITTIIIVIIVILLLLIAVGLFLYCKAR

SEQ ID NO: 9340 - protein, 553 aa, Artificial Sequence
  derived and/or modified protein sequence (wt) from HRSV__AOS48683.1__F-del
MELLIHRSSAIFLTLTINALYLTSSQNITEEFYQSTCSAVSRGYLSALRTGWYTSVITIELSNIKETKCNGTDTKVKLIKQELDKYKNAVTELQLLMQNTPAVNNRARREAPQYMNYTINTTKNPNVSISKKRKRRFLGFLLGVGSAIASGIAVSKVLHLEGEVNKIKNALLSTNKAVVSLSNGVSVLTSKVLDLKNYINNQLLPIVNQQSCRISNIETVIEFQQKNSRLLEITREFSVNAGVTTPLSTYMLTNSELLSLINDMPITNDQKKLMSSNVQIVRQQSYSIMSIIKEEVLAYVVQLPIYGVIDTPCWKLHTSPLCTTNIKEGSNICLTRTDRGWYCDNAGSVSFFPQADTCKVQSNRVFCDTMNSLTLPSEVSLCNTDIFNSKYDCKIMTSKTDISSSVITSLGAIVSCYGKTKCTASNKNRGIIKTFSNGCDYVSNKGVDTVSVGNTLYYVNKLEGKNLYVKGEPIINYYDPLVFPSDEFDASISQVNEKINQSLAFIRRSDELLHNVNTGKSTTNIMITAIIIVIIVVLLSLIAIGLLLYCKAK

SEQ ID NO: 9341 - protein, 553 aa, Artificial Sequence
  derived and/or modified protein sequence (wt) from HRSV__AOS48551.1__F-del
MELPILKTNAITTILTAVTLCFASSQNITEEFYQSTCSAVSKGYLSALRTGWYTSVITIELSNIKENKCNGTDAKVKLIKQELDKYKNAVTELQLLMQSTPAANNRARRELPRFMNYTLNNTKNTNVTLSKKRKRRFLGFLLGVGSAIASGIAVSKVLHLEGEVNKIKSALLSTNKAVVSLSNGVSVLTSKVLDLKNYIDKQLLPIVNKQSCSISNIETVIEFQQKNNRLLEITREFSVNAGVTTPVSTYMLTNSELLSLINDMPITNDQKKLMSSNVQIVRQQSYSIMSIIKEEVLAYVVQLPLYGVIDTPCWKLHTSPLCTTNTKEGSNICLTRTDRGWYCDNAGSVSFFPQAETCKVQSNRVFCDTMNSLTLPSEVNLCNIDIFNPKYDCKIMTSKTDVSSSVITSLGAIVSCYGKTKCTASNKNRGIIKTFSNGCDYVSNKGVDTVSVGNTLYYVNKQEGKSLYVKGEPIINFYDPLVFPSDEFDASISQVNEKINQSLAFIRKSDELLHNVNAGKSTTNIMITTIIIVIIVILLALIAVGLLLYCKAR

SEQ ID NO: 9342 - protein, 553 aa, Artificial Sequence
  derived and/or modified protein sequence (wt) from HRSV__AOS48485.1__F-del
MELLIHRSSAIFLTLAINALYLTSSQNITEEFYQSTCSAVSRGYLSALRTGWYTSVITIELSNIKETKCNGTDTKVKLIKQELDKYKNAVTELQLLMQNTPAVNNRARREAPQYMNYTINTTKNLNVSISKKRKRRFLGFLLGVGSAIASGIAVSKVLHLEGEVNKIKNALHSTNKAVVSLSNGVSVLTSKVLDLKNYINNQLLPIVNQQSCRISNIETVIEFQQKNSRLLEITREFSVNAGVTTPLSTYMLTNSELLSLINDMPITNDQKKLMSSNVQIVRQQSYSIMSIIKEEVLAYVVQLPIYGVIDTPCWKLHTSPLCTTNIKEGSNICLTRTDRGWYCDNAGSVSFFPQADTCKVQSNRVFCDTMNSLTLPSEVSLCNTDIFNSEYDCKIMTSKTDISSSVITSLGAIVSCYGKTKCTASNKNRGIIKTFSNGCDYVSNKGVDTVSVGNTLYYVNKLEGKNLYVKGEPIINYYDPLVFPSDEFDASISQVNEKINQSLAFIRRSDELLHNVNTGKSTTNIMITAIIIVIIVVLLSLIAIGLLLYCKAK

SEQ ID NO: 9343 - protein, 553 aa, Artificial Sequence
  derived and/or modified protein sequence (wt) from HRSV__AOS48518.1__F-del
MELPILKTNAITTILAAVTLCFASSQNITEEFYQSTCSAVSKGYLSALRTGWYTSVITIELSNIKENKCNGTDAKVKLIKQELDKYKNAVTELQLLMQSTPAANSRARRELPRFINYTLNNTKTTNVTLSKKRKRRFLGFLLGVGSAIASGIAVSKVLHLEGEVNKIKSALLSTNKAVVSLSNGVSVLTSKVLDLKNYIDKQLLPIVNKQSCSISNIETVIEFQQKNNRLLEITREFSVNAGVTTPVSTYMLTNSELLSLINDMPITNDQKKLMSSNVQIVRQQSYSIMSIIKEEVLAYVVQLPLYGVIDTPCWKLHTSPLCTTNTKEGSNICLTRTDRGWYCDNAGSVSFFPQAETCKVQSNRVFCDTMNSLTLPSEVNLCNIDIFNPKYDCKIMTSKTDVSSSVITSLGAIVSCYGKTKCTASNKNRGIIKTFSNGCDYVSNKGVDTVSVGNTLYYVNKQEGKSLYVKGEPIINFYDPLVFPSDEFDASISQVNEKINQSLAFIRKSDELLHNVNAGKSTTNIMITTIIIVIIVILLALIAVGLLLYCKAR

SEQ ID NO: 9344 - protein, 553 aa, Artificial Sequence
  derived and/or modified protein sequence (wt) from HRSV__AOS48441.1__F-del
MELLIHRSSAIFLTLAINTLYLTSSQNITEEFYQSTCSAVSRGYFSALRTGWYTSVITIELSNIKETKCNGTDTKVKLIKQELDKYKNAVIELQLLMQNTPAANNRARREAPQYMNYTINTTKNLNVSISKKRKRRFLGFLLGVGSAIASGIAVSKVLHLEGEVNKIKNALLSTNKAVVSLSNGVSVLTSKVLDLKNYINNQLLPIVNQQSCRISNIETVIEFQQKNSRLLEITREFSVNAGVTTPLSTYMLTNSELLSLINDMPITNDQKKLMSSNVQIVRQQSYSIMSIIKGEVLAYVVQLPIYGVIDTPCWKLHTSPLCTTNIKEGSNICLTRTDRGWYCDNAGSVSFFPQADTCKVQSNRVFCDTMNSLTLPSEVSLCNTDIFNSKYDCKIMTSKTDISSSVITSLGAIVSCYGKTKCTASNKNRGIIKTFSNGCDYVSNKGVDTVSVGNTLYYVNKLEGKNLYVKGEPIINYYDPLVFPSDEFDASISQVNEKINQSLAFIRRSDELLHNVNTGKSTTNIMITAIIIVIIVVLLSLIAIGLLLYCKAK

SEQ ID NO: 9345 - protein, 553 aa, Artificial Sequence
  derived and/or modified protein sequence (wt) from HRSV__AOS48397.1__F-del
MELPILKTNAITTILAAVTLCFASSQNITEEFYQSTCSAVSKGYLSALRTGWYTSVITIELSNIKENKCNGTDAKVKLIKQELDKYKNAVTELQLLMQSTPAANSRARRELPRFMNYTLNNTKNTNVTLSKKRKRRFLGFLLGVGSAIASGIAVSKVLHLEGEVNKIKSALLSTNKAVVSLSNGVSVLTSKVLDLKNYIDKQLLPIVNKQSCSISNIETVIEFQQKNNRLLEITREFSVNAGVTTPVSTYMLTNSELLSLINDMPITNDQKKLMSSNVQIVRQQSYSIMSIIKEEVLAYVVQLPLYGVIDTPCWKLHTSPLCTTNTKDGSNICLTRTDRGWYCDNAGSVSFFPQAETCKVQSNRVFCDTMNSLTLPSEVNLCNIDIFNPKYDCKIMTSKTDVSSSVITSLGAIVSCYGKTKCTASNKNRGIIKTFSNGCDYVSNKGVDTVSVGNTLYYVNKQEGKSLYVKGEPIINFYDPLVFPSDEFDASISQVNEKINQSLAFIRKSDELLHNVNAGKSTTNIMITTIIIVIIVILLALIAVGLLLYCKAR

SEQ ID NO: 9346 - protein, 553 aa, Artificial Sequence
  derived and/or modified protein sequence (wt) from HRSV__AOS48375.1__F-del
MELPILKTNAITTILAAVTLCFASSQNITEEFYQSTCSAVSKGYLSALRTGWYTSVITIELSNIKENKCNGTDAKVKLIKQELDKYKNAVTELQLLMQSTPAANSRARRELPRFINYTLNNTKTTNVTLSKKRKRRFLGFLLGVGSAIASGIAVSKVLHLEGEVNKIKSALLSTNKAVVSLSNGVSVLTSKVLDLKNYIDKQLLPIVNKQSCSISNIETVIEFQQKNNRLLEITREFSVNAGVTTPVSTYMLTNSELLSLINDMPITNDQKKLMSSNVQIVRQQSYSIMSIIKEEVLAYVVQLPLYGVIDTPCWKLHTSPLCTTNTKEGSNICLTRTDRGWYCDNAGSVSFFPQAETCKVQSNRVFCDTMNSLTLPSEVNLCNIDIFNPKYDCKIMTSKTDVSSSVITSLGAIVSCYGKTKCTASNKNRGIIKTFSNGCDYVSNKGVDTVSVGNTLYYVNKLEGKSLYVKGEPIINFYDPLVFPSDEFDASISQVNEKINQSLAFIRKSDELLHNVNAGKSTTNIMITTIIIVIIVILLALIAVGLLLYCKAR

SEQ ID NO: 9347 - protein, 553 aa, Artificial Sequence
  derived and/or modified protein sequence (wt) from HRSV__AOS48353.1__F-del
MELLIHRSSAIFLTFAINALYLTSSQNITEEFYQSTCSAVSRGYFSALRTGWYTSVITIELSNIKETKCNGTDTKVKLIKQELDKYKNAVTELQLLMQNTPAANNRARREAPQYMNYTINTTKNLNVSISKKRKRRFLGFLLGVGSAIASGIAVSKVLHLEGEVNKIKNALLSTNKAVVSLSNGVSVLTSKVLDLKNYINKQLLPIVNQQSCRISNIETVIEFQQKNSRLLEITREFSVNAGVTTPLSTYMLTNSELLSLINDMPITNDQKKLMSSNVQIVRQQSYSIMSIIKEEVLAYVVQLPIYGVIDTPCWKLHTSPLCTTNIKEGSNICLTRTDRGWYCDNAGSVSFFPQADTCKVQSNRVFCDTMNSLTLPSEVSLCNTDIFNSKYDCKIMTSKTDISSSVITSLGAIVSCYGKTKCTASNKNRGIIKTFSNGCDYVSNKGVDTVSVGNTLYYVNKLEGKNLYVKGEPIINYYDPLVFPSDEFDASISQVNEKINQSLAFIRRSDELLHNVNTGKSTTNIMITAIIIVIIVVLLSLIAIGLLLYCKAK

SEQ ID NO: 9348 - protein, 553 aa, Artificial Sequence
  derived and/or modified protein sequence (wt) from HRSV__AOS48287.1__F-del
MELPILKTNAITTILAAVTLCFASSQNITEEFYQSTCSAVSKGYLSALRTGWYTSVITIELSNIKENKCNGTDAKVKLIKQELDKYKNAVTELQLLMQSTPAANSRARRELPRFMNYTLNNTKNTNVTLSKKRKRRFLGFLLGIGSAIASGIAVSKVLHLEGEVNKIKSALLSTNKAVVSLSNGVSVLTSKVLDLKNYIDKQLLPIVNKQSCSISNIETVIEFQQKNNRLLEITREFSVNAGVTTPVSTYMLTNSELLSLINDMPITNDQKKLMSSNVQIVRQQSYSIMSIIKEEVLAYVVQLPLYGVIDTPCWKLHTSPLCTTNTKEGSNICLTRTDRGWYCDNAGSVSFFPQAETCKVQSNRVFCDTMNSLTLPSEVNLCNIDIFNPKYDCKIMTSKTDVSSSVITSLGAIVSCYGKTKCTASNKNRGIIKTFSNGCDYVSNKGVDTVSVGNTLYYVNKQEGKSLYVKGEPIINFYDPLVFPSDEFDASISQVNEKINQSLAFIRKSDELLHNVNAGKSTTNIIITTIIIVIIVILLALIAVGLLLYCKAR

SEQ ID NO: 9349 - protein, 553 aa, Artificial Sequence
  derived and/or modified protein sequence (wt) from HRSV__AOS48320.1__F-del
MELLIHRSSAIFLTLAINALYLTSSQNITEEFYQSTCSAVSRGYLSALRTGWYTSVITIELSNIKETKCNGTDTKVKLIKQELDKYKNAVTELQLLMQNTPAVNNRARREAPQYINYTINTTKNLNVSISKKRKRRFLGFLLGVGSAIASGIAVSKVLHLEGEVNKIKNALQSTNKAVVSLSNGVSVLTSKVLDLKNYINNQLLPIVNQQSCRISNIETVIEFQQKNSRLLEITREFSVNAGVTTPLSTYMLTNSELLSLINDMPITNDQKKLMSSNVQIVRQQSYSIMSIIKEEVLAYVVQLPIYGVIDTPCWKLHTSPLCTTNIKEGSNICLTRTDRGWYCDNAGSVSFFPQADTCKVQSNRVFCDTMNSLTLPSEVSLCNTDIFNSKYDCKIMTSKTDISSSVITSLGAIVSCYGKTKCTASNKNRGIIKTFSNGCDYVSNKGVDTVSVGNTLYYVNKLEGKNLYVKGEPIINYYDPLVFPSDEFDASISQVNEKINQSLAFIRRSDELLHNVNTGKSTTNIMITAIIIVIIVVLLSLIAIGLLLYCKAK

SEQ ID NO: 9350 - protein, 553 aa, Artificial Sequence
  derived and/or modified protein sequence (wt) from HRSV__AOS48265.1__F-del
MELLIHRSSAIFLTLAINALYLTSSQNITEEFYQSTCSAVSRGYLSALRTGWYTSVITIELSNIKETKCNGTDTKVKLIKQELDKYKNAVTELQLLMQNTPAVNNRARREAPQYMNYTINTTKNLNVSISKKRKRRFLGFLLGVGSAIASGIAVSKVLHLEGEVNKIKNALQSTNKAVVSLSNGVSVLTSKVLDLKNYINSQLLPIVNKQSCRISNIETVIEFQQKNSRLLEITREFSVNAGVTTPLSTYMLTNSELLSLINDMPITNDQKKLMSSNVQIVRQQSYSIMSIIKEEVLAYVVQLPIYGVIDTPCWKLHTSPLCTTNIKEGSNICLTRTDRGWYCDNAGSVSFFPQADTCKVQSNRVFCDTMNSLTLPSEVSLCNTDIFNSKYDCKIMTSKTDISSSVITSLGAIVSCYGKTKCTASNKNRGIIKTFSNGCDYVSNKGVDTVSVGNTLYYVNKLEGKNLYVKGEPIINYYDPLVFPSDEFDASISQVNEKINQSLAFIRRSDELLHNVNTGKSTTNIMITAIIIVIIVVLLSLIAIGLLLYCKAK

SEQ ID NO: 9351 - protein, 553 aa, Artificial Sequence
  derived and/or modified protein sequence (wt) from HRSV__AOS48254.1__F-del
MDLPILKTNAITAILAAVSLCFASSQNITEEFYQSTCSAVSKGYLSALRTGWYTSVITIELSNIKENKCNGTDAKVKLIKQELDKYKNAVTELQLLMQSTPAANNRARRELPRFMNYTFNNTKNNNVTLSKKRKRRFLGFLLGVGSAIASGIAVSKVLHLEGEVNKIKSALLSTNKAVVSLSNGVSVLTSKVLDLKNYIDKQLLPIVNKQSCSISNIETVIEFQQKNNRLLEITREFSVNAGVTTPVSTYMLTNSELLSLINDMPITNDQKKLMSNNVQIVRQQSYSIMSIIKEEVLAYVVQLPLYGVIDTPCWKLHTSPLCTTNTKEGSNICLTRTDRGWYCDNAGSVSFFPQAETCKVQSNRVFCDTMNSLTLPSEVNLCNIDIFNPKYDCKIMTSKTDVSSSVITSLGAIVSCYGKTKCTASNKNRGIIKTFSNGCDYVSNKGVDTVSVGNTLYYVNKQEGKSLYVKGEPIINFYDPLVFPSDEFDASISQVNEKINQSLAFIRKSDELLHNVNVGKSTTNIMITTIIIVIIVILLLLIAVGLFLYCKAR

SEQ ID NO: 9352 - protein, 553 aa, Artificial Sequence
  derived and/or modified protein sequence (wt) from HRSV__AOS48221.1__F-del
MELLIRRSSAIFLTLAINTLYLTSSQNITEEFYQSTCSAVSRGYFSALRTGWYTSVITIELSNIKETKCNGTDTKVKLIKQELDKYKNAVTELQLLMQNTPAANNRARREAPQYMNYTINTTKNPNASISKKRKRRFLGFLLGVGSAIASGIAVSKVLHLEGEVNKIKNALLSTNKAVVSLSNGVSVLTSKVLDLKNYINNQLLPIVNQQSCRISNIETVIEFQQKNSRLLEITREFSVNAGVTTPLSTYMLTNSELLSLINDMPITNDQKKLMSSNVQIVRQQSYSIMSIIKEEVLAYVVQLPIYGVIDTPCWKLHTSPLCTTNIKEGSNICLTRTDRGWYCDNAGSVSFFPQADTCKVQSNRVFCDTMNSLTLPSEVSLCNTDIFNSKYDCKIMTSKTDISSSVITSLGAIVSCYGKTKCTASNKNRGIIKTFSNGCDYVSNKGVDTVSVGNTLYYVNKLEGKNLYVKGEPIINYYDPLVFPSDEFDASISQVNEKINQSLAFIHRSDELLHNVNTGKSTTNIMITAIIIVIIVVLLSLIAIGLLLYCKAK

SEQ ID NO: 9353 - protein, 553 aa, Artificial Sequence
  derived and/or modified protein sequence (wt) from HRSV__ANZ79638.1__F-del
MELPILKTNAITTILAAVTLCFASSQNITEEFYQSTCSAVSKGYLSALRTGWYTSVITIELSNIKENKCNGTDAKVKLIKQELDKYKNAVTELQLLMQSTPAANSRARRELPRFMNYTLNNTKNTNVTLSKKRKRRFLGFLLGVGSAIASGIAVSKVLHLEGEVNKIKSALLSTNKAVVSLSNGVSVLTSKVLDLKNYIDKQLLPIVNKQSCSISNIETVIEFQQKNNRLLEITREFSVNAGVTTPVSTYMLTNSELLSLINDMPITNDQKKLMSSNVQIVRQQSYSIMSIIKEEVLAYVVQLPLYGVIDTPCWKLHTSPLCTTNTKEGSNICLTRTDRGWYCDNAGSVSFFPQAETCKVQSNRVFCDTMNSLTLPSEVNLCNIDIFNPKYDCKIMTSKTDVSSSVITSLGAIVSCYGKTKCTASNKNRGIIKTFSNGCDYVSNKGVDTVSVGNTLYYVNKQEGKSLYVKGEPIINFYDPLVFPSDEFDASISQVNEKINQSLAFIRKSDELLHNVNAGKSTTNIMMTTIIIVIIVILLALIAVGLLLYCKAR

SEQ ID NO: 9354 - protein, 553 aa, Artificial Sequence
  derived and/or modified protein sequence (wt) from HRSV__ALC74025.1__F-del
MELLIHRSSAIFLTLAINALYLTSSQNITEEFYQSTCSAVSRGYLSALRTGWYTSVITIELSNIKETKCNGTDTKVKLIKQELDKYKNAVTELQLLMQNTPAVNNRARREAPQYMNYTINTTKNPNVSISKKRKRRFLGFLLGVGSAIASGIAVSKVLHLEGEVNKIKNALLSTNKAVVSLSNGVSVLTSKVLDLKNYINNQLLPIVNQQSCRISNIETVIEFQQKNSRLLEITREFSVNAGVTTPLSTYMLTNSELLSLINDMPITNDQKKLMSSNVQIVRQQSYSIMSIIKEEVLAYVVQLPIYGVIDTPCWKLHTSPLCTTNIKEGSNICLTRTDRGWYCDNAGSVSFFPQADTCKVQSNRVFCDTMNSLTLPSEVSLCNTDIFNSKYDCKIMTSKTDISSSVITSLGAIVSCYGKTKCTASNKNRGIIKTFSNGCDYVSNKGVDTVSVGNTLYYVNKLEGKNLYVKGEPIINYYDPLVFPSDEFDASISQVNEKINQSLAFIRRSDELLHNVNTGKSTTNIMITAIIIVIIVVLLSLIAIGLLLYCKAK

SEQ ID NO: 9355 - protein, 553 aa, Artificial Sequence
  derived and/or modified protein sequence (wt) from HRSV__AHV81286.1__F-del
MELPILKTNAITTIFAAVTLCFASSQNITEEFYQSTCSAVSKGYLSALRTGWYTSVITIELSNIKENKCNGTDAKVKLIKQELDKYKNAVTELQLLMQSTPAANSRARRELPRFMNYTLNNTKNTNVTLSKKRKRRFLGFLLGVGSAIASGIAVSKVLHLEGEVNKIKSALLSTNKAVVSLSNGVSVLTSKVLDLKNYIDKQLLPIVNKQSCSISNIETVIEFQQKNNRLLEITREFSVNAGVTTPVSTYMLTNSELLSLINDMPITNDQKKLMSSNVQIVRQQSYSIMSIIKEEVLAYVVQLPLYGVIDTPCWKLHTSPLCTTNTKEGSNICLTRTDRGWYCDNAGSVSFFPQAETCKVQSNRVFCDTMNSLTLPSEVNLCNIDIFNPKYDCKIMTSKTDVSSSVITSLGAIVSCYGKTKCTASNKNRGIIKTFSNGCDYVSNKGVDTVSVGNTLYYVNKQEGKSLYVKGEPIINFYDPLVFPSDEFDASISQVNEKINQSLAFIRKSDELLHNVNAGKSTTNIMITTIIIVIIVILLALIAVGLLLYCKAR

SEQ ID NO: 9356 - protein, 553 aa, Artificial Sequence
  derived and/or modified protein sequence (wt) from HRSV__AOD40516.1__F-del
MELPILKTNAITTILAAVTLCFASSQNITEEFYQSTCSAVSKGYLSALRTGWYTSVITIELSNIKENKCNGTDAKVKLIKQELDKYKNAVTELQLLMQSTPAANSRARRELPRFMDYTLNNTKNTNVTLSKKRKRRFLGFLLGVGSAIASGIAVSKVLHLEGEVNKIKSALLSTNKAVVSLSNGVSVLTSKVLDLKNYIDKQLLPIVNKQSCSISNIETVIEFQQKNNRLLEITREFSVNAGVTTPVSTYMLTNSELLSLINDMPITNDQKKLMSSNVQIVRQQSYSIMSIIKEEVLAYVVQLPLYGVIDTPCWKLHTSPLCTTNTKEGSNICLTRTDRGWYCDNAGSVSFFPQAETCKVQSNRVFCDTMNSLTLPSEVNLCNIDIFNPKYDCKIMTSKTDVSSSVITSLGAIVSCYGKTKCTASNKNRGIIKTFSNGCDYVSNKGVDTVSVGNTLYYVNKQEGKSLYVKGEPIINFYDPLVFPSDEFDASISQVNEKINQSLAFIRKSDELLHNANAGKSTTNIMITTIIIVIIVILLALIAVGLLLYCKAR

SEQ ID NO: 9357 - protein, 553 aa, Artificial Sequence
  derived and/or modified protein sequence (wt) from HRSV__AOD40125.1__F-del
MELPILKTNAITTILAAVTLCFASSQNITEEFYQSTCSAVSKGYLSALRTGWYTSVITVELSNIKENKCNGTDAKVKLIKQELDKYKNAVTELQLLMQSTPAANSRARRELPRSMDYTLNNTKNTNVTLSKKRKRRFLGFLLGVGSAIASGIAVSKVLHLEGEVNKIKSALLSTNKAVVSLSNGVSVLTSKVLDLKNYIDKQLLPIVNKQSCSISNIETVIEFQQKNNRLLEITREFSVNAGVTTPVSTYMLTNSELLSLINDMPITNDQKKLMSSNVQIVRQQSYSIMSIIKEEVLAYVVQLPLYGVIDTPCWKLHTSPLCTTNTKEGSNICLTRTDRGWYCDNAGSVSFFPQAETCKVQSNRVFCDTMNSLTLPSEVNLCNIDIFNPKYDCKIMTSKTDVSSSVITSLGAIVSCYGKTKCTASNKNRGIIKTFSNGCDYVSNKGVDTVSVGNTLYYVNKQEGKSLYVKGEPIINFYDPLVFPSDEFDASISQVNEKINQSLAFIRKSDELLHNVNAGKSTTNIMITTIIIVIIVILLALIAVGLLLYCKAR

SEQ ID NO: 9358 - protein, 553 aa, Artificial Sequence
  derived and/or modified protein sequence (wt) from HRSV__AOD40104.1__F-del
MELPILKTNAITTILAAVTLCFASSQNITEEFYQSTCSAVSKGYLSALRTGWYTSVITIELSNIKENKCNGTDAKVKLIKQELDKYKNAVTELQLLMQSTPAANSRARRELPRFMDYTLNNTKNTNVTLGKKRKRRFLGFLLGVGSAIASGIAVSKVLHLEGEVNKIKSALLSTNKAVVSLSNGVSVLTSKVLDLKNYIDKQLLPIVNKQSCSISNIETVIEFQQKNNRLLEITREFSVNAGVTTPVSTYMLTNSELLSLINDMPITNDQKKLMSSNVQIVRQQSYSIMSIIKEEVLAYVVQLPLYGVIDTPCWKLHTSPLCTTNTKEGSNICLTRTDRGWYCDNAGSVSFFPQAETCKVQSNRVFCDTMNSLTLPSEVNLCNIDIFNPKYDCKIMTSKTDVSSSVITSLGAIVSCYGKTKCTASNKNRGIIKTFSNGCDYVSNKGVDTVSVGNTLYYVNKQEGKSLYVKGEPIINFYDPLVFPSDEFDASISQVNEKINQSLAFIRKSDELLHNVNAGKSTTNIMITIIIIVIIVILLALIAVGLLLYCKAR

SEQ ID NO: 9359 - protein, 553 aa, Artificial Sequence
  derived and/or modified protein sequence (wt) from HRSV__AOD40082.1__F-del
MELPILKTNAITTILAAVTLCFASSQNITEEFYQSTCSAVSKGYLSALRTGWYTSVITIELSNIKENKCNGTDAKVKLIKQELDKYKNAVTELQLLMQSTPAANSRARRELPRFMDYTLNNTKNTNVTLGKKRKRRFLGFLLGVGSAIASGIAVSKVLHLEGEVNKIKSALLSTNKAVVSLSNGVSVLTSKVLDLKNYIDKQLLPIVNKQSCSISNIETVIEFQQKNNRLLEITREFSVNAGVTTPVSTYMLTNSELLSLINDMPITNDQKKLMSSNVQIVRQQSYSIMSIIKEEVLAYVVQLPLYGVIDTPCWKLHTSPLCTTNTKEGSNICLTRTDRGWYCDNAGSVSFFPQAETCKVQSNRVFCDTMNSLTLPSEVNLCNIDIFNPKYDCKIMTSKTDVSSSVITSLGAIVSCYGKTKCTASNKNRGIIKTFSNGCDYVSNKGVDTVSVGNTLYYVNKQEGKSLYVKGEPIINFYDPLVFPSDEFDASISQVNEKINQSLAFIRKSDELLHNVNAGKSTTNIMITTIIIVIIVILLALIAVGLLLYCKAR

SEQ ID NO: 9360 - protein, 553 aa, Artificial Sequence
  derived and/or modified protein sequence (wt) from HRSV__AOD39908.1__F-del
MELPILKTNAITTILAAVTLCFASSQNITEEFYQSTCSAVSKGYLSALRTGWYTSVITIELSNIKENKCNGTDAKVKLIKQELDKYKNAVTELQLLMQSTPAANSRARRELPRFMDYTLNNTKNTNVTLSKKRKRRFLGFLLGVGSAIASGIAVSKVLHLEGEVNKIKSALLSTNKAVVSLSNGVSVLTSKVLDLKNYIDKQLLPIVNKQSCSISNIETVIEFQQKNNRLLEITREFSVNAGVTTPVSTYMLTNSELLSLINDMPITNDQKKLMSSNVQIVRQQSYSIMSIIKEEVLAYVVQLPLYGVIDTPCWKLHTSPLCTTNTKEGSNICLTRTDRGWYCDNAGSVSFFPQAETCKVQSNRVFCDTMNSLTLPSEVNLCNIDIFNPKYDCKIMTSKTDVSSSVITSLGAIVSCYGKTKCTASNKNRGIIKTFSNGCDYVSNKGVDTVSVGNTLYYVNKQEGKSLYVKGEPIINFYDPLVFPSDEFDASISQVNEKINQSLAFIRKSDELLHNVNAGKSTTNIMITIIIIVIIVILLALIAVGLLLYCKAR

SEQ ID NO: 9361 - protein, 553 aa, Artificial Sequence
  derived and/or modified protein sequence (wt) from HRSV__AJF44826.1__F-del
MELPILKTNAITTILAAVTLCFASSQNITEEFYQSTCSAVSKGYLSALRTGWYTSVITIELSNIKENKCNGTDAKVKLIKQELDKYKNAVTELQLLMQSTPAANSRARRELPRFMDYTPNNTKNTNVTLGKKRKRRFLGFLLGVGSAIASGIAVSKVLHLEGEVNKIKSALLSTNKAVVSLSNGVSVLTSKVLDLKNYIDKQLLPIVNKQSCSISNIETVIEFQQKNNRLLEITREFSVNAGVTTPVSTYMLTNSELLSLINDMPITNDQKKLMSSNVQIVRQQSYSIMSIIKEEVLAYVVQLPLYGVIDTPCWKLHTSPLCTTNTKEGSNICLTRTDRGWYCDNAGSVSFFPQAETCKVQSNRVFCDTMNSLTLPSEVNLCNIDIFNPKYDCKIMTSKTDVSSSVITSLGAIVSCYGKTKCTASNKNRGIIKTFSNGCDYVSNKGVDTVSVGNTLYYVNKQEGKSLYVKGEPIINFYDPLVFPSDEFDASISQVNEKINQSLAFIRKSDELLHNVNAGKSTTNIMITIIIIVIIVILLALIAVGLLLYCKAR

SEQ ID NO: 9362 - protein, 553 aa, Artificial Sequence
  derived and/or modified protein sequence (wt) from HRSV__AJF44506.1__F-del
MELPILKTNAITTILAAVTLCFASSQNITEEFYQSTCSAVSKGYLSALRTGWYTSVITIELSNIKENKCNGTDAKVKLIKQELDKYKNAVTELQLLMQSTPAANSRARRELPRSMDYTLNNTKNTNVTLSKKRKRRFLGFLLGVGSAIASGIAVSKVLHLEGEVNKIKSALLSTNKAVVSLSNGVSVLTSKVLDLKNYIDKQLLPIVNKQSCSISNIETVIEFQQKNNRLLEITREFSVNAGVTTPVSTYMLTNSELLSLINDMPITNDQKKLMSSNVQIVRQQSYSIMSIIKEEVLAYVVQLPLYGVIDTPCWKLHTSPLCTTNTKEGSNICLTRTDRGWYCDNAGSVSFFPQAETCKVQSNRVFCDTMNSLTLPSEVNLCNIDIFNPKYDCKIMTSKTDVSSSVITSLGAIVSCYGKTKCTASNKNRGIIKTFSNGCDYVSNKGVDTVSVGNTLYYVNKQEGKSLYVKGEPIINFYDPLVFPSDEFDASISQVNEKINQSLAFIRKSDELLHNVNAGKSTTNIMITTIIIVIIVILLALIAVGLLLYCKAR

SEQ ID NO: 9363 - protein, 553 aa, Artificial Sequence
  derived and/or modified protein sequence (wt) from HRSV__AJF44535.1__F-del
MELPILKTNAITTILAAVTLCFASSQNITEEFYQSTCSAVSKGYLSALRTGWYTSVITIELSNIKENKCNGTDAKVKLIKQELDKYKNAVTELQLLMQSTPAANSRARRELPRFMDYTLNNTKNTNVTLSKKRKRRFLGFLLGVGSAIASGIAVSKVLHLEGEVNKIKSALLSTNKAVVSLSNGVSVLTSKVLDLKNYIDKQLLPIVNKQSCSISNIETVIEFQQKNNRLLEITREFSVNAGVTTPVSTYMLTNSELLSLINDMPITNDQKKLMSSNVQIVRQQSYSIMSIIKEEVLAYVVQLPLYGVIDTPCWKLHTSPLCTTNTKEGSNICLTRTDRGWYCDNAGSVSFFPQAETCKVQSNRVFCDTMNSLTLPSEVNLCNIDIFNPKYDCKIMTSKTDVSSSVITSLGAIVSCYGKTKCTASNKNRGIIKTFSNGCDYVSNKGVDTVSVGNTLYYVNKQEGKSLYVKGEPIINFYDPLVFPSDEFDASISQVNEKINQSLAFIRKSDELLHNVNAGKSTTNIMITTIIIVIIVILLALIAVGLLLYCKAR

SEQ ID NO: 9364 - protein, 553 aa, Artificial Sequence
  derived and/or modified protein sequence (wt) from HRSV__ANZ80463.1__F-del
MELPILKTNAITTILAAVTLCFASSQNITEEFYQSTCSAVSKGYLSALRTGWYTSVITIELSNIKENKCNGTDAKVKLIKQELDKYKNAVTELQLLMQSTPATNSRARRELPRFMNYTLNDTKNTNVTLSKKRKRRFLGFLLGVGSAIASGIAVSKVLHLEGEVNKIKSALLSTNKAVVSLSNGVSVLTSKVLDLKNYIDKQLLPIVNKQSCSISNIETVIEFQQKNNRLLEITREFSVNAGVTTPVSTYMLTNSELLSLINDMPITNDQKKLMSSNVQIVRQQSYSIMSIIKEEVLAYVVQLPLYGVIDTPCWKLHTSPLCTTNTKEGSNICLTRTDRGWYCDNAGSVSFFPQAETCKVQSNRVFCDTMNSLTLPSEVNLCNIDIFNPKYDCKIMTSKTDVSSSVITSLGAIVSCYGKTKCTASNKNRGIIKTFSNGCDYVSNKGVDTVSVGNTLYYVNKQEGKSLYVKGEPIINFYDPLVFPSDEFDASISQVNEKINQSLAFIRKSDELLHNVNAGKSTTNIMITTIIIVIIVILLALIAVGLLLYCKAR

SEQ ID NO: 9365 - protein, 553 aa, Artificial Sequence
  derived and/or modified protein sequence (wt) from HRSV__ANZ80408.1__F-del
MELLIHRSSAIFLTLAINALYLTSSQNITEEFYQSTCSAVSRGYLSALRTGWYTSVITIELSNIKETKCNGTDTKVKLIKQELDKYKNAVTELQLLMQNTPAANNRARREAPQYMNYTIKTTKNLNVSISKKRKRRFLGFLLGVGSAIASGIAVSKVLHLEGEVNKIKNALLSTNKAVVSLSNGVSVLTSKVLDLKNYINNQLLPIVNQQSCRISNIETVIEFQQKNSRLLEITREFSVNAGVTTPLSTYMLTNSELLSLINDMPITNDQKKLMSSNVQIVRQQSYSIMSIIKEEVLAYVVQLPIYGVIDTPCWKLHTSPLCTTNIKEGSNICLTRTDRGWYCDNAGSVSFFPQADTCKVQSNRVFCDTMNSLTLPSEVSLCNTDIFNSKYDCKIMTSKTDISSSVITSLGAIVSCYGKTKCTASNKNRGIIKTFSNGCDYVSNKGVDTVSVGNTLYYVNKLEGKNLYVKGEPIINYYDPLVFPSDEFDASISQVNEKINQSLAFIRRSDELLHNVNTGKSTTNIIITAIIIVIIVVLLSLIAIGLLLYCKAK

SEQ ID NO: 9366 - protein, 553 aa, Artificial Sequence
  derived and/or modified protein sequence (wt) from HRSV__ANZ80397.1__F-del
MELLIHRSSAIFLTLAINTLYLTSSQNITEEFYQSTCSAVSRGYFSALRTGWYTSVITIELSNIKETKCNGTDTKVKLIKQELDKYKNAVTELQLLMQNTPAANNRARREAPQYMNHTINTTKNLNVSISKKRKRRFLGFLLGVGSAIASGIAVSKVLHLEGEVNKIKNALLSTNKAVVSLSNGVSVLTSKVLDLKNYINNQLLPIVNQQSCRISNIETVIEFQQKNSRLLEITREFSVNAGVTTPLSTYMLTNSELLSLINDMPITNDQKKLMSSNVQIVRQQSYSIMSIIKEEVLAYVVQLPIYGVIDTPCWKLHTSPLCTTNIKEGSNICLTRTDRGWYCDNAGSVSFFPQADTCKVQSNRVFCDTMNSLTLPSEVSLCNTDIFNSKYDCKIMTSKTDISSSVITSLGAIVSCYGKTKCTASNKNRGIIKTFSNGCDYVSNKGVDTVSVGNTLYYVNKLDGKNLYVKGEPIINYYDPLVFPSDEFDASISQVNEKINQSLAFIRRSDELLHNVNTGKSTTNIMITAIIIVIIVVLLSLIAIGLLLYCKAK

SEQ ID NO: 9367 - protein, 553 aa, Artificial Sequence
  derived and/or modified protein sequence (wt) from HRSV__ANZ80386.1__F-del
MELLIHRSSAIFLTLAINTLYLTSSQNITEEFYQSTCSAVSRGYLSALRTGWYTSVITIELSNIKETKCNGTDTKVKLIKQELDKYKNAVTELQLLMQNTPAANNRARREAPQYMNYTINTTKNLNASISKKRKRRFLGFLLGVGSAIASGIAVSKVLHLEGEVNKIKNALLSTNKAVVSLSNGVSVLTSKVLDLKNYINNQLLPIVNQQSCRISNIETVIEFQQKNSRLLEITREFSVNAGVTTPLSTYMLTNSELLSLINDMPITNDQKKLMSSNVQIVRQQSYSIMSIIKEEVLAYVVQLPIYGVIDTPCWKLHTSPLCTTNIKEGSNICLTRTDRGWYCDNAGSVSFFPQADTCKVQSNRVFCDTMNSLTLPSEVSLCNTDIFNSKYDCKIMTSKTDISSSVITSLGAIVSCYGKTKCTASNKNRGIIKTFSNGCDYVSNKGVDTVSVGNTLYYVNKLEGKNLYVKGEPIINYYDPLVFPSDEFDASISQVNEKINQSLAFIRRSDELLHNVNTGKSTTNIMITAIIIVIIVVLLSLIAIGLLLYCKAK

SEQ ID NO: 9368 - protein, 553 aa, Artificial Sequence
  derived and/or modified protein sequence (wt) from HRSV__ANZ80331.1__F-del
MELPILKTNAIITILAAVTLCFASSQNITEEFYQSTCSAVSKGYLSALRTGWYTSVITIELSNIKENKCNGTDAKVKLIKQELDKYKNAVTELQLLMQSTPAANSRARRELPRFMNYTLNNTKNTNVTLSKKRKRRFLGFLLGVGSAIASGIAVSKVLHLEGEVNKIKSALLSTNKAVVSLSNGVSVLTSKVLDLKNYIDKQLLPIVNKQSCSISNIETVIEFQQKNNRLLEITREFSVNAGVTTPVSTYMLTNSELLSLINDMPITNDQKKLMSSNVQIVRQQSYSIMSIIKEEVLAYVVQIPLYGVIDTPCWKLHTSPLCTTNTKEGSNICLTRTDRGWYCDNAGSVSFFPQAETCKVQSNRVFCDTMNSLTLPSEVNLCNIDIFNPKYDCKIMTSKTDVSSSVITSLGAIVSCYGKTKCTASNKNRGIIKTFSNGCDYVSNKGVDTVSVGNTLYYVNKQEGKSLYVKGEPIINFYDPLVFPSDEFDASISQVNEKINQSLAFIRKSDELLHNVNAGKSTTNIMITTIIIVIIVILLALIAVGLLLYCKAR

SEQ ID NO: 9369 - protein, 553 aa, Artificial Sequence
  derived and/or modified protein sequence (wt) from HRSV__ANZ80320.1__F-del
MELPILKTNAITTILAAVTLCFASSQNITEEFYQSTCSAVSKGYLSALRTGWYTSVITIELSNIKENKCNGTDAKVKLIKQELDKYKNAVTELQLLMQSTPAANSRARRELPRFMNYTLNYTKNTNVTLSKKRKRRFLGFLLGIGSAIASGIAVSKVLHLEGEVNKIKSALLSTNKAVVSLSNGVSVLTSKVLDLKNYIDKQLLPIVNKQSCSISNIETVIEFQQKNNRLLEITREFSVNAGVTTPVSTYMLTNSELLSLINDMPITNDQKKLMSSNVQIVRQQSYSIMSIIKEEVLAYVVQLPLYGVIDTPCWKLHTSPLCTTNTKEGSNICLTRTDRGWYCDNAGSVSFFPQAETCKVQSNRVFCDTMNSLTLPSEVNLCNIDIFNPKYDCKIMTSKTDVSSSVITSLGAIVSCYGKTKCTASNKNRGIIKTFSNGCDYVSNKGVDTVSVGNTLYYVNKQEGKSLYVKGEPIINFYDPLVFPSDEFDASISQVNEKINQSLAFIRKSDELLHNVNAGKSTTNIMITTIIIVIIVILLALIAVGLLLYCKAR

SEQ ID NO: 9370 - protein, 553 aa, Artificial Sequence
  derived and/or modified protein sequence (wt) from HRSV__ANZ80364.1__F-del
MELPIFKTNAITTILAVVTLCFASSQNITEEFYQSTCSAVSKGYLSALRTGWYTSVITIELSNIKENKCNGTDAKVKLIKQELDKYKNAVTELQLLMQSTPAANSRARRELPRFMNYTLNNTKNTNVTLSKKRKRRFLGFLLGVGSAIASGIAVSKVLHLEGEVNKIKSALLSTNKAVVSLSNGVSVLTSKVLDLKNYIDKQLLPIVNKQSCSISNIETVIEFQQKNNRLLEITREFSVNAGVTTPVSTYMLTNSELLSLINDMPITNDQKKLMSSNVQIVRQQSYSIMSIIKEEVLAYVVQLPLYGVIDTPCWKLHTSPLCTTNTKEGSNICLTRTDRGWYCDNAGSVSFFPQAETCKVQSNRVFCDTMNSLTLPSEVNLCNIDIFNPKYDCKIMTSKTDVSSSVITSLGAIVSCYGKTKCTASNKNRGIIKTFSNGCDYVSNKGVDTVSVGNTLYYVNKQEGKSLYVKGEPIINFYDPLVFPSDEFDASISQVNEKINQSLAFIRKSDELLHNVNAGKSTTNIMITTIIIVIIVILLALIAVGLLLYCKAR

SEQ ID NO: 9371 - protein, 553 aa, Artificial Sequence
  derived and/or modified protein sequence (wt) from HRSV__ANZ80276.1__F-del
MELLIHRSSAIFLTLAINALYLTSSQNITEEFYQSTCSAVSRGYLSALRTGWYTSVITIELSNIKETKCNGTDTKVKLIKQELDKYKNAVTELQLLMQNTPAANNRARREAPQYVNYTINTTKNLNVSISKKRKRRFLGFLLGVGSAIASGIAVSKVLHLEGEVNKIKNALLSTNKAVVSLSNGVSVLTSKVLDLKNYINNQLLPIVNQQSCRISNIETVIEFQQKNSRLLEITREFSVNAGVTTPLSTYMLTNSELLSLINDMPITNDQKKLMSSNVQIVRQQSYSIMSIIKEEVLAYVVQLPIYGVIDTPCWKLHTSPLCTTNIKEGSNICLTRTDRGWYCDNAGSVSFFPQADTCKVQSNRVFCDTMNSLTLPSEVSLCNTDIFNSKYDCKIMTSKTDISSSVITSLGAIVSCYGKTKCTASNKNRGIIKTFSNGCDYVSNKGVDTVSVGNTLYYVNKLEGKNLYVKGEPIINYYDPLVFPSDEFDASISQVNEKINQSLAFIRRSDELLHNVNTGKSTTNIMITAIIIVIIVVLLSLIAIGLLLYCKAK

SEQ ID NO: 9372 - protein, 553 aa, Artificial Sequence
  derived and/or modified protein sequence (wt) from HRSV__ANZ80221.1__F-del
MELLIHRSNAIFLTLAINALYLTSSQNITEEFYQSTCSAVSRGYFSALRTGWYTSVITIELSNIKETKCNGTDTKVKLIKQELDKYKNAVTELQLLMQNTPAANNRARREAPQYMNYTINTTKNLNVSISKKRKRRFLGFLLGVGSAIASGIAVSKVLHLEGEVNKIKNALLSTNKAVVSLSNGVSVLTSKVLDLKNYINNQLLPIVNQQSCRISNIETVIEFQQKNSRLLEITREFSVNAGVTTPLSTYMLTNSELLSLINDMPITNDQKKLMSSNVQIVRQQSYSIMSIIKEEVLAYVVQLPIYGVIDTPCWKLHTSPLCTTNIKEGSNICLTRTDRGWYCDNAGSVSFFPQADTCKVQSNRVFCDTMNSLTLPSEVSLCNTDIFNSKYDCKIMTSKTDISSSVITSLGAIVSCYGKTKCTASNKNRGIIKTFSNGCDYVSNKGVDTVSVGNTLYYVNKLEGKNLYVKGEPIINYYDPLVFPSDEFDASISQVNEKINQSLAFIRRSDELLHNVNTGKSTTNIMITAIIIVIIVVLLSLIAIGLLLYCKAK

SEQ ID NO: 9373 - protein, 553 aa, Artificial Sequence
  derived and/or modified protein sequence (wt) from HRSV__ANZ80188.1__F-del
MELPILKTNAITTILAAVTLCFASSQNITEEFYQSTCSAVSKGYLSALRTGWYTSVITIELSNIKENKCNGTDAKVKLIKQELDKYKNAVTELQLLMQSTPAANSRARRELPRFMNYTFNNTKNTNVTLSKKRKRRFLGFLLGVGSAIASGIAVSKVLHLEGEVNKIKSALLSTNKAVVSLSNGVSVLTSKVLDLKNYIDKQLLPIVNKQSCSISNIETVIEFQQKNNRLLEITREFSVNAGVTTPVSTYMLTNSELLSLINDMPITNDQKKLMSSNVQIVRQQSYSIMSIIKEEVLAYVVQLPLYGVIDTPCWKLHTSPLCTTNTKEGSNICLTRTDRGWYCDNAGSVSFFPQAETCKVQSNRVFCDTMNSLTLPSEVNLCNIDIFNPKYDCKIMTSKTDVSSSVITSLGAIVSCYGKTKCTASNKNRGIIKTFSNGCDYVSNKGVDTVSVGNTLYYVNKQEGKSLYVKGEPIINFYDPLVFPSDEFDASISQVNEKINQSLAFIRKSDELLHNVNAGKSTTNIMITTIIIVIIVILLALIAVGLLLYCKAR

SEQ ID NO: 9374 - protein, 553 aa, Artificial Sequence
  derived and/or modified protein sequence (wt) from HRSV__ANZ80144.1__F-del
MELPILKTNAITTILAAVTLCFASSQNITEEFYQSTCSAVSKGYLSALRTGWYTSVITIELSNIKENKCNGTDAKVKLIKQELDKYKNAITELQLLMQSTPAANSRARRELPRFMNYTLNNTKNTNVTLSKKRKRRFLGFLLGVGSAIASGIAVSKVLHLEGEVNKIKSALLSTNKAVVSLSNGVSVLTSKVLDLKNYIDKQLLPIVNKQSCSISNIETVIEFQQKNNRLLEITREFSVNAGVTTPVSTYMLTNSELLSLINDMPITNDQKKLMSSNVQIVRQQSYSIMSIIKEEVLAYVVQLPLYGVIDTPCWKLHTSPLCTTNTKEGSNICLTRTDRGWYCDNAGSVSFFPQAETCKVQSNRVFCDTMNSLTLPSEVNLCNIDIFNPKYDCKIMTSKTDVSSSVITSLGAIVSCYGKTKCTASNKNRGIIKTFSNGCDYVSNKGVDTVSVGNTLYYVNKQEGKSLYVKGEPIINFYDPLVFPSDEFDASISQVNEKINQSLAFIRKSDELLHNVNAGKSTTNIMMTTIIIVIIVILLALIAVGLLLYCKAR

SEQ ID NO: 9375 - protein, 553 aa, Artificial Sequence
  derived and/or modified protein sequence (wt) from HRSV__ANZ80133.1__F-del
MELLIHRSSAIFLTLAINALYLTSSQNITEEFYQSTCSAVSRGYLSALRTGWYTSVITIELSNIKETKCNGTDTKVKLIKQELDKYKNAVTELQLLMQNTPAVNNRARREAPQYMNYTINTTKNLNVSISKKRKRRFLGFLLGVGSAIASGIAVSKVLHLEGEVNKIKNALLSTNKAVVSLSNGVSVLTSKVLDLKNYINNQLLPIVNRQSCRISNIETVIEFQQKNSRLLEITREFSVNAGVTTPLSTYMLTNSELLSLINDMPITNDQKKLMSSNVQIVRQQSYSIMSIIKEEVLAYVVQLPIYGVIDTPCWKLHTSPLCTTNIKEGSNICLTRTDRGWYCDNAGSVSFFPQADTCKVQSNRVFCDTMNSLTLPSEVSLCNTDIFNSKYDCKIMTSKTDISSSVITSLGAIVSCYGKTKCTASNKNRGIIKTFSNGCDYVSNKGVDTVSVGNTLYYVNKLEGKNLYVKGEPIINYYDPLVFPSDEFDASISQVNEKINQSLAFIRRSDELLHNVNTGKSTTNIMITAIIIVIIVVLLSLIAIGLLLYCKAK

SEQ ID NO: 9376 - protein, 553 aa, Artificial Sequence
  derived and/or modified protein sequence (wt) from HRSV__ANZ80111.1__F-del
MELPILKTNAITTILAAVTLCFASSQNITEEFYQSTCSAVSKGYLSALRTGWYTSVITIELSNIKENKCNGTDAKVKLIKQELDKYKNAVTELQLLMQSTPAANSRARRELPRFMNYTLNNTKNTNVTLSKKRKRRFLGFLLGVGSAIASGIAVSKVLHLEGEVNKIKSALLSTNKAVVSLSNGVSVLTSKVLDLKNYIDKQLLPIVNKQSCSISNIETVIEFQQKNNRLLEITREFSVNAGVTTPVSTYMLTNSELLSLINDMPITNDQKKLMSSNVQIVRQQSYSIMSIIKEEVLAYVVQLPLYGVIDTPCWKLHTSPLCTTNTKEGSNICLTRTDRGWYCDNAGSVSFFPQAETCKVQSNRVFCDTMNSLTLPSEVNLCNIDIFNPKYDCKIMTSKTDVSSSVITSLGAIVSCYGKTKCTASNKNRGIIKTFSNGCDYVSNKGVDTVSVGNTLYYVNKQEGKSLYVKGEPIINFYDPLVFPSDEFDASISQVNEKINQSLAFIRKSDELLHNVNAGKSTTNIMITTIIIVIIVILLALIAVGLLLYCKAK

SEQ ID NO: 9377 - protein, 553 aa, Artificial Sequence
  derived and/or modified protein sequence (wt) from HRSV__ANZ80122.1__F-del
MELLIHRSSAIFLTLAINALYLTSSQNITEEFYQSTCSAVSRGYLSALRTGWYTSVITIELSNIKETKCNGTDTKVKLIKQELDKYKNAVTELQLLMQNTPAANNRARREAPQYMNYTINTTINLNISISKKRKRRFLGFLLGVGSAIASGIAVSKVLHLEGEVNKIKNALLSTNKAVVSLSNGVSVLTSKVLDLKNYINNQLLPIVNQQSCRISNIETVIEFQQKNSRLLEITREFSVNAGVTTPLSTYMLTNSELLSLINDMPITNDQKKLMSSNVQIVRQQSYSIMSIIKEEVLAYVVQLPIYGVIDTPCWKLHTSPLCTTNIKEGSNICLTRTDRGWYCDNAGSVSFFPQADTCKVQSNRVFCDTMNSLTLPSEVSLCNTDIFNSKYDCKIMTSKTDISSSVITSLGAIVSCYGKTKCTASNKNRGIIKTFSNGCDYVSNKGVDTVSVGNTLYYVNKLEGKNLYVKGEPIINYYDPLVFPSDEFDASISQVNEKINQSLAFIRRSDELLHNVNTGKSTTNIMITVIIIVIIVVLLSLIAIGLLLYCKAK

SEQ ID NO: 9378 - protein, 553 aa, Artificial Sequence
  derived and/or modified protein sequence (wt) from HRSV__ANZ80056.1__F-del
MELLIHRSSAIFLTLAINALYLTSSQNITEEFYQSTCSAVSRGYLSALRTGWYTSVITIELSNIKETKCNGTDTKVKLIKQELDKYKNAVTELQLLMQNTPAANNRARREAPQYMNYTINTTKNLNVSISKKRKRRFLGFLLGVGSAIASGIAVSKVLHLEGEVNKIKNALLSTNKAVVSLSNGVSVLTSKVLDLKNYINNQLLPIVNQQSCRISNIETVIEFQQKNSRLLEITREFSVNAGVTTPLSTYMLTNSELLSLINDMPITNDQKKLMSSNVQIVRQQSYSIMSIIKEEVLAYVVQLPIYGVIDTPCWKLHTSPLCTTNIKEGSNICLTRTDRGWYCDNAGSVSFFPQADTCKVQSNRVFCDTMNSLTLPSEVSLCNTDIFNSKYDCKIMTSKTDISSSVITSLGAIVSCYGKTKCTASNKNRGIIKTFFNGCDYVSNKGVDTVSVGNTLYYVNKLEGKNLYVKGEPIINYYDPLVFPSDEFDASISQVNEKINQSLAFIRRSDELLHNVNTGKSTTNIMITVIIIVIIVVLLSLIAIGLLLYCKAK

SEQ ID NO: 9379 - protein, 553 aa, Artificial Sequence
  derived and/or modified protein sequence (wt) from HRSV__ANZ80012.1__F-del
MELPILKTNAITTILAAVTLCFASSQNITEEFYQSTCSAVSKGYLSALRTGWYTSVITIELSNIKENKCNGTDAKVKLIKQELDKYKNAVTELQLLMQSTPAANSRARRELPRFMNYTLNYTKNTNVTLSKKRKRRFLGFLLGVGSAIASGIAVSKVLHLEGEVNKIKSALLSTNKAVVSLSNGVSVLTSKVLDLKNYIDKQLLPIVNKQSCSISNIETVIEFQQKNNRLLEITREFSVNAGVTTPVSTYMLTNSELLSLINDMPITNDQKKLMSSNVQIVRQQSYSIMSIIKEEVLAYVVQLPLYGVIDTPCWKLHTSPLCTTNTKEGSNICLTRTDRGWYCDNAGSVSFFPQAETCKVQSNRVFCDTMNSLTLPSEVNLCNIDIFNPKYDCKIMTSKTDVSSSVITSLGAIVSCYGKTKCTASNKNRGIIKTFSNGCDYVSNKGVDTVSVGNTLYYVNKQEGKSLYVKGEPIINFYDPLVFPSDEFDASISQVNEKINQSLAFIRKSDELLHNVNAGKSTTNIMITTIIIVIIVILLALIAVGLLLYCKAR

SEQ ID NO: 9380 - protein, 553 aa, Artificial Sequence
  derived and/or modified protein sequence (wt) from HRSV__ANZ80067.1__F-del
MELLIHRSSAIFLTLAINALYLTSSQNITEEFYQSTCSAVSRGYLSALRTGWYTSVITIELSNIKETKCNGTDTKVKLIKQELDKYKNAVTELQLLMQNTPAANNRARREAPQYMNYTINTTGNLNVSIGKRRKRRFLGFLLGVGSAIASGIAVSKVLHLEGEVNKIKNALLSTNKAVVSLSNGVSVLTSKVLDLKNYINNQLLPIVNQQSCRISNIETVIEFQQKNSRLLEITREFSVNAGVTTPLSTYMLTNSELLSLINDMPITNDQKKLMSSNVQIVRQQSYSIMSIIKEEVLAYVVQLPIYGVIDTPCWKLHTSPLCTTNIKEGSNICLTRTDRGWYCDNAGSVSFFPQADTCKVQSNRVFCDTMNSLTLPSEVSLCNTDIFNSKYDCKIMTSKTDISSSVITSLGAIVSCYGKTKCTASNKNRGIIKTFSNGCDYVSNKGVDTVSVGNTLYYVNKLEGKNLYVKGEPIINYYDPLVFPSDEFDASISQVNEKINQSLAFIRRSDELLHNVNTGKSTTNIMITAIIIVIIVVLLSLIAIGLLLYCKAK

SEQ ID NO: 9381 - protein, 553 aa, Artificial Sequence
  derived and/or modified protein sequence (wt) from HRSV__ANZ79979.1__F-del
MELPILKTNAITTILAAVTLCFASSQNITEEFYQSTCSAVSKGYLSALRTGWYTSVITIELSNIKENKCNGTDAKVKLIKQELDKYKNAVTELQLLMQSTPAANNRARRELPRFMNYTLNNTKKTNVTLSKKRKRRFLGFLLGVGSAIASGIAVSKVLHLEGEVNKIKSALLSTNKAVVSLSNGVSVLTSKVLDLKNYIDKQLLPIVNKQSCSISNIETVIEFQQKNNRLLEITREFSVNAGVTTPVSTYMLTNSELLSLINDMPITNDQKKLMSSNVQIVRQQSYSIMSIIKEEVLAYVVQLPLYGVIDTPCWKLHTSPLCTTNTKEGSNICLTRTDRGWYCDNAGSVSFFPQAETCKVQSNRVFCDTMNSLTLPSEVNLCNIDIFNPKYDCKIMTSKTDISSSVITSLGAIVSCYGKTKCTASNKNRGIIKTFSNGCDYVSNKGVDTVSVGNTLYYVNKQEGKSLYVKGEPIINFYDPLVFPSDEFDASISQVNEKINQSLAFIRKSDELLHNVNAGKSTTNIMITTIIIVIIVILLALIAVGLLLYCKAR

SEQ ID NO: 9382 - protein, 553 aa, Artificial Sequence
  derived and/or modified protein sequence (wt) from HRSV__ANZ79935.1__F-del
MELPILKTNAIITILAAVTLCFASSQNITEEFYQSTCSAVSKGYLSALRTGWYTSVITIELSNIKENKCNGTDAKVKLIKQELDKYKNAVTELQLLMQSTPAANSRARRELPRFMNYTLNNTKNTNVTLSKKRKRRFLGFLLGVGSAIASGIAVSKVLHLEGEVNKIKSALLSTNKAVVSLSNGVSVLTSKVLDLKNYIDKQLLPIVNKQSCSISNIETVIEFQQKNNRLLEITREFSVNAGVTTPVSTYMLTNSELLSLINDMPITNDQKKLMSSNVQIVRQQSYSIMSIIKEEVLAYVVQLPLYGVIDTPCWKLHTSPLCTTNTKEGSNICLTRTDRGWYCDNAGSVSFFPQAETCKVQSNRVFCDTMNSLTLPSEVNLCNIDIFNPKYDCKIMTSKTDVSSSVITSLGAIVSCYGKTKCTASNKNRGIIKTFSNGCDYVSNKGVDTVSVGNTLYYVNKQEGKSLYVKGEPIINFYDPLVFPSDEFDASISQVNEKINQSLAFIRKSDELLHNVNAGKSTTNIMITTIIIVIIVILLALIAVGLLLYCKAK

SEQ ID NO: 9383 - protein, 553 aa, Artificial Sequence
  derived and/or modified protein sequence (wt) from HRSV__ANZ79990.1__F-del
MELLIHRSSAIFLTLAINALYLTSSQNITEEFYQSTCSAVSRGYLSALRTGWYTSVITIELSNIKETKCNGTDTKVKLIKQELDKYKNAVTELQLLMQNTPAVNNRARREVPQYMNYTINTTKNLNVSISKKRKRRFLGFLLGVGSAIASGIAVSKVLHLEGEVNKIKNALQSTNKAVVSLSNGVSVLTSKVLDLKNYINNQLLPIVNKQSCRISNIETVIEFQQKNSRLLEITREFSVNAGVTTPLSTYMLTNSELLSLINDMPITNDQKKLMSSNVQIVRQQSYSIMSIIKEEVLAYVVQLPIYGVIDTPCWKLHTSPLCTTNIKEGSNICLTRTDRGWYCDNAGSVSFFPQADTCKVQSNRVFCDTMNSLTLPSEVSLCNTDIFNSKYDCKIMTSKTDISSSVITSLGAIVSCYGKTKCTASNKNRGIIKTFSNGCDYVSNKGVDTVSVGNTLYYVNKLEGKNLYVKGEPIINYYDPLVFPSDEFDASISQVNEKINQSLAFIRRSDELLHNVNTGKSTTNIMITAIIIVIIVVLLSLIAIGLLLYCKAK

SEQ ID NO: 9384 - protein, 553 aa, Artificial Sequence
  derived and/or modified protein sequence (wt) from HRSV__ANZ79902.1__F-del
MELPILKTNAITTILAAVTLCFASSQNITEEFYQSTCSAVSKGYLSALRTGWYTSVITIELSNIKENKCNGTDAKVKLIKQELDKYKNAVTELQLLMQSTPAANSRARRELPRFMNYTLNNAKNTNVTLSKKRKRRFLGFLLGVGSAIASGIAVSKVLHLEGEVNKIKSALLSTNKAVVSLSNGVSVLTSKVLDLKNYIDKQLLPIVNKQSCSISNIETVIEFQQKNNRLLEITREFSVNAGVTTPVSTYMLTNNELLSLINDMPITNDQKKLMSSNVQIVRQQSYSIMSIIKEEVLAYVVQLPLYGVIDTPCWKLHTSPLCTTNTKEGSNICLTRTDRGWYCDNAGSVSFFPQAETCKVQSNRVFCDTMNSLTLPSEVNLCNIDIFNPKYDCKIMTSKTDVSSSVITSLGAIVSCYGKTKCTASNKNRGIIKTFSNGCDYVSNKGVDTVSVGNTLYYVNKQEGKSLYVKGEPIINFYDPLVFPSDEFDASISQVNEKINQSLAFIRKSDELLHNVNAGKSTTNIMITTIIIVIIVILLALIAVGLLLYCKAR

SEQ ID NO: 9385 - protein, 553 aa, Artificial Sequence
  derived and/or modified protein sequence (wt) from HRSV__ANZ79759.1__F-del
MELPILKANAIATVLAAVTLCFASSQNITEEFYQSTCSAVSKGYLSALRTGWYTSVITIELSNIKENKCNGTDAKVKLIKQELDKYKNAVTELQLLMQSTPAANSRARRELPRFMNYKLNNTKNTNVTLSKKRKRRFLGFLLGVGSAIASGIAVSKVLHLEGEVNKIKSALLSTNKAVVSLSNGVSVLTSKVLDLKNYIDKQLLPIVNKQSCSISNIETVIEFQQKNNRLLEITREFSVNAGVTTPVSTYMLTNSELLSLINDMPITNDQKKLMSSNVQIVRQQSYSIMSIIKEEVLAYVVQLPLYGVIDTPCWKLHTSPLCTTNTKEGSNICLTRTDRGWYCDNAGSVSFFPQAETCKVQSNRVFCDTMNSLTLPSEVNLCNIDIFNPKYDCKIMTSKTDVSSSVITSLGAIVSCYGKTKCTASNKNRGIIKTFSNGCDYVSNKGVDTVSVGNTLYYVNKQEGKSLYVKGEPIINFYDPLVFPSDEFDASISQVNEKINQSLAFIRKSDELLHNVNAGKSTTNIMMTTIIIVIIVILLALIAVGLLLYCKAR

SEQ ID NO: 9386 - protein, 553 aa, Artificial Sequence
  derived and/or modified protein sequence (wt) from HRSV__ANZ79715.1__F-del
MELPILKINAITTILAAVTLCFTSSQNITEEFYQSTCSAVSKGYLSALRTGWYTSVITIELSNIKENKCNGTDAKVKLIKQELDKYKNAVTELQLLMQSTPAANSRARRELPRFMNYTLNNTKNTNVTLSKKRKRRFLGFLLGVGSAIASGIAVSKVLHLEGEVNKIKSALLSTNKAVVSLSNGVSVLTSKVLDLKNYIDKQLLPIVNKQSCSISNIETVIEFQQKNNRLLEITREFSVNAGVTTPVSTYMLTNSELLSLINDMPITNDQKKLMSSNVQVVRQQSYSIMSIIKEEVLAYVVQLPLYGVIDTPCWKLHTSPLCTTNTKEGSNICLTRTDRGWYCDNAGSVSFFPQAETCKVQSNRVFCDTMNSLTLPSEVNLCNIDIFNPKYDCKIMTSKTDVSSSVITSLGAIVSCYGKTKCTASNKNRGIIKTFSNGCDYVSNKGVDTVSVGNTLYYVNKQEGKSLYVKGEPIINFYDPLVFPSDEFDASISQVNEKINQSLAFIRKSDELLHNVNAGKSTTNIMITTIIIVIIVILLALIAVGLLLYCKAR

SEQ ID NO: 9387 - protein, 553 aa, Artificial Sequence
  derived and/or modified protein sequence (wt) from HRSV__ANZ79671.1__F-del
MELPILKINAITTILAAVTLCFASSQNITEEFYQSTCSAVSKGYLSALRTGWYTSVITIELSNIKENKCNGTDAKVKLIKQELDKYKNAVTELQLLMQSTPAANSRARRELPRFMNYTLNNTKNTNVTLSKKRKRRFLGFLLGVGSAIASGIAVSKVLHLEGEVNKIKSALLSTNKAVVSLSNGVSVLTSKVLDLKNYIDKQLLPIVNKQSCSISNIETVIEFQQKNNRLLEITREFSVNAGVTTPVSTYMLTNSELLSLINDMPITNDQKKLMSSNVQIVRQQSYSIMSIIKEEVLAYVVQLPLYGVIDTPCWKLHTSPLCTTNTKEGSNICLTRTDRGWYCDNAGSVSFFPQAETCKVQSNRVFCDTMNSLTLPSEVNLCNIDIFNPKYDCKIMTSKTDVSSSVITSLGAIVSCYGKTKCTASNKNRGIIKTFSNGCDYVSNKGVDTVSVGNTLYYVNKQEGKSLYVKGEPIINFYDPLVFPSDEFDASISQVNEKINQSLAFIRKSDELLHNINAGKSTTNIMITTIIIVIIVILLALIAVGLLLYCKAR

SEQ ID NO: 9388 - protein, 553 aa, Artificial Sequence
  derived and/or modified protein sequence (wt) from HRSV__AMT79718.1__F-del
MELPILKTNAITTILAAVTLCFAFSQNITEEFYQSTCSAVSKGYLSALRTGWYTSVITIELSNIKENKCNGTDAKVKLIKQELDKYKNAVIELQLLMQSTPAANSRARRELPRFMNYTLNNTKNTNVTLSKKRKRRFLGFLLGVGSAIASGIAVSKVLHLEGEVNKIKSALLSTNKAVVSLSNGVSVLTSKVLDLKNYIDKQLLPIVNKQSCSISNIETVIEFQQKNNRLLEITREFSVNAGVTTPVSTYMLTNSELLSLINDMPITNDQKKLMSSNVQIVRQQSYSIMSIIKEEVLAYVVQLPLYGVIDTPCWKLHTSPLCTTNTKEGSNICLTRTDRGWYCDNAGSVSFFPQAETCKVQSNRVFCDTMNSLTLPSEVNLCNIDIFNPKYDCKIMTSKTDVSSSVITSLGAIVSCYGKTKCTASNKNRGIIKTFSNGCDYVSNKGVDTVSVGNTLYYVNKQEGKSLYVKGEPIINFYDPLVFPSDEFDASISQVNEKINQSLAFIRKSDELLHNVNAGKSTTNIMITTIIIVIIVILLALIAVGLLLYCKAR

SEQ ID NO: 9389 - protein, 553 aa, Artificial Sequence
  derived and/or modified protein sequence (wt) from HRSV__AMT79586.1__F-del
MELLIHRSSAIFLTFAINTLYLTSSQNITEEFYQSTCSAVSRGYLSALRTGWYTSVITIELSNIKETKCNGTDTKVKLIKQELDKYKNAVTELQLLMQNTPAASNRARREAPQYMNYTINTTKNLNVSISKKRKRRFLGFLLGVGSAIASGIAVSKVLHLEGEVNKIKNALLATNKAVVSLSNGVSVLTSKVLDLKNYINNQLLPIVNQQSCRISNIETVIEFQQKNSRLLEITREFSVNAGVTTPLSTYMLTNSELLSLINDMPITNDQKKLMSSNVQIVRQQSYSIMSIIKEEVLAYVVQLPIYGVIDTPCWKLHTSPLCTTNIKEGSNICLTRTDRGWYCDNAGSVSFFPQADTCKVQSNRVFCDTMNSLTLPSEVSLCNTDIFNSKYDCKIMTSKTDISSSVITSLGAIVSCYGKTKCTASNKNRGIIKTFSNGCDYVSNKGVDTVSVGNTLYYVNKLEGKNLYVKGEPIINYYDPLVFPSDEFDASISQVNEKINQSLAFIRRSDELLHNVNTGKSTTNIMITAIIIVIIVVLLSLIAIGLLLYCKAK

SEQ ID NO: 9390 - protein, 553 aa, Artificial Sequence
  derived and/or modified protein sequence (wt) from HRSV__AMT79553.1__F-del
MELLIHRSSAIFLTLAINTLYLTSSQNITEEFYQSTCSAVSRGYFSALRTGWYTSVITIELSNIKETKCNGTDTKVKLIKQELDKYKNAVTELQLLMQNTPAANNRARREAPQYMNYTINTTKNLNVSISKKRKRRFLGFLLGVGSAIASGIAVSKVLHLEGEVNKIKNALLSTNKAVVSLSNGVSVLTSKVLDLKNYINNQLLPIVNQQSCRISNIETVIEFQQKNSRLLEITREFSVNAGVTTPLSTYMLTNSELLSLINDMPITNDQKKLMSSNVQIVRQQSYSIMSIIKEEVLAYVVQLPIYGVIDTPCWKLHTSPLCTINIKEGSNICLTRTDRGWYCDNAGSVSFFPQADTCKVQSNRVFCDTMNSLTLPSEVSLCNTDIFNSKYDCKIMTSKTDISSSVITSLGAIVSCYGKTKCTASNKNRGIIKTFSNGCDYVSNKGVDTVSVGNTLYYVNKLEGKNLYVKGEPIINYYDPLVFPSDEFDASISQVNEKINQSLAFIRRSDELLHNVNTGKSTTNIMITAIIIVIIVVLLSLIAIGLLLYCKAK

SEQ ID NO: 9391 - protein, 553 aa, Artificial Sequence
  derived and/or modified protein sequence (wt) from HRSV__AMT79542.1__F-del
MELPILKTNAITTILAAVTLCFTSSQNITEEFYQSTCSAVSKGYLSALRTGWYTSVITIELSNIKENKCNGTDAKVKLIKQELDKYKNAVTELQLLMQSTPAANSRARRELPRFMNYTLNNTKNTNVTSSKKRKRRFLGFLLGVGSAIASGIAVSKVLHLEGEVNKIKSALLSTNKAVVSLSNGVSVLTSKVLDLKNYIDKQLLPIVNKQSCSISNIETVIEFQQKNNRLLEITREFSVNAGVTTPVSTYMLTNSELLSLINDMPITNDQKKLMSSNVQIVRQQSYSIMSIIKEEVLAYVVQLPLYGVIDTPCWKLHTSPLCTTNTKEGSNICLTRTDRGWYCDNAGSVSFFPQAETCKVQSNRVFCDTMNSLTLPSEVNLCNIDIFNPKYDCKIMTSKTDVSSSVITSLGAIVSCYGKTKCTASNKNRGIIKTFSNGCDYVSNKGVDTVSVGNTLYYVNKQEGKSLYVKGEPIINFYDPLVFPSDEFDASISQVNEKINQSLAFIRKSDELLHNVNAGKSTTNIMITTIIIVIIVILLALIAVGLLLYCKAR

SEQ ID NO: 9392 - protein, 553 aa, Artificial Sequence
  derived and/or modified protein sequence (wt) from HRSV__AMT79476.1__F-del
MELPILKTNAITTILAAVTLCFASSQNITEEFYQSTCSAVSKGYLSALRTGWYTSVITIELSNIKENKCNGTDAKVKLIKQELDKYKNAVTELQLLMQSTPAANSRARRELPRFMNYTLNNTKNTNVTLSKKRKRRFLGFLLGVGSAIASGIAVSKVLHLEGEVNKIKSALLSTNKAVVSLSNGVSVLTSKVLDLKNYIDKQLLPIVNKQSCSISNIETVIEFQQKNNRLLEITREFSVNAGVTTPVSTYMLTNSELLSLINDMPITNDQKKLMSSNVQIVRQQSYSIMSIIKEEVLAYVVQLPLYGVIDTPCWKLHTSPLCTTNTKEGSNICLTRTDRGWYCDNAGSVSFFPQAETCKVQSNRVFCDTMNSLTLPSEVNLCNIDIFNPKYDCKIMTSKTDVSSSVITSLGAIVSCYGKTKCTASNKNRGIIKTFSNGCDYVSNKGVDTVSVGNTLYYVNKQEGKSLYVKGEPIINFYDPLVFPSDEFDASISQVNEKINQSLAFIRKSDELLHNVNAGKSTTNIMITTIIIVIIVILLASIAVGLLLYCKAR

SEQ ID NO: 9393 - protein, 553 aa, Artificial Sequence
  derived and/or modified protein sequence (wt) from HRSV__AMT79388.1__F-del
MELLIHRSSAIFLTLAINTLYLTSSQNITEEFYQSTCSAVSRGYFSALRTGWYTSVITIELSNIKETKCNGTDTKVKLIKQELDKYKNAVTELQLLMQNTPAANNRARREAPQYMNYTINTTKNPNASISKKRKRRFLGFLLGVGSAVASGIAVSKVLHLEGEVNKIKNALLSTNKAVVSLSNGVSVLTSKVLDLKNYINNQLLPIVNQQSCRISNIETVIEFQQKNSRLLEITREFSVNAGVTTPLSTYMLTNSELLSLINDMPITNDQKKLMSSNVQIVRQQSYSIMSVIKEEVLAYVVQLPIYGVIDTPCWKLHTSPLCTTNIKEGSNICLTRTDRGWYCDNAGSVSFFPQADTCKVQSNRVFCDTMNSLTLPSEVSLCNTDIFNSKYDCKIMTSKTDISSSVITSLGAIVSCYGKTKCTASNKNRGIIKTFSNGCDYVSNKGVDTVSVGNTLYYVNKLEGKNLYVKGEPIINYYDPLVFPSDEFDASISQVNEKINQSLAFIRRSDELLHNVNTGKSTTNIMITAIIIVIIVVLLSLIAIGLLLYCKAK

SEQ ID NO: 9394 - protein, 553 aa, Artificial Sequence
  derived and/or modified protein sequence (wt) from HRSV__AMT79201.1__F-del
MELPILKTNAITTIFAAVTLCFASSQNITEEFYQSTCSAVSKGYLSALRTGWYTSVITIELSNIKENKCNGTDAKVKLIKQELDKYKNAVTELQLLMQSTPAANSRARREIPRFMNYTLNNTKNTNVTLSKKRKRRFLGFLLGVGSAIASGIAVSKVLHLEGEVNKIKSALLSTNKAVVSLSNGVSVLTSKVLDLKNYIDKQLLPIVNKQSCSISNIETVIEFQQKNNRLLEITREFSVNAGVTTPVSTYMLTNSELLSLINDMPITNDQKKLMSSNVQIVRQQSYSIMSIIKEEVLAYVVQLPLYGVIDTPCWKLHTSPLCTTNTKEGSNICLTRTDRGWYCDNAGSVSFFPQAETCKVQSNRVFCDTMNSLTLPSEVNLCNIDIFNPKYDCKIMTSKTDVSSSVITSLGAIVSCYGKTKCTASNKNRGIIKTFSNGCDYVSNKGVDTVSVGNTLYYVNKQEGKSLYVKGEPIINFYDPLVFPSDEFDASISQVNEKINQSLAFIRKSDELLHNVNAGKSTTNIMITTIIIVIIVILLALIAVGLLLYCKAR

SEQ ID NO: 9395 - protein, 553 aa, Artificial Sequence
  derived and/or modified protein sequence (wt) from HRSV__AMT79190.1__F-del
MELPILKTNAITTILAAVTLCFTSSQNITEEFYQSTCSAVSKGYLSALRTGWYTSVITIELSNIKENKCNGTDAKVKLIKQELDKYKNAVTELQLLMQSTPAANSRARRELPRFMNYTLNNTKNTNVTLSKKRKRRFLGFLLGFGSAIASGIAVSKVLHLEGEVNKIKSALLSTNKAVVSLSNGVSVLTSKVLDLKNYIDKQLLPIVNKQSCSISNIETVIEFQQKNNRLLEITREFSVNAGVTTPVSTYMLTNSELLSLINDMPITNDQKKLMSSNVQIVRQQSYSIMSIIKEEVLAYVVQLPLYGVIDTPCWKLHTSPLCTTNTKEGSNICLTRTDRGWYCDNAGSVSFFPQAETCKVQSNRVFCDTMNSLTLPSEVNLCNIDIFNPKYDCKIMTSKTDVSSSVITSLGAIVSCYGKTKCTASNKNRGIIKTFSNGCDYVSNKGVDTVSVGNTLYYVNKQEGKSLYVKGEPIINFYDPLVFPSDEFDASISQVNEKINQSLAFIRKSDELLHNVNAGKSTTNIMITTIIIVIIVILLALIAVGLLLYCKAR

SEQ ID NO: 9396 - protein, 553 aa, Artificial Sequence
  derived and/or modified protein sequence (wt) from HRSV__AMT79157.1__F-del
MELLIRRSSAIFLTFAINTLYLTSSQNITEEFYQSTCSAVSRGYFSALRTGWYTSVITIELSNIKETKCNGTDTKVKLIKQELDKYKNAVTELQLLMQNTPAANNRARREAPQYMNYTINTTKNPNASISKKRKRRFLGFLLGVGSAIASGIAVSKVLHLEGEVNKIKNALLSTNKAVVSLSNGVSVLTSKVLDLKNYINNQLLPIVNQQSCRISNIETVIEFQQKNSRLLEITREFSVNAGVTTPLSTYMLTNSELLSLINDMPITNDQKKLMSSNVQIVRQQSYSIMSIIKEEVLAYVVQLPIYGVIDTPCWKLHTSPLCTTNIKEGSNICLTRTDRGWYCDNAGSVSFFPQADTCKVQSNRVFCDTMNSLTLPSEVSLCNTDIFNSKYDCKIMTSKTDISSSVITSLGAIVSCYGKTKCTASNKNRGIIKTFSNGCDYVSNKGVDTVSVGNTLYYVNKLEGKNLYVKGEPIINYYDPLVFPSDEFDASISQVNEKINQSLAFIRRSDELLHNVNTGKSTTNIMITAIIIVIIVVLLSLIAIGLLLYCKAK

SEQ ID NO: 9397 - protein, 553 aa, Artificial Sequence
  derived and/or modified protein sequence (wt) from HRSV__AMT79124.1__F-del
MELLIHRSSAIFLTFAINTLYLTSSQNITEEFYQSTCSAVSRGYLSALRTGWYTSVITIELSNIKETKCNGTDTKVKLIKQELDKYKNAVTELQLLMQNTPAANNRARREAPQHMNYTINTTKNLNVSISKKRKRRFLGFLLGVGSAIASGIAVSKVLHLEGEVNKIKNALLATNKAVVSLSNGVSVLTSKVLDLKNYINNQLLPIVNQQSCRISNIETVIEFQQKNSRLLEITREFSVNAGVTTPLSTYMLTNSELLSLINDMPITNDQKKLMSSNVQIVRQQSYSIMSIIKEEVLAYVVQLPIYGVIDTPCWKLHTSPLCTTNIKEGSNICLTRTDRGWYCDNAGSVSFFPQADTCKVQSNRVFCDTMNSLTLPSEVSLCNTDIFNSKYDCKIMTSKTDISSSVITSLGAIVSCYGKTKCTASNKNRGIIKTFSNGCDYVSNKGVDTVSVGNTLYYVNKLEGKNLYVKGEPIINYYDPLVFPSDEFDASISQVNEKINQSLAFIRRSDELLHNVNTGKSTTNIMITAIIIVIIVVLLSLIAIGLLLYCKAK

SEQ ID NO: 9398 - protein, 553 aa, Artificial Sequence
  derived and/or modified protein sequence (wt) from HRSV__AMT79091.1__F-del
MELLIHRSSAIFLTLAINALYLTSSQNITEEFYQSTCSAVSRGYFSALRTGWYTSVITIELSNIKETKCNGTDTKVKLIKQELDKYKNAVTELQLLMQNTPAANNRARREAPQYMNYTINTTKNLNVSISKKRKRRFLGFLLGVGSAIASGIAVSKVLHLEGEVNKIKNALLSTNKAVVSLSNGVSVLTSKVLDLKNYINNQLLPIVNQQSCHISNIETVIEFQQKNSRLLEITREFSVNAGVTTPLSTYMLTNSELLSLINDMPITNDQKKLMSSNVQIVRQQSYSIMSIIKEEVLAYVVQLPIYGVIDTPCWKLHTSPLCTTNIKEGSNICLTRTDRGWYCDNAGSVSFFPQADTCKVQSNRVFCDTMNSLTLPSEVSLCNTDIFNSKYDCKIMTSKTDISSSVITSLGAIVSCYGKTKCTASNKNRGIIKTFSNGCDYVSNKGVDTVSVGNTLYYVNKLEGKNLYVKGEPIINYYDPLVFPSDEFDASISQVNEKINQSLAFIRRSDELLHNVNTGKSTTNIMITVIIIVIIVVLLSLIAIGLLLYCKAK

SEQ ID NO: 9399 - protein, 553 aa, Artificial Sequence
  derived and/or modified protein sequence (wt) from HRSV__AMT79047.1__F-del
MELPILKTNAITTILAAVTLCFTSSQNITEEFYQSTCSAVSKGYLSALRTGWYTSVITIELSNIKENKCNGTDTKVKLIKQELDKYKNAVTELQLLMQSTPAANSRARRELPRFMNYTLNNAKNTNVTLSKKRKRRFLGFLLGVGSAIASGIAVSKVLHLEGEVNKIKSALLSTNKAVVSLSNGVSVLTSKVLDLKNYIDKQLLPIVNKQSCSISNIETVIEFQQKNNRLLEITREFSVNAGVTTPVSTYMLTNSELLSLINDMPITNDQKKLMSSNVQIVRQQSYSIMSIIKEEVLAYVVQLPLYGVIDTPCWKLHTSPLCTTNTKEGSNICLTRTDRGWYCDNAGSVSFFPQAETCKVQSNRVFCDTMNSLTLPSEVNLCNIDIFNPKYDCKIMTSKTDVSSSVITSLGAIVSCYGKTKCTASNKNRGIIKTFSNGCDYVSNKGVDTVSVGNTLYYVNKQEGKSLYVKGEPIINFYDPLVFPSDEFDASISQVNEKINQSLAFIRKSDELLHNVNAGKSTTNIMITTIIIVIIVILLALIAVGLLLYCKAR

SEQ ID NO: 9400 - protein, 553 aa, Artificial Sequence
  derived and/or modified protein sequence (wt) from HRSV__AMT79014.1__F-del
MELPILKTNAITTILAAVTLCFASSQNITEEFYQSTCSAVSKGYLSALRTGWYTSVITIELSNIKENKCNGTDAKVKLIKQELDKYKNAVTELQLLMQSTPAANSRARRELPRFMNYTLNNTKNTNVTLSKKRKRRFLGFLLGVGSAIASGIAVSKVLHLEGEVNKIKSALLSTNKAVVSLSNGVSVLTSKVLDLKNYIDKQLLPIVNKQSCSISNIETVIEFQQKNNRLLEITREFSVNAGVTTPVSTYMLTNSELLSLINDMPITNDQKKLMSSNVQIVRQQSYSIMSIIKEEVLAYVVQLPLYGVIDTPCWKLHTSPLCTTNTKEGSNICLTRTDRGWYCDNAGSVSFFPQAETCKVQSNRVFCDTMNSLTLPSEVNLCNIDIFNPKYDCKIMTSKTDVSSSVITSLGAIVSCYGKTKCTASNKNRGIIKTFSNGCDYVSNKGVDTVSVGNTLYYVNKQEGKSLYVKGEPIINFYDPLVFPSDEFDASISQVNEKINQSLAFIRKSDELLHNANAGKSTTNIMITTIIIVIIVILLALIAVGLLLYCKAR

SEQ ID NO: 9401 - protein, 553 aa, Artificial Sequence
  derived and/or modified protein sequence (wt) from HRSV__AMT79003.1__F-del
MELLIHRSSAIFLTLAINALYLTSSQNITEEFYQSTCSAVSRGYLSALRTGWYTSVITIELSNIKETKCNGTDTKVKLIKQELDKYKNAVTELQLLMQNTPAVNNRARREAPQYMNYTINTTKNLNVSISKKRKRRFLGFLLGVGSAIASGIAVSKVLHLEGEVNKIKNALQSTNKAVVSLSNGVSVLTSKVLDLKNYINNQLLPIVNQQSCRISNIETVIEFQQKNSRLLEITREFSVNAGVTTPLSTYMLTNSELLSLINDMPITNDQKKLMSSNVQIVRQQSYSIMSIIKEEVLAYVVQLPIYGVIDTPCWKLHTSPLCTTNIKEGSNICLTRTDRGWYCDNAGSVSFFPQADTCKVQSNRVFCDTMNSLTLPSEVSLCNTDIFNSKYDCKIMTSKTDISSSVITSLGAIVSCYGKTKCTASNKNRGIIKTFSNGCDYVSNKGVDTVSVGNTLYYVNKLEGKNLYVKGEPIINYYDPLVFPSDEFDASISQVNEKINQSLAFIRRSDELLHNVNTGKSTTNIMITAIIIVIIVVLLSLIAIGLLLYCKAR

SEQ ID NO: 9402 - protein, 553 aa, Artificial Sequence
  derived and/or modified protein sequence (wt) from HRSV__AMT78872.1__F-del
MELPILKTNAITTILTAVTLCFASSQNITEEFYQSTCSAVSKGYLSALRTGWYTSVITIELSNIKENKCNGTDTKVKLIKQELDKYKNAVTELQLLMQSTPAANSRARRELPRFMNYTLNNTKNTNVTLSKKRKRRFLGFLLGVGSAIASGIAVSKVLHLEGEVNKIKSALLSTNKAVVSLSNGVSVLTSKVLDLKNYIDKQLLPIVNKQSCSISNIETVIEFQQKNNRLLEITREFSVNAGVTTPVSTYMLTNSELLSLINDMPITNDQKKLMSSNVQIVRQQSYSIMSIIKEEVLAYVVQLPLYGVIDTPCWKLHTSPLCTTNTKEGSNICLTRTDRGWYCDNAGSVSFFPQAETCKVQSNRVFCDTMNSLTLPSEVNLCNIDIFNPKYDCKIMTSKTDVSSSVITSLGAIVSCYGKTKCTASNKNRGIIKTFSNGCDYVSNKGVDTVSVGNTLYYVNKQEGKSLYVKGEPIINFYDPLVFPSDEFDASISQVNEKINQSLAFIRKSDELLHNVNAGKSTTNIMITTIIIVIIVILLALIAVGLLLYCKAR

SEQ ID NO: 9403 - protein, 553 aa, Artificial Sequence
  derived and/or modified protein sequence (wt) from HRSV__AMT78832.1__F-del
MELPILKTNAITTILAAVTLCFTSSQNITEEFYQSTCSAVSKGYLSALRTGWYTSVITIELSNIKENKCNGTDAKVKLIKQELDKYKNAVTELQLLMQSTPAANSRARRELPRFMNYTLNNTKNTNVTLSKKRKRRFLGFLLGVGSAIASGIAVSKVLHLEGEVNKIKSALLSTNKAVVSLSNGVSVLTSKVLDLKNYIDKQLLPIVNKQSCSISNIETVIEFQQKNNRLLEITREFSVNAGVTTPVSTYMLTNSELLSLINDMPITNDQKKLMSSNVQIVRQQSYSIMSIIKEEVLAYVVQLPLYGVIDTPCWKLHTSPLCTTNTKEGSNICLTRTDRGWYCDNAGSVSFFPQAETCKVQSNRVFCDTMNSLTLPSEVNLCNIDIFNPKYDCKIMTSKTDVSSSVITSLGAIVSCYGKTKCTASNKNRGIIKTFSNGCDYVSNKGVDTVSVGNTLYYVNKQEGKSLYVKGEPIINYYDPLVFPSDEFDASISQVNEKINQSLAFIRKSDELLHNVNAGKSTTNIMITTIIIVIIVILLALIAVGLLLYCKAR

SEQ ID NO: 9404 - protein, 553 aa, Artificial Sequence
  derived and/or modified protein sequence (wt) from HRSV__AMT78689.1__F-del
MELPILKTNAITTILAAVTLCFTSSQNITEEFYQSTCSAVSKGYLSALRTGWYTSVITIELSNIKENKCNGTDAKVKLIKQELDKYKNAVTELQLLMQSTPAANSRARRELPRFMNYTLNNTKNTNVTLSKKRKRRFLGFLLGVGSAIASGIAVSKVLHLEGEVNKIKSALLSTNKAVVSLSNGVSVLTSKVLDLKNYIDKQLLPIVNKQSCSISNIETVIEFQQKNNRLLEITREFSVNAGVTTPVSTYMLTNSELLSLINDMPITNDQKKLMSSNVQIVRQQSYSIMSIIKEEVLAYVVQLPLYGVIDTPCWKLHTSPLCTTNTKEGSNICLTRTDRGWYCDNAGSVSFFPQAETCKVQSNRVFCDTMNSLTLPSEVNLCNIDIFNPKYDCKIMTSKTDVSSSVITSLGAIVSCYGKTKCTASNKNRGIIKTFSNGCDYVSNKGVDTVSVGNTLYYVNKQEGKSLYVKGEPIINFYDPLVFPSDEFDASISQVNEKINQSLAFIRKSDELLHNVNAGKSTTNIMITTIIIIIIVILLALIAVGLLLYCKAR

SEQ ID NO: 9405 - protein, 553 aa, Artificial Sequence
  derived and/or modified protein sequence (wt) from HRSV__AMT78645.1__F-del
MELLIHRSSAIFLTFAINTLYLTSSQNITEEFYQSTCSAVSRGYLSALRTGWYTSVITIELSNIKETKCNGTDTKVKLIKQELDKYKNAVTELQLLMQNTPAANNRARREAPQYMNYTINTTKNLNVSISKKRKRRFLGFLLGVGSAIASGIAVSKVLHLEGEVNKIKNALLATNKAVVSLSNGVSVLTSKVLDLKNYINNQLLPIVNQQSCRISNIETVIEFQQKNSRLLEITREFSVNAGVTTPLSIYMLTNSELLSLINDMPITNDQKKLMSSNVQIVRQQSYSIMSIIKEEVLAYVVQLPIYGVIDTPCWKLHTSPLCTTNIKEGSNICLTRTDRGWYCDNAGSVSFFPQADTCKVQSNRVFCDTMNSLTLPSEVSLCNTDIFNSKYDCKIMTSKTDISSSVITSLGAIVSCYGKTKCTASNKNRGIIKTFSNGCDYVSNKGVDTVSVGNTLYYVNKLEGKNLYVKGEPIINYYDPLVFPSDEFDASISQVNEKINQSLAFIRRSDELLHNVNTGKSTTNIMITAIIIVIIVVLLSLIAIGLLLYCKAK

SEQ ID NO: 9406 - protein, 553 aa, Artificial Sequence
  derived and/or modified protein sequence (wt) from HRSV__AMT78513.1__F-del
MDLPILKTNAITAILAAVSLCFASSQNITEEFYQSTCSAVSKGYLSALRTGWYTSVITIELSNIKENKCNGTDAKVKLIKQELDKYKNAVTELQLLMQSTPAANNRSRRELPRFMNYTLNNTKNNNVTLSKKRKRRFLGFLLGVGSAIASGIAVSKVLHLEGEVNKIKSALLSTNKAVVSLSNGVSVLTSKVLDLKNYIDKQLLPIVNKQSCSISNIETVIEFQQKNNRLLEITREFSVNAGVTTPVSTYMLTNSELLSLINDMPITNDQKKLMSNNVQIVRQQSYSIMSIIKEEVLAYVVQLPLYGVIDTPCWKLHTSPLCTTNTKEGSNICLTRTDRGWYCDNAGSVSFFPQAETCKVQSNRVFCDTMNSLTLPSEVNLCNIDIFNPKYDCKIMTSKTDVSSSVITSLGAIVSCYGKTKCTASNKNRGIIKTFSNGCDYVSNKGVDTVSVGNTLYYVNKQEGKSLYVKGEPIINFYDPLVFPSDEFDASISQVNEKINQSLAFIRKSDELLHNVNVGKSTTNIMITTIIIVIIVILLLLIAVGLFLYCKAR

SEQ ID NO: 9407 - protein, 553 aa, Artificial Sequence
  derived and/or modified protein sequence (wt) from HRSV__AMT78480.1__F-del
MDLPILKTNAITAILAAVSLCFASSQNITEEFYQSTCSAVSKGYLSALRTGWYTSVITIELSNIKENKCNGTDAKVKLIKQELDKYKNAVTELQLLMQSTPAANNRARRELPRFMNYTLNNTKNNNVTLSKKRKRRFLGFLLGVGSAIASGIAVSKVLHLEGEVNKIKSALLSTNKAVVSLSNGVSILTSKVLDLKNYIDKQLLPIVNKQSCSISNIETVIEFQQKNNRLLEITREFSVNAGVTTPVSTYMLTNSELLSLINDMPITNDQKKLMSNNVQIVRQQSYSIMSIIKEEVLAYVVQLPLYGVIDTPCWKLHTSPLCTTNTKEGSNICLTRTDRGWYCDNAGSVSFFPQAETCKVQSNRVFCDTMNSLTLPSEVNLCNIDIFNPKYDCKIMTSKTDVSSSVITSLGAIVSCYGKTKCTASNKNRGIIKTFSNGCDYVSNKGVDTVSVGNTLYYVNKQEGKSLYVKGEPIINFYDPLVFPSDEFDASISQVNEKINQSLAFIRKSDELLHNVNVGKSTTNIMITTIIIVIIVILLLLIAVGLFLYCKAR

SEQ ID NO: 9408 - protein, 553 aa, Artificial Sequence
  derived and/or modified protein sequence (wt) from HRSV__AMT78447.1__F-del
MELLIHRSSAIFLTLAINALYLTSSQNITEEFYQSTCSAVSRGYLSALRTGWYTSVITIELSNIKETKCNGTDTKVKLIKQELDKYKNAVTELQLLMQNTPAANNRARREAPQYMNYTINTTKNLNVSISKKRKRRFLGFLLGVGSAIASGIAVSKVLHLEGEVNKIKNALLSTNKAVVSLSNGVSVLTSKVLDLKNYINNQLLPIVNQQSCRISNIETVIEFQQKNSRLLEITREFSVNAGVTTPLSTYMLTNSELLSLINDMPITNDQKKLMSNNVQIVRQQSYSIMSIIKEEVLAYVVQLPIYGVIDTPCWKLHTSPLCTTNIKEGSNICLTRTDRGWYCDNAGSVSFFPQADTCKVQSNRVFCDTMNSLTLPSEVSLCNTDIFNSKYDCKIMTSKTDISSSVITSLGAIVSCYGKTKCTASNKNRGIIKTFSNGCDYVSNKGVDTVSVGNTLYYVNKLEGKNLYVKGKPIINYYDPLVFPSDEFDASISQVNEKINQSLAFIRRSDELLHNVNTGKSTTNIMITAIIIVIIVVLLSLIAIGLLLYCKAK

SEQ ID NO: 9409 - protein, 553 aa, Artificial Sequence
  derived and/or modified protein sequence (wt) from HRSV__AMT78392.1__F-del
MELLIHRSSAIFLTFAINTLYLTSSQNITEEFYQSTCSAVSRGYLSALRTGWYTSVITIELSNIKETKCNGTDTKVKLIKQELDKYKNAVTELQLLMQNTPVANNRARREAPQYMNYTINTTKNLNVSISKKRKRRFLGFLLGVGSAIASGIAVSKVLHLEGEVNKIKNALLATNKAVVSLSNGVSVLTSKVLDLKNYINNQLLPIVNQQSCRISNIETVIEFQQKNSRLLEITREFSVNAGVTTPLSTYMLTNSELLSLINDMPITNDQKKLMSSNVQIVRQQSYSIMSIIKEEVLAYVVQLPIYGVIDTPCWKLHTSPLCTTNIKEGSNICLTRTDRGWYCDNAGSVSFFPQADTCKVQSNRVFCDTMNSLTLPSEVSLCNTDIFNSKYDCKIMTSKTDISSSVITSLGAIVSCYGKTKCTASNKNRGIIKTFSNGCDYVSNKGVDTVSVGNTLYYVNKLEGKNLYVKGEPIINYYDPLVFPSDEFDASISQVNEKINQSLAFIRRSDELLHNVNTGKSTTNIMITAIIIVIIVVLLSLIAIGLLLYCKTK

SEQ ID NO: 9410 - protein, 553 aa, Artificial Sequence
  derived and/or modified protein sequence (wt) from HRSV__AMT78194.1__F-del
MELLIHRSSAIFLNFAINTLYLTSSQNITEEFYQSTCSAVSRGYLSALRTGWYTSVITIELSNIKETKCNGTDTKVKLIKQELDKYKNAVTELQLLMQNTPAANNRARREAPQYMNYTINTTKNLNVSISKKRKRRFLGFLLGVGSAIASGIAVSKVLHLEGEVNKIKNALLATNKAVVSLSNGVSVLTSKVLDLKNYINNQLLPIVNQQSCRISNIETVIEFQQKNSRLLEITREFSVNAGVTTPLSTYMLTNSELLSLINDMPITNDQKKLMSSNVQIVRQQSYSIMSIIKEEVLAYVVQLPIYGVIDTPCWKLHTSPLCTTNIKEGSNICLTRTDRGWYCDNAGSVSFFPQADTCKVQSNRVFCDTMNSLTLPSEVSLCNTDIFNSKYDCKIMTSKTDISSSVITSLGAIVSCYGKTKCTASNKNRGIIKTFSNGCDYVSNKGVDTVSVGNTLYYVNKLEGKNLYVKGEPIINYYDPLVFPSDEFDASISQVNEKINQSLAFIRRSDELLHNVNTGKSTTNIMITAIIIVIIVVLLSLIAIGLLLYCKAK

SEQ ID NO: 9411 - protein, 553 aa, Artificial Sequence
  derived and/or modified protein sequence (wt) from HRSV__AMT78084.1__F-del
MELPILKTNAITTILAAVTLCFASSQNITEEFYQSTCSAVSKGYLSALRTGWYTSVITIELSNIKENKCNGTDAKVKLIKQELDKYKNAVTELQLLMQSTPAANSRARRELPRFMNYTLNNTKNTNVTLSKKRKRRFLGFLLGVGSAIASGIAVSKVLHLEGEVNKIKSALLSTNKAVVSLSNGVSVLTSKVLDLKNYIDKQLLPIVNKQSCSISNIETVIEFQQKNNRLLEITREFSVNAGVTTPVSTYMLTNSELLSLINDMPITNDQKKLMSSNVQIVRQQSYSIMSIIKEEVLAYVVQLPLYGVIDTPCWKLHTSPLCTTNTKEGSNICLTRTDRGWYCDNAGSVSFFPQAETCKVQSNRVFCDTMNSLTLPSEVNLCNIDIFNPKYDCKIMTSKTDVSSSVITSLGAIVSCYGKTKCTASNKNRGIIKTFTNGCDYVSNKGVDTVSVGNTLYYVNKQEGKSLYVKGEPIINFYDPLVFPSDEFDASISQVNEKINQSLAFIRKSDELLHNVNAGKSTTNIMITTIIIVIIVILLALIAVGLLLYCKAR

SEQ ID NO: 9412 - protein, 553 aa, Artificial Sequence
  derived and/or modified protein sequence (wt) from HRSV__AMT78051.1__F-del
MELPILKTNAITTILAAVTLCFASSQNITEEFYQSTCSAVSKGYLSALRTGWYTSVITIELSNIKENKCNGTDAKVKLIKQELDKYKNAVTELQLLMQSTPAANSRARRELPRFMNYTLNNTKNTDVTLSKKRKRRFLGFLLGVGSAIASGIAVSKVLHLEGEVNKIKSALLSTNKAVVSLSNGVSVLTSKVLDLKNYIDKQLLPIVNKQSCSISNIETVIEFQQKNNRLLEITREFSVNAGVTTPVSTYMLTNSELLSLINDMPITNDQKKLMSSNVQIVRQQSYSIMSIIKEEVLAYVVQLPLYGVIDTPCWKLHTSPLCTTNTKEGSNICLTRTDRGWYCDNAGSVSFFPQAETCKVQSNRVFCDTMNSLTLPSEVNLCNIDIFNPKYDCKIMTSKTDVSSSVITSLGAIVSCYGKTKCTASNKNRGIIKTFSNGCDYVSNKGVDTVSVGNTLYYVNKQEGKSLYVKGEPIINFYDPLVFPSDEFDASISQVNEKINQSLAFIRKSDELLHNVNAGKSTTNIMITTIIIVIIVILLALIAVGLLLYCKAR

SEQ ID NO: 9413 - protein, 553 aa, Artificial Sequence
  derived and/or modified protein sequence (wt) from HRSV__AMT77963.1__F-del
MELPILKTNAITTILAAVTLCFASSQNITEEFYQSTCSAVSKGYLSALRTGWYTSVITIELSNIKENKCNGTDAKVKLIKQELDKYKNAVTELQLLMQSTPAANSRARRELPRFMNYTLNNTKNTNVTLSKKRKRRFLGFLLGVGSAIASGIAVSKVLHLEGEVNKIKSALLSTNKAVVSLSNGVSVLTSKVLDLKNYIDKQLLPIVNKQSCSISNIETVIEFQQKNNRLLEITREFSVNAGVTTPVSTYMLTNSELLSLINDMPITNDQKKLMSSNVQIVRQQSYSIMSIIKEDVLAYVVQLPLYGVIDTPCWKLHTSPLCTTNTKEGSNICLTRTDRGWYCDNAGSVSFFPQAETCKVQSNRVFCDTMNSLTLPSEVNLCNIDIFNPKYDCKIMTSKTDVSSSVITSLGAIVSCYGKTKCTASNKNRGIIKTFSNGCDYVSNKGVDTVSVGNTLYYVNKQEGKSLYVKGEPIINFYDPLVFPSDEFDASISQVNEKINQSLAFIRKSDELLHNVNAGKSTTNIMITTIIIVIIVILLALIAVGLLLYCKAR

SEQ ID NO: 9414 - protein, 553 aa, Artificial Sequence
  derived and/or modified protein sequence (wt) from HRSV__AMT77908.1__F-del
MELLIHRSSAIFLTLAINALYLTSSQNITEEFYQSTCSAVSRGYLSALRTGWYTSVITIELSNIKETKCNGTDTKVKLIKQELDKYKNAVTELQLLMQNTPAANNRARREAPQYMNYTINTTKSLNVSISKKRKRRFLGFLLGVGSAIASGIAVSKVLHLEGEVNKIKNALLSTNKAVVSLSNGVSVLTSKVLDLKNYINNQLLPIVNQQSCRISNIETVIEFQQKNSRLLEITREFSVNAGVTTPLSTYMLTNSELLSLINDMPITNDQKKLMSSNVQIVRQQSYSIMSIIKEEVLAYVVQLPIYGVIDTPCWKLHTSPLCTTNIKEGSNICLTRTDRGWYCDNAGSVSFFPQADTCKVQSNRVFCDTMNSLTLPSEVSLCNTDIFNSKYDCKIMTSKTDISSSVITSLGAIVSCYGKTKCTASNKNRGIIKTFSNGCDYVSNKGVDTVSVGNTLYYVNKLEGKNLYVKGEPIINYYDPLVFPSDEFDASISQVNEKINQSLAFIRRSDELLHNVNTGKSTTNIMITAIIIVIIVVLLSLIAIGLLLYCKAK

SEQ ID NO: 9415 - protein, 553 aa, Artificial Sequence
  derived and/or modified protein sequence (wt) from HRSV__AMT77776.1__F-del
MELLIHRSSAIFLTFAINALYLTSSQNITEEFYQSTCSAVSRGYLSALRTGWYTSVITIELSNIKETKCNGTDTKVKLIKQELDKYKNAVTELQLLMQNTPAANNRARREAPQYMNYTINTTKNLNVSISKKRKRRFLGFLLGVGSAIASGIAVSKVLHLEGEVNKIKNALLSTNKAVVSLSNGVSVLTSKVLDLKNYINNQLLPIVNQQSCRISNIETVIEFQQKNSRLLEITREFSVNAGVTTPLSTYMLTNSELLSLINDMPITNDQKKLMSSNVQIVRQQSYSIMSIIKEEVLAYVVQLPIYGVIDTPCWKLHTSPLCTTNIKEGSNICLTRTDRGWYCDNAGSVSFFPQADTCKVQSNRVFCDTMNSLTLPSEVSLCNTDIFNSKYDCKIMTSKTDISSSVITSLGAIVSCYGKTKCTASNKNRGIIKTFSNGCDYVSNKGVDTVSVGNTLYYVNKLEGKNLYVKGEPIINYYDPLVFPSDEFDASISQVNEKINQSLAFIRRSDELLHNVNTGKSTTNIMITAIIIVIIVVLLSLIAIGLLLYCRAK

SEQ ID NO: 9416 - protein, 553 aa, Artificial Sequence
  derived and/or modified protein sequence (wt) from HRSV__AMT77710.1__F-del
MELLIRRSSAIFLTLAINTLYLTSSQNITEEFYQSTCSAVSRGYFSALRTGWYTSVITIELSNIKETRCNGTDTKVKLIKQELDKYKNAVTELQLLMQNTPAANNRARREAPQYMNYTINTTKNPNASISKRRKRRFLGFLLGVGSAIASGIAVSKVLHLEGEVNKIKNALLSTNKAVVSLSNGVSVLTSKVLDLKNYINNQLLPIVNQQSCRISNIETVIEFQQKNSRLLEITREFSVNAGVTTPLSTYMLTNSELLSLINDMPITNDQKKLMSSNVQIVRQQSYSIMSIIKEEVLAYVVQLPIYGVIDTPCWKLHTSPLCTTNIKEGSNICLTRTDRGWYCDNAGSVSFFPQADTCKVQSNRVFCDTMNSLTLPSEVSLCNTDIFNSKYDCKIMTSKTDISSSVITSLGAIVSCYGKTKCTASNKNRGIIKTFSNGCDYVSNKGVDTVSVGNTLYYVNKLEGKNLYVKGEPIINYYDPLVFPSDEFDASISQVNEKINQSLAFIRRSDELLHNVNTGKSTTNIMITAIIIVIIVVLLSLIAIGLLLYCKAK

SEQ ID NO: 9417 - protein, 553 aa, Artificial Sequence
  derived and/or modified protein sequence (wt) from HRSV__AMT77424.1__F-del
MELLIHRSSAIFLTFAINTLYLTSSQNITEEFYQSTCSAVSRGYLSALRTGWYTSVITIELSNIKETKCNGTDTKVKLIKQELDKYKNAVTELQLLMQNTPAANNRARREAPQYMNYTINTTKNLNVSISKKRKRRFLGFLLGVGSAIASGIAVSKVLHLEGEVNKIKNALLATNKAVVSLSNGVSVLTSKVLDLKNYINNQLLPIVNQQSCRISNIETVIEFQQKNSRLLEITREFSVNAGVTTPLSTYMLTNSELLSLINDMPITNDQKKLMSSNVQIVRQQSYSIMSIIKEEVLAYVVQLPIYGVIDTPCWKLHTSPLCTTNIKEGSNICLTRTDRGWYCDNAGSVSFFPQADTCKVQSNRVFCDTMNSLTLPSEVSLCNTDIFNSKYDCKIMTSKTDISSSVITSLGAIVSCYGKTKCTASNKNRGIIKTFSNGCDYVSNKGVDTVSVGNTLYYVNKLEGKNLYVKGEPIINYYDPLVFPSDEFDASISQVNKKINQSLAFIRRSDELLHNVNTGKSTTNIMITAIIIVIIVVLLSLIAIGLLLYCKAK

SEQ ID NO: 9418 - protein, 553 aa, Artificial Sequence
  derived and/or modified protein sequence (wt) from HRSV__AMN91385.1__F-del
MELLIHRSSAIFLTLAINTLYLTSSQNITEEFYQSTCSAVSRGYFSALRTGWYTSVITIELSNIKETKCNGTDTKVKLIKQELDKYKNAVTELQLLMQNTPAANNRARREAPQYMNYTINTTKNPNASISKKRKRRFLGFLLGVGSAIASGIAVSKVLHLEGEVNKIKNALLSTNKAVVSLSNGVSVLTSKVLDLKNYINNQLLPIVNQQSCRISNIETVIEFQQKNSRLLEITREFSVNAGVTTPLSTYMLTNSELLSLINDMPITNDQKKLMSSNVQIVRQQSYSIMSIIKEEVLAYVVQLPIYGVIDTPCWKLHTSPLCTTNIKEGSNICLTRTDRGWYCDNAGSVSFFPQADTCKVQSNRVFCDTMNSLTLPSEVSLCNTDIFNSKYDCKIMTSKTDISSSVITSLGAIVSCYGKTKCTASNKNRGIIKTFSNGCDYVSNKGVDTVSVGNTLYYVNKLEGKNLYVKGEPIINYYDPLVFPSDEFDASISQVNEKINQSLAFIRRSDELLHNVNTGKSTTNIMITVIIIVIIVVLLSLIAIGLLLYCKAK

SEQ ID NO: 9419 - protein, 553 aa, Artificial Sequence
  derived and/or modified protein sequence (wt) from HRSV__AMN91264.1__F-del
MELLIHRSSAIFLTLAINALYLTSSQNITEEFYQSTCSAVSRGYLSALRTGWYTSVITIELSNIKETKCNGTDTKVKLIKQELDKYKNAVTELQLLMQNTPAVNNRARREAPQYMNYTINATKNLNVSISKKRKRRFLGFLLGVGSAIASGIAVSKVLHLEGEVNKIKNALQSTNKAVVSLSNGVSVLTSKVLDLKNYINSQLLPIVNKQSCRISNIETVIEFQQKNSRLLEITREFSVNAGVTTPLSTYMLTNSELLSLINDMPITNDQKKLMSSNVQIVRQQSYSIMSIIKEEVLAYVVQLPIYGVIDTPCWKLHTSPLCTTNIKEGSNICLTRTDRGWYCDNAGSVSFFPQADTCKVQSNRVFCDTMNSLTLPSEVSLCNTDIFNSKYDCKIMTSKTDISSSVITSLGAIVSCYGKTKCTASNKNRGIIKTFSNGCDYVSNKGVDTVSVGNTLYYVNKLEGKNLYVKGEPIINYYDPLVFPSDEFDASISQVNEKINQSLAFIRRSDELLHNVNTGKSTTNIMITAIIIVIIVVLLSLIAIGLLLYCKAK

SEQ ID NO: 9420 - protein, 553 aa, Artificial Sequence
  derived and/or modified protein sequence (wt) from HRSV__AMN91242.1__F-del
MELLIHRSSAIFLTFAINTLYLTSSQNITEEFYQSTCSAVSRGYLSALRTGWYTSVITIELSNIKETKCNGTDTKVKLIKQELDKYKNAVTELQLLMQNTPAANNRARREAPQYMNYTINTTKNLNVSISKKRKRRFLGFLLGVGSAIASGIAVSKVLHLEGEVNKIKNALLATNKAVVSLSNGVSVLTSKVLDLKNYINNQLLPIVNQQSCRISNIETVIEFQQKNSRLLEITREFSVNAGVTTPLSTYMLTNSELLSLINDMPITNDQKKLMSSNVQIVRQQSYSIMSIIKEEVLAYVVQLPIYGVIDTPCWKLHTSPLCTTNIKEGSNICLTRTDRGWYCDNAGSVSFFPQADTCKVQSNRVFCDTMNSLTLPSEVSLCNTDIFNSKYDCKIMTSKTDISSSVITSLGAIVSCYGKTKCTASNKNRGIIKTFSNGCDYVSNKGVDTVSVGNTLYYVNKLEGKNLYVKGEPIINYYDPLVFPSDEFDASISQVNEKINQSLAFIRRSDELLHNVNTGKSTTNIMITAIIIVIIVVLLSLIAIGLLLYCKAK

SEQ ID NO: 9421 - protein, 553 aa, Artificial Sequence
  derived and/or modified protein sequence (wt) from HRSV__AHX57504.1__F-del
MELPILKTNAITTILAAVTLCFASNQNITEEFYQSTCSAVSKGYLSALRTGWYTSVITIELSNIKENKCNGTDAKVKLIKQELDKYKNAVTELQLLMQSTPAANSRARRELPRFMNYTLNNTKNTNVTLSKKRKRRFLGFLLGVGSAIASGIAVSKVLHLEGEVNKIKSALLSTNKAVVSLSNGVSVLTSKVLDLKNYIDKQLLPIVNKQSCSISNIETVIEFQQKNNRLLEITREFSVNAGVTTPVSTYMLTNSELLSLINDMPITNDQKKLMSSNVQIVRQQSYSIMSIIKEEVLAYVVQLPLYGVIDTPCWKLHTSPLCTTNTKEGSNICLTRTDRGWYCDNAGSVSFFPQAETCKVQSNRVFCDTMNSLTLPSEVNLCNIDIFNPKYDCKIMTSKTDVSSSVITSLGAIVSCYGKTKCTASNKNRGIIKTFSNGCDYVSNKGVDTVSVGNTLYYVNKQEGKSLYVKGEPIINFYDPLVFPSDEFDASISQVNEKINQSLAFIRKSDELLHNVNAGKSTTNIMITTIIIVIIVILLALIAVGLLLYCKAR

SEQ ID NO: 9422 - protein, 553 aa, Artificial Sequence
  derived and/or modified protein sequence (wt) from HRSV__CUS01881.1__F-del
MELLIHRSSAIFLTLAINALYLTSSQNITEEFYQSTCSAVSRGYFSALRTGWYTSVITIELSNIKETKCNGTDTKVKLIKQELDKYKNAVTELQLLMQNTPAANNRARREAPQYMNYTINTTKNLNVSISKKRKRRFLGFLLGVGSAIASGIAVSKVLHLEGEVNKIKNALLSTNKAVVSLSNGVSVLTSKVLDLKNYINNQLLPIVNQQSCRITNIETVIEFQQKNSRLLEITREFSVNAGVTTPLSTYMLTNSELLSLINDMPITNDQKKLMSSNVQIVRQQSYSIMSIIKEEVLAYVVQLPIYGVIDTHCWKLHTSPLCTTNIKEGSNICLTRTDRGWYCDNAGSVSFFPQADTCKVQSNRVFCDTMNSLTLPSEVSLCNTDIFNSKYDCKIMTSKTDISSSVITSLGAIVSCYGKTKCTASNKNRGIIKTFSNGCDYVSNKGVDTVSVGNTLYYVNKLEGKNLYVKGEPIINYYDPLVFPSDEFDASISQVNEKINQSLAFIRRSDELLHNVNTGKSTTNIMITAIIIVIIVVLLSLIAIGLLLYCKAK

SEQ ID NO: 9423 - protein, 553 aa, Artificial Sequence
  derived and/or modified protein sequence (wt) from HRSV__CUS01870.1__F-del
MELLIHRSSAIFLTLAINALYLTSSQNITEEFYQSTCSAVSRGYLSALRTGWYTSVITIELSNIKETKCNGTDTKVKLIKQELDKYKNAVTELQLLMQNTPAANNRARREAPQYMNYTINTTKNPNVSISKKRKRRFLGFLLGVGSAIASGIAVSKVLHLEGEVNKIKNALLSTNKAVVSLSNGVSVLTSKVLDLKNYINNQLLPIVNQQSCRISNIETVIEFQQKNSRLLEITREFSVNAGVTTPLSTYMLTNSELLSLINDMPITNDQKKLMSSNVQIVRQQSYSIMSIIKEEVLAYVVQLPIYGVIDTPCWKLHTSPLCTTNIKEGSNICLTRTDRGWYCDNAGSVSFFPQADTCKVQSNRVFCDTMNSLTLPSEVSLCNTNIFNSKYDCKIMTSKTDISSSVITSLGAIVSCYGKTKCTASNKNRGIIKTFSNGCDYVSNKGVDTVSVGNTLYYVNKLEGKNLYVKGEPIINYYDPLVFPSDEFDASISQVNEKINQSLAFIRRSDELLHNVNTGKSTTNIMITVIIIVIIVVLLSLIAIGLLLYCKAK

SEQ ID NO: 9424 - protein, 553 aa, Artificial Sequence
  derived and/or modified protein sequence (wt) from HRSV__AMA67350.1__F-del
MELLIHRSSAIFLTLAINALYFTSSQNITEEFYQSTCSAVSRGYFSALRTGWYTSVITIELSNIKETKCNGTDTKVKLIKQELDKYKNAVTELQLLMQNTPAANNRARREAPQYMNYTINTTKNLNVSISKKRKRRFLGFLLGVGSAIASGIAVSKVLHLEGEVNKIKNALLSTNKAVVSLSNGVSVLTSKVLDLKNYINNQLLPIVNQQSCRISNIETVIEFQQKNSRLLEITREFSVNAGVTTPLSTYMLTNSELLSLINDMPITNDQKKLMSSNVQIVRQQSYSIMSIIKEEVLAYVVQLPIYGVIDTHCWKLHTSPLCTTNIKEGSNICLTRTDRGWYCDNAGSVSFFPQADTCKVQSNRVFCDTMNSLTLPSEVSLCNTDIFNSKYDCKIMTSKTDISSSVITSLGAIVSCYGKTKCTASNKNRGIIKTFSNGCDYVSNKGVDTVSVGNTLYYVNKLEGKNLYVKGEPIINYYDPLVFPSDEFDASISQVNEKINQSLAFIRRSDELLHNVNTGKSTTNIMITTIIIVIIVVLLSLIAIGLLLYCKAK

SEQ ID NO: 9425 - protein, 553 aa, Artificial Sequence
  derived and/or modified protein sequence (wt) from HRSV__AMA67251.1__F-del
MELLIHRSSAIFLTLAINALCLTSSQNITEEFYQSTCSAVSRGYFSALRTGWYTSVITIELSNIKETKCNGTDTKVKLIKQELDKYKNAVTELQLLMQNTPAANNRARREAPQYMNYTINTTKNLNVSISKKRKRRFLGFLLGVGSAIASGIAVSKVLHLEGEVNKIKNALLSTNKAVVSLSNGVSVLTSKVLDLKNYINNQLLPIVNQQSCRISNIETVIEFQQKNSRLLEITREFSVNAGVTTPLSTYMLTNSELLSLINDMPITNDQKKLMSSNVQIVRQQSYSIMSIIKEEVLAYVVQLPIYGVIDTPCWKLHTSPLCTTNIKEGSNICLTRTDRGWYCDNAGSVSFFPQADTCKVQSNRVFCDTMNSLTLPSEVSLCNTDIFNSKYDCKIMTSKTDISSSVITSLGAIVSCYGKTKCTASNKNRGIIKTFSNGCDYVSNKGVDTVSVGNTLYYVNKLEGKNLYVKGEPIINYYDPLVFPSDEFDASISQVNEKINQSLAFIRRSDELLHNVNTGKSTTNIMITTIIIVIIVVLLSLIAIGLLLYCKAK

SEQ ID NO: 9426 - protein, 553 aa, Artificial Sequence
  derived and/or modified protein sequence (wt) from HRSV__AMA67262.1__F-del
MELPIIKANAITTILIAVTFCFASSQNITEEFYQSTCSAVSKGYLSALRTGWYTSVITIELSNIKENKCNGTDAKVKLIKQELDKYKNAVTELQLLMQSTPAANNRARRELPRVMNYTLNNAKKTNVTLSKKRKRRFLGFLLGVGSAIASGIAVSKVLHLEGEVNKIKSALLSTNKAVVSLSNGVSVLTSKVLDLKNYIDKQLLPIVNKQSCSISNIETVIEFQQKNNRLLEITREFSVNAGVTTPVSTYMLTNSELLSLINDMPITNDQKKLMSNNVQIVRQQSYSIMSIIKEEVLAYVVQLPLYGVIDTPCWKLHTSPLCTTNTKEGSNICLTRTDRGWYCDNAGSVSFFPQADTCKVQSNRVFCDTMNSLTLPSEVNLCNIDIFNPKYDCKIMTSKTDVSSSVITSLGAIVSCYGKTKCTASNKNRGIIKTFSNGCDYVSNKGVDTVSVGNTLYYVNKQEGKSLYVKGEPIINFYDPLVFPSDEFDASISQVNEKINQSLAFIRKSDELLHNVNAGKSTTNIMITTIIIVIIVILLSLIAVGLLLYCKAR

SEQ ID NO: 9427 - protein, 553 aa, Artificial Sequence
  derived and/or modified protein sequence (wt) from HRSV__AMA67229.1__F-del
MELPILKANAITTILIAVTFCFASSQNITEEFYQSTCSAVSKGYFSALRTGWYTSVITIELSNIKENKCNGTDAKVKLIKQELDKYKNAVTELQLLMQSTPAANNRARRELPRFMNYTLNNAKKTNVTLSKKRKRRFLGFLLGVGSAIASGIAVSKVLHLEGEVNKIKSALLSTNKAVVSLSNGVSVLTSKVLDLKNYIDKQLLPIVNKQSCSISNIETVIEFQQKNNRLLEITREFSVNAGVTTPVSTYMLTNSELLSLINDMPITNDQKKLMSNNVQIVRQQSYSIMSIIKEEVLAYVVQLPLYGVIDTPCWKLHTSPLCTTNTKEGSNICLTRTDRGWYCDNAGSVSFFPQAETCKVQSNRVFCDTMNSLTLPSEVNLCNVDIFNPKYDCKIMTSKTDVSSSVITSLGAIVSCYGKTKCTASNKNRGIIKTFSNGCDYVSNKGVDTVSVGNTLYYVNKQEGKSLYVKGEPIINFYDPLVFPSDEFDASISQVNEKINQSLAFIRKSDELLHNVNAGKSTTNIMITTIIIVIIVILLSLIAVGLLLYCKAR

SEQ ID NO: 9428 - protein, 553 aa, Artificial Sequence
  derived and/or modified protein sequence (wt) from HRSV__AMA67196.1__F-del
MELPIIKANAITTILIAVTFCFASSQNITEEFYQSTCSAVSKGYLSALRTGWYTSVITIELSNIKENKCNGTDAKVKLIKQELDKYKNAVTELQLLMQSTPAANNRARRELPRFMNYTLNNAEKTNVTLSKKRKRRFLGFLLGVGSAIASGIAVSKVLHLEGEVNKIKSALLSTNKAVVSLSNGVSVLTSKVLDLKNYIDKQLLPIVNKQSCSISNIETVIEFQQKNNRLLEITREFSVNAGVTTPVSTYMLTNSELLSLINDMPITNDQKKLMSNNVQIVRQQSYSIMSIIKEEVLAYVVQLPLYGVIDTPCWKLHTSPLCTTNTKEGSNICLTRTDRGWYCDNAGSVSFFPQADTCKVQSNRVFCDTMNSLTLPSEVNLCNIDIFNPKYDCKIMTSKTDVSSSVITSLGAIVSCYGKTKCTASNKNRGIIKTFSNGCDYVSNKGVDTVSVGNTLYYVNKQEGKSLYVKGEPIINFYDPLVFPSDEFDASISQVNEKINQSLAFIRKSDELLHNVNAGKSTTNIMITTIIIVIIVILLSLIAVGLLLYCKAR

SEQ ID NO: 9429 - protein, 553 aa, Artificial Sequence
  derived and/or modified protein sequence (wt) from HRSV__AMA67130.1__F-del
MELPIIKANAITTILIAVTFCFASSQNITEEFYQSTCSAVSKGYLSALRTGWYTSVITIELSNIKENKCNGTDAKVKLIKQELDKYKNAVTELQLLMQSTPAANNRARRELSRFMNYTLNNAKKTNVTLSKKRKRRFLGFLLGVGSAIASGIAVSKVLHLEGEVNKIKSALLSTNKAVVSLSNGVSVLTSKVLDLKNYIDKQLLPIVNKQSCSISNIETVIEFQQKNNRLLEITREFSVNAGVTTPVSTYMLTNSELLSLINDMPITNDQKKLMSNNVQIVRQQSYSIMSIIKEEVLAYVVQLPLYGVIDTPCWKLHTSPLCTTNTKEGSNICLTRTDRGWYCDNAGSVSFFPQADTCKVQSNRVFCDTMNSLTLPSEVNLCNIDIFNPKYDCKIMTSKTDVSSSVITSLGAIVSCYGKTKCTASNKNRGIIKTFSNGCDYVSNKGVDTVSVGNTLYYVNKQEGKSLYVKGEPIINFYDPLVFPSDEFDASISQVNEKINQSLAFIRKSDELLHNVNAGKSTTNIMITTIIIVIIVILLSLIAVGLLLYCKAR

SEQ ID NO: 9430 - protein, 553 aa, Artificial Sequence
  derived and/or modified protein sequence (wt) from HRSV__AMA67185.1__F-del
MELPILKTNAITTILAAVTLCLASSQNITEEFYQSTCSAVSKGYLSALRTGWYTSVITIELSNIKENKCNGTDAKVKLIKQELDKYKNAVTELQLLMQNTPAANNRARRELPRFMNYTLNNTKNTNATLSKKRKRRFLGFLLGVGSAIASGIAVSKVLHLEGEVNKIKSALLSTNKAVVSLSNGVSVLTSKVLDLKNYIDKQLLPIVNKQSCSISNIETVIEFQQKNNRLLEITREFSVNAGVTTPVSTYMLTNSELLSLINDMPITNDQKKLMSNNVQIVRQQSYSIMSIIKEEVLAYVVQLPLYGVIDTPCWKLHTSPLCTTNTKEGSNICLTRTDRGWYCDNAGSVSFFPQAETCKVQSNRVFCDTMNSLTLPSEVNLCNIDIFNPKYDCKIMTSKTDVSSSVITSLGAIVSCYGKTKCTASNKNRGIIKTFSNGCDYVSNKGVDTVSVGNTLYYVNKQEGKSLYVKGEPIINFYDPLVFPSDEFDASISQVNEKINQSLAFIRKSDELLHNVNAGKSTTNIMITTIIIVIIVILLSLIAVGLLLYCKAR

SEQ ID NO: 9431 - protein, 553 aa, Artificial Sequence
  derived and/or modified protein sequence (wt) from HRSV__AMA67163.1__F-del
MELPIIKANAITTILIAVTFCFASSQNITEEFYQSTCSAVSKGYLSALRTGWYTSVITIELSNIKENKCNGTDAKVKLIKQELDKYKNAVTELQLLMQSTPAANNRARRELPRFMNYTLNNAKKTNVTLSKKRKRRFLGFLLGVGSAIASGIAVSKVLHLEGEVNKIKSALLSTNKAVVSLSNGVSVLTSKVLDLKNYIDKQLLPIVNKQSCSISNIETVIEFQQKNNRLLEITREFSVNAGVTTPVSTYMLTNSELLSLINDMPITNDQKKLMSNNVQIVRQQSYSIMSIIKEEVLAYVVQLPLYGVIDTPCWKLHTSPLCTTNTKEGSNICLTRTDRGWYCDNAGSVSFFPQADTCKVQSNRVFCDTMNSLTLPSEVNLCNIDIFNPKYDCKIMTSKTDVSSSVITSLGAIVSCYGKTKCTASNKNRGIIKTFSNGCDYVSNRGVDTVSVGNTLYYVNKQEGKSLYVKGEPIINFYDPLVFPSDEFDASISQVNEKINQSLAFIRKSDELLHNVNAGKSTTNIMITTIIIVIIVILLSLIAVGLLLYCKAR

SEQ ID NO: 9432 - protein, 553 aa, Artificial Sequence
  derived and/or modified protein sequence (wt) from HRSV__AMA67086.1__F-del
MELLIHRSSAIFLTLAINALYLTSSQNITEEFYQSTCSAVSRGYFSALRTGWYTSVITIELSNIKETKCNGTDTKVKLIKQELDKYKNAVTELQLLMQNTPAANNRARREAPQYMNYTINTTKNLNVSISKKRKRRFLGFLLGIGSAIASGIAVSKVLHLEGEVNKIKNALLSTNKAVVSLSNGVSVLTSKVLDLKNYINNQLLPIVNQQSCRISNIETVIEFQQKNSRLLEITREFSVNAGVTTPLSTYMLTNSELLSLINDMPITNDQKKLMSSNVQIVRQQSYSIMSIIKEEVLAYVVQLPIYGVIDTPCWKLHTSPLCTTNIKEGSNICLTRTDRGWYCDNAGSVSFFPQADTCKVQSNRVFCDTMNSLTLPSEVSLCNTDIFNSKYDCKIMTSKTDISSSVITSLGAIVSCYGKTKCTASNKNRGIIKTFSNGCDYVSNKGVDTVSVGNTLYYVNKLEGKNLYVKGEPIINYYDPLVFPSDEFDASISQVNEKINQSLAFIRRSDELLHNVNTGKSTTNIMITAIIIVIIVVLLSLIAIGLLLYCKAK

SEQ ID NO: 9433 - protein, 553 aa, Artificial Sequence
  derived and/or modified protein sequence (wt) from HRSV__AMA67075.1__F-del
MELPILKTNAITTILAAVTLCFASSQNITEEFYQSTCSAVSKGYLSALRTGWYTSVITIELSNIKENKCNGTDAKVKLIKQELDKYKNAVTELQLLMQSTPAANNRARRELPRFMNYTLNNTKNTNVTLSKKRKRRFLGFLLGVGSAIASGIAVSKVLHLEGEVNKIKSALLSTNKAVVSLSNGVSVLTSKVLDLKNYIDKQLLPIVNKQSCSISNIETVIEFQQKNNRLLEITREFSVNAGVTTPVSTYMLTNSELLSLINDMPITNDQKKLMSNNVQIVRQQSYSIMSIVKEEVLAYVVQLPLYGVIDTPCWKLHTSPLCTTNTKEGSNICLTRTDRGWYCDNAGSVSFFPQAETCKVQSNRVFCDTMNSLTLPSEVNLCNIDIFNPKYDCKIMTSKTDVSSSVITSLGAIVSCYGKTKCTASNKNRGIIKTFSNGCDYVSNKGVDTVSVGNTLYYVNKQEGKSLYVKGEPIINFYDPLVFPSDEFDASISQVNEKINQSLAFIRKSDELLHNVNAGKSTTNIMITTIIIVIIVILLSLIAVGLLLYCKAR

SEQ ID NO: 9434 - protein, 553 aa, Artificial Sequence
  derived and/or modified protein sequence (wt) from HRSV__AMA66998.1__F-del
MELPILKTNAITTILAAATLCFTSSQNITEEFYQSTCSAVSKGYLSALRTGWYTSVITIELSNIKENKCNGTDAKVKLIKQELDKYKNAVTELQLLMQSTPAANNRARRELPRFMNYTLDNTKNTNVTLSKKRKRRFLGFLLGVGSAIASGIAVSKVLHLEGEVNKIKSALLSTNKAVVSLSNGVSVLTSKVLDLKNYIDKQLLPIVNKQSCSISNIETVIEFQQKNNRLLEITREFSVNAGVTTPVSTYMLTNSELLSLINDMPITNDQKKLMSNNVQIVRQQSYSIMSIIKEEVLAYVVQLPLYGVIDTPCWKLHTSPLCTTNTKEGSNICLTRTDRGWYCDNAGSVSFFPQAETCKVQSNRVFCDTMNSLTLPSEVNLCNIDIFNPKYDCKIMTSKTDVSSSVITSLGAIVSCYGKTKCTASNKNRGIIKTFSNGCDYVSNKGVDTVSVGNTLYYVNKQEGKSLYVKGEPIINFYDPLVFPSDEFDASISQVNEKINQSLAFIRKSDELLHNVNAGKSTTNIMITTIIIVIIVILLSLIAVGLLLYCKAR

SEQ ID NO: 9435 - protein, 553 aa, Artificial Sequence
  derived and/or modified protein sequence (wt) from HRSV__AMA66987.1__F-del
MELPILKTNAITTILAAVTLCFASSQNITEEFYQSTCSAVSKGYLSALRTGWYTSVITIELSNIKENKCNGTDAKVKLIKQELDKYKNAVTELQLLMQSTPAANNRARRELPKFMNYTLNNTKNTNVTLSKKRKRRFLGFLLGVGSAIASGIAVSKVLHLEGEVNKIKSALLSTNKAVVSLSNGVSVLTSKVLDLKNYIDKQLLPIVNKQSCSISNIETVIEFQQKNNRLLEITREFSVNAGVTTPVSTYMLTNSELLSLINDMPITNDQKKLMSNNVQIVRQQSYSIMSIIKEEVLAYVVQLPLYGVIDTPCWKLHTSPLCTTNTKEGSNICLTRTDRGWYCDNAGSVSFFPQAETCKVQSNRVFCDTMNSLTLPSEVNLCNIDIFNPKYDCKIMTSKTDVSSSVITSLGAIVSCYGKTKCTASNKNRGIIKTFSNGCDYVSNKGVDTVSVGNTLYYVNKQEGKSLYVKGEPIINFYDPLVFPSDEFDASISQVNEKINQSLAFIRKSDELLHNVNAGKSTTNIMITTIIIVIIVILLSLIAVGLLLYCKAR

SEQ ID NO: 9436 - protein, 553 aa, Artificial Sequence
  derived and/or modified protein sequence (wt) from HRSV__AMA66976.1__F-del
MELPILKTNAITTILAAVTLCFASSQNITEEFYQSTCSAVSKGYLSALRTGWYTSVITIELSNIKENKCNGTDAKVKLIKQELDKYKNAVTELQLLMQSTPAANNRARRELPRFMNYTLNNTKNTNVTLSKKRKRRFLGFLLGVGSAIASGIAVSKVLHLEGEVNKIKSALLSTNKAVVSLSNGVSVLTSKVLDLKNYIDKQLLPIVNKQSCSISNIETVIEFQQKNNRLLEITREFSVNAGVTTPVSTYMLTNSELLSLINDMPITNDQKKLMSNNVQIVRQQSYSIMSIIKEEVLAYVVQLPLYGVIDTPCWKLHTSPLCTTNTKEGSNICLTRTDRGWYCDNAGSVSFFPQAETCKVQSNRVFCDTMNSLTLPSEVNLCNIDIFNPKYDCKIMTSKTDVSSSVITSLGAIVSCYGKTKCTASNKNRGIIKTFSNGCDYVSNKGVDTVSVGNTLYYVNKQEGKSLYVKGEPIINFYDPLVFPSDEFDASISQVNEKINQSLAFIRKSDELLHNVNAGKSTTNIMITTIIIVIIVILLSLIAIGLLLYCKAR

SEQ ID NO: 9437 - protein, 553 aa, Artificial Sequence
  derived and/or modified protein sequence (wt) from HRSV__AMA66965.1__F-del
MELLIHKSSAILLTLAINALYLTSSQNITEEFYQSTCSAVSRGYFSALRTGWYTSVITIELSNIKETKCNGTDTKVKLIKQELDKYKNAVTELQLLMQNTPAANNRARREAPQHMNYTINTTKNLNVSISKKRKRRFLGFLLGVGSAIASGIAVSKVLHLEGEVNKIKNALLSTNKAVVSLSNGVSVLTSKVLDLKNYINNQLLPIVNKQSCRISNIETVIEFQQKNSRLLEITREFSVNAGVTTPLSTYMLTNSELLSLINDMPITNDQKKLMSSNVQIVRQQSYSIMSIIKEEVLAYVVQLPIYGVIDTPCWKLHTSPLCTTNIKEGSNICLTRTDRGWYCDNAGSVSFFPQADTCKVQSNRVFCDTMNSLTLPSEVSLCNTDIFNSKYDCKIMTSKTDISSSVITSLGAIVSCYGKTKCTASNKNRGIIKTFSNGCDYVSNKGVDTVSVGNTLYYVNKLEGKNLYVKGEPIINYYDPLVFPSDEFDASISQVNEKINQSLAFIRRSDELLHNVNTGKSTTNIMITTIIIVIIVVLLSLMAIGLLLYCKAK

SEQ ID NO: 9438 - protein, 553 aa, Artificial Sequence
  derived and/or modified protein sequence (wt) from HRSV__AMA66921.1__F-del
MELPILKTNAITTILAAATLCFVSSQNITEEFYQSTCSAVSKGYLSALRTGWYTSVITIELSNIKENKCNGTDAKVKLIKQELDKYKNAVTELQLLMQSTPAANNRARRELPRFMNYTLNNTKNTNVTLSKKRKRRFLGFLLGVGSAIASGIAVSKVLHLEGEVNKIKSALLSTNKAVVSLSNGVSVLTSKVLDLKNYIDKQLLPIVNKQSCSISNIETVIEFQQKNNRLLEITREFSVNAGVTTPVSTYMLTNSELLSLINDMPITNDQKKLMSNNVQIVRQQSYSIMSIIKEEVLAYVVQLPLYGVIDTPCWKLHTSPLCTTNTKEGSNICLTRTDRGWYCDNAGSVSFFPQAETCKVQSNRVFCDTMSSLTLPSEVNLCNIDIFNPKYDCKIMTSKTDVSSSVITSLGAIVSCYGKTKCTASNKNRGIIKTFSNGCDYVSNKGVDTVSVGNTLYYVNKQEGKSLYVKGEPIINFYDPLVFPSDEFDASISQVNEKINQSLAFIRKSDELLHNVNAGKSTTNIMITTIIIVIIVILLSLIAVGLLLYCKAR

SEQ ID NO: 9439 - protein, 553 aa, Artificial Sequence
  derived and/or modified protein sequence (wt) from HRSV__AMA66844.1__F-del
MELLIYRSSAIFLTLAINALYLTSSQNITEEFYQSTCSAVSRGYFSALRTGWYTSVITIELSNIKETKCNGTDTKVKLIKQELDKYKNAVTELQLLMQNTPAANNRARREAPQYTNYTINTTKNLNVSISKKRKRRFLGFLLGVGSAIASGIAVSKVLHLEGEVNKIKNALLSTNKAVVSLSNGVSVLTSKVLDLKNYINNQLLPIVNKQSCRISNIETVIEFQQKNSRLLEITREFSVNAGVTTPLSTYMLTNSELLSLINDMPITNDQKKLMSSNAQIVRQQSYSIMSIIKEEVLAYVVQLPIYGVIDTPCWKLHTSPLCTTNIKEGSNICLTRTDRGWYCDNAGSVSFFPQADTCKVQSNRVFCDTMNSLTLPSEVSLCNTDIFNSKYDCKIMTSKTDISSSVITSLGAIVSCYGKTKCTASNKNRGIIKTFSNGCDYVSNKGVDTVSVGNTLYYVNKLEGKNLYVKGEPIINYYDPLVFPSDEFDASISQVNEKINQSLAFIRRSDELLHNVNTGKSTTNIMITTIIIVIIVVLLSLIAIGLLLYCKAK

SEQ ID NO: 9440 - protein, 553 aa, Artificial Sequence
  derived and/or modified protein sequence (wt) from HRSV__AMA66833.1__F-del
MELPILKTNAITTILAAVTLCFASSQNITEEFYQATCSAVSKGYLSALRTGWYTSVITIELSNIKENKCNGTDAKVKLIKQELDKYKNAVTELQLLMQSTPAANNRARRELPKFMNYTLNNTKNTNVTLSKKRKRRFLGFLLGVGSAIASGIAVSKVLHLEGEVNKIKSALLSTNKAVVSLSNGVSVLTSKVLDLKNYIDKQLLPIVNKQSCSISNIETVIEFQQKNNRLLEITREFSVNAGVTTPVSTYMLTNSELLSLINDMPITNDQKKLMSNNVQIVRQQSYSIMSIIKEEVLAYVVQLPLYGVIDTPCWKLHTSPLCTTNTKEGSNICLTRTDRGWYCDNAGSVSFFPQAETCKVQSNRVFCDTMNSLTLPSEVNLCNIDIFNPKYDCKIMTSKTDVSSSVITSLGAIVSCYGKTKCTASNKNRGIIKTFSNGCDYVSNKGVDTVSVGNTLYYVNKQEGKSLYVKGEPIINFYDPLVFPSDEFDASISQVNEKINQSLAFIRKSDELLHNVNAGKSTTNIMITTIIIVIIVILLSLIAVGLLLYCKAR

SEQ ID NO: 9441 - protein, 553 aa, Artificial Sequence
  derived and/or modified protein sequence (wt) from HRSV__AMA66624.1__F-del
MELLIHRSSAIFLTLAINALYLTSSQNITEEFYQSTCSAVSRGYFSALRTGWYTSVITIELSNIKETKCNGTDTKVKLIKQELDKYKNAVTELQLLMQKTPAVNNRARREAPQHMNYTINTTKNLNVSISKKRKRRFLGFLLGVGSAIASGIAVSKVLHLEGEVNKIKNALLSTNKAVVSLSNGVSVLTSKVLDLKNYINNQLLPIVNKQSCRISNIETVIEFQQKNSRLLEITREFSVNAGVTTPLSTYMLTNSELLSLINDMPITNDQKKLMSSNVQIVRQQSYSIMSIIKEEVLAYVVQLPIYGVIDTHCWKLHTSPLCTTNIKEGSNICLTRTDRGWYCNNAGSVSFFPQADTCKVQSNRVFCDTMNSLTLPSEVSLCNTDIFNSKYDCKIMTSKTDISSSVITSLGAIVSCYGKTKCTASNKNRGIIKTFSNGCDYVSNKGVDTVSVGNTLYYVNKLEGKNLYVKGEPIINYYDPLVFPSDEFDASISQVNEKINQSLAFIRRSDELLHNVNTGKSTTNIMITTIIIVIIVVLLSLIAIGLLLYCKAK

SEQ ID NO: 9442 - protein, 553 aa, Artificial Sequence
  derived and/or modified protein sequence (wt) from HRSV__AMA66613.1__F-del
MELLIHRSSAIFLTLAINALYLTSSQNITEEFYQSTCSAVSRGYFSALRTGWYTSVITIELSNIKETKCNGTDTKVKLIKQELDKYKNAVTELQLLMQNTPAANNRARREAPQYTNYTINTTKNLNVSISKKRKRRFLGFLLGVGSAIASGIAVSKVLHLEGEVNKIKSALLSTNKAVVSLSNGVSVLTSKVLDLKNYINNQLLPIVNQQSCRISNIETVIEFQQKNSRLLEITREFSVNAGVTTPLSTYMLTNSELLSLINDMPITNDQKKLMSSNVQIVRQQSYSIMSIIKEEVLAYVVQLPIYGVIDTPCWKLHTSPLCTTNIKEGSNICLTRTDRGWYCDNAGSVSFFPQADTCKVQSNRVFCDTMNSLTLPSEVSLCNTDIFNSKYDCKIMTSKTDISSSVITSLGAIVSCYGKTKCTASNKNRGIIKTFSNGCDYVSNKGVDTVSVGNTLYYVNKLEGKNLYVKGEPIINYYDPLVFPSDEFDASISQVNEKINQSLAFIRRSDELLHNVNTGKSTTNIMITTIIIVIIVVLLSLIAIGLLLYCKAK

SEQ ID NO: 9443 - protein, 553 aa, Artificial Sequence
  derived and/or modified protein sequence (wt) from HRSV__AMA66591.1__F-del
MKLLIHRSSAIFLTLAINALYLTSSQNITEEFYQSTCSAVSRGYFSALRTGWYTSVITIELSNIKETKCNGTDTKVKLIKQELDKYKNAVTELQLLMQNTPAANNRARREAPQYMNYTINTTKNLNVSISKKRKRRFLGFLLGVGSAIASGIAVSKVLHLEGEVNKIKNALLSTNKAVVSLSNGVSVLTSKVLDLKNYINNQLLPIVNQQSCRISNIETVIEFQQKNSRLLEITREFSVNAGVTTPLSTYMLTNSELLSLINDMPITNDQKKLMSSNVQIVRQQSYSIMSIIKEEVLAYVVQLPIYGVIDTPCWKLHTSPLCTTNIKEGSNICLTRTDRGWYCDNAGSVSFFPQADTCKVQSNRVFCDTMNSLTLPSEVSLCNTDIFNSKYDCKIMTSKTDISSSVITSLGAIVSCYGKTKCTASNKNRGIIKTFSNGCDYVSNKGVDTVSVGNTLYYVNKLEGKNLYVKGEPIINYYDPLVFPSDEFDASISQVNEKINQSLAFIRRSDELLHNVNTGKSTTNIMITTIIIVIIVVLLSLIAIGLLLYCKAK

SEQ ID NO: 9444 - protein, 553 aa, Artificial Sequence
  derived and/or modified protein sequence (wt) from HRSV__AMA66569.1__F-del
MELLIHRSSAIFLTIAINALYLTSSQNITEEFYQSTCSAVSRGYFSALRTGWYTSVITIELSNIKETKCNGTDTKVKLIKQELDKYKNAVTELQLLMQNTPAANNRARREAPQYMNHTINTTKNLNVSISKKRKRRFLGFLLGVGSAIASGIAVSKVLHLEGEVNKIKNALLSTNKAVVSLSNGVSVLTSKVLDLKNYINNQLLPIVNQQSCRISNIETVIEFQQKNSRLLEITREFSVNAGVTTPLSTYMLTNSELLSLINDMPITNDQKKLMSSNVQIVRQQSYSIMSIIKEEVLAYVVQLPIYGVIDTPCWKLHTSPLCTTNIKEGSNICLTRTDRGWYCDNAGSVSFFPQADTCKVQSNRVFCDTMNSLTLPSEVSLCNTDIFNSKYDCKIMTSKTDISSSVITSLGAIVSCYGKTKCTASNKNRGIIKTFSNGCDYVSNKGVDTVSVGNTLYYVNKLEGKNLYVKGEPIINYYDPLVFPSDEFDASISQVNEKINQSLAFIRRSDELLHNVNTGKSTTNIMITAIIIVIIVVLLSLIAIGLLLYCKAK

SEQ ID NO: 9445 - protein, 553 aa, Artificial Sequence
  derived and/or modified protein sequence (wt) from HRSV__AMA66547.1__F-del
MELPIIKANAITTILIAVTFCFASSQNITEEFYQSTCSAVSKGYLSALRTGWYTSVITIELSNIKENKCNGTDAKVKLIKQELDKYKNAVTELQLLMQSTPAANNRARRELPKFMNYTLNNAKKTNVTLSKKRKRRFLGFLLGVGSAIASGIAVSKVLHLEGEVNKIKSALLSTNKAVVSLSNGVSVLTSKVLDLKNYIDKQLLPIVNKQSCSISNIETVIEFQQKNNRLLEITREFSVNAGVTTPVSTYMLTNSELLSLINDMPITNDQKKLMSNNVQIVRQQSYSIMSIIKEEVLAYVVQLPLYGVIDTPCWKLHTSPLCTTNTKEGSNICLTRTDRGWYCDNAGSVSFFPQADTCKVQSNRVFCDTMNSLTLPSEVNLCNIDIFNPKYDCKIMTSKTDVSSSVITSLGAIVSCYGKTKCTASNKNRGIIKTFSNGCDYVSNKGVDTVSVGNTLYYVNKQEGKSLYVKGEPIINFYDPLVFPSDEFDASISQVNEKINQSLAFIRKSDELLHNVNAGKSTTNIMITTIIIVIIVILLSLIAVGLLLYCKAR

SEQ ID NO: 9446 - protein, 553 aa, Artificial Sequence
  derived and/or modified protein sequence (wt) from HRSV__AMA66503.1__F-del
MELLIHRSSAIFLTLAINALYLTSSQNITEEFYQSTCSAVSRGYFSALRTGWYTSVITIELSNIKETKCNGTDTKVKLIKQELDKYKNAVTELQLLMQNTPAANNRARREAPQYMNYTINTTKNLNVSISKKRKRRFLGFLLGVGSAIASGIAVSKVLHLEGEVNKIKNALLSTNKAVVSLSNGVSVLTSKVLDLKNYINNQLLPIVNKQSCRISNIETVIEFQQKNSRLLEITREFSVNAGVTTPLSTYMLTNSELLSLINDMPITNDQKKLMSSNVQIVRQQSYSIMSIIKEEVLAYVVQLPIYGVIDTPCWKLHTSPLCTTNIKEGSNICLTRTDRGWYCDNAGSVSFFPQADTCKVQSNRVFCDTMNSLTLPSEVSLCNTDIFNSKYDCKIMTSKTDISSSVITSLGAIVSCYGKTKCTASNKNRGIIKTFSNGCDYVSNKGVDTVSVGNTLYYVNKLEGKNLYVKGEPIINYYDPLVFPSDEFDASISQVNEKINQSLAFIRRSDELLHNVNTGKSTTNIMITAIIIVIIVVLLSLIAIGLLLYCKAK

SEQ ID NO: 9447 - protein, 553 aa, Artificial Sequence
  derived and/or modified protein sequence (wt) from HRSV__AMA66492.1__F-del
MELPILKTNAITTILAAVTLCFASSQNITEEFYQSTCSAVSKGYLSALRTGWYTSVITIELSNIKENKCNGTDAKVKLIKQELDKYKNAVTELQLLMQSTPAANNRARRELPRFMNYTLNNTKNTNVTLSKKRKRRFLGFLLGVGSAIASGIAVSKVLHLEGEVNKIKSALLSTNKAVVSLSNGVSVLTSKVLDLKNYIDKQLLPIVNKQSCSISNIETVIEFQQKNNRLLEITREFSVNAGVTTPVSTYMLTNSELLSLINDMPITNDQKKLMSNNVQIVRQQSYSIMSIIKEEVLAYVVQLPLYGVIDTPCWKLHTSPLCTTNTKEGSNICLTRTDRGWYCDNAGSVSFFPQAETCKVQSNRVFCDTMNSLTLPSEVNLCNIDIFNPKYDCKIMTSKTDVSSSVITSLGAIMSCYGKTKCTASNKNRGIIKTFSNGCDYVSNKGVDTVSVGNTLYYVNKQEGKSLYVKGEPIINFYDPLVFPSDEFDASISQVNEKINQSLAFIRKSDELLHNVNVGKSTTNIMITTIIIVIIVILLLLIAVGLFLYCKAR

SEQ ID NO: 9448 - protein, 553 aa, Artificial Sequence
  derived and/or modified protein sequence (wt) from HRSV__AMA66481.1__F-del
MELPIIKANAITTILIAVTFCFASSQNITEEFYQSTCSAVSKGYLSALRTGWYTSVITIELSNIKENKCNGTDAKVKLIKQELDKYKNAVTELQLLMQSTPAANNRARRELPRFMNYTFNNAKKTNVTLSKKRKRRFLGFLLGVGSAIASGIAVSKVLHLEGEVNKIKSALLSTNKAVVSLSNGVSVLTSKVLDLKNYIDKQLLPIVNKQSCSISNIETVIEFQQKNNRLLEITREFSVNAGVTTPVSTYMLTNSELLSLINDMPITNDQKKLMSNNVQIVRQQSYSIMSIIKEEVLAYVVQLPLYGVIDTPCWKLHTSPLCTTNTKEGSNICLTRTDRGWYCDNAGSVSFFPQADTCKVQSNRVFCDTMNSLTLPSEVNLCNIDIFNPKYDCKIMTSKTDVSSSVITSLGAIVSCYGKTKCTASNKNRGIIKTFSNGCDYVSNKGVDTVSVGNTLYYVNKQEGKSLYVKGEPIINFYDPLVFPSDEFDASISQVNEKINQSLAFIRKSNELLHNVNAGKSTTNIMITTIIIVIIVILLSLIAVGLLLYCKAR

SEQ ID NO: 9449 - protein, 553 aa, Artificial Sequence
  derived and/or modified protein sequence (wt) from HRSV__AMA66448.1__F-del
MELLIHRSSAIFLTLAINALYLTSSQNITEEFYQSTCSAVSRGYFSALRTGWYTSVITIELSNIKETKCNGTDTKVKLINQELDKYKNAVTELQLLMQNTPAANNRARREAPRYMNYTINTTKNLNVSISKKRKRRFLGFLLGVGSAIASGIAVSKVLHLEGEVNKIKNALLSTNKAVVSLSNGVSVLTSKVLDLKNYINNQLLPIVNQQSCRISNIETVIEFQQKNSRLLEITREFSVNAGVTTPLSTYMLTNSELLSLINDMPITNDQKKLMSSNVQIVRQQSYSIMSIIKEEVLAYVVQLPIYGVIDTPCWKLHTSPLCTTNIKEGSNICLTRTDRGWYCDNAGSVSFFPQADTCKVQSNRVFCDTMNSLTLPSEVSLCNTDIFNSKYDCKIMTSKTDISSSVITSLGAIVSCYGKTKCTASNKNRGIIKTFSNGCDYVSNKGVDTVSVGNTLYYVNKLEGKNLYVKGEPIINYYDPLVFPSDEFDASISQVNEKINQSLAFIRRSDELLHNVNTGKSTTNIMITAIIIVIIVVLLSLIAIGLLLYCKAK

SEQ ID NO: 9450 - protein, 553 aa, Artificial Sequence
  derived and/or modified protein sequence (wt) from HRSV__AMA66415.1__F-del
MELLIHRSSAIFLTLAINALYLTSSQNITEEFYQSTCSAVSRGYFSALRTGWYTSVITIELSNIKETKCNGTDTKVKLIKQELDKYKNAVTELQLLMQNTPAANNRARREAPQHMNYTINTTKNLNVSISKKRKRRFLGFLLGVGSAIASGIAVSKVLHLEGEVNKIKNALLSTNKAVVSLSNGVSVLTSKVLDLKNYINNQLLPIVNKQSCRISNIETVIEFQQKNSRLLEITREFSVNAGVTTPLSTYMLTNSELLSLINDMPITNDQKKLMSSNVQIVRQQSYSIMSIIKEEVLAYVVQLPIYGVIDTPCWKLHTSPLCTTNIKEGSNICLTRTDRGWYCDNAGSVSFFPQADTCKVQSNRVFCDTMNSLTLPSEVSLCNTDIFNSKYDCKIMTSKTDISSSVITSLGAIVSCYGKTKCTASNKNRGIIKTFSNGCDYVSNKGVDTVSVGNTLYYVNKLEGKNLYVKGEPIINYYDPLVFPSDEFDASISQVNEKINQSLAFIRRSDELLHNVNTGKSTTNIMITTIIIVIIVVLLSLIAIGLLLYCKAK

SEQ ID NO: 9451 - protein, 553 aa, Artificial Sequence
  derived and/or modified protein sequence (wt) from HRSV__AMA66393.1__F-del
MELLIHKSSAIFLTLAINALYLTSSQNITEEFYQSTCSAVSRGYFSALRTGWYTSVITIELSNIKETKCNGTDTKVKLIKQELDKYKNAVTELQLLMQNTPAANNRARREAPQHMNYTINTTKNLNVSISKKRKRRFLGFLLGVGSAIASGIAVSKVLHLEGEVNKIKNALLSTNKAVVSLSNGVSVLTSKVLDLKNYINNQLLPIVNKQSCRISNIETVIEFQQKNSRLLEITREFSVNAGVTTPLSTYMLTNSELLSLINDMPITNDQKKLMSSNVQIVRQQSYSIMSIIKEEVLAYVVQLPIYGVIDTPCWKLHTSPLCTTNIKEGSNICLTRTDRGWYCDNAGSVSFFPQADTCKVQSNRVFCDTMNSLTLPSEVSLCNTDIFNSKYDCKIMTSKTDISSSVITSLGAIVSCYGKTKCTASNKNRGIIKTFSNGCDYVSNKGVDTVSVGNTLYYVNKLEGKNLYVKGEPIINYYDPLVFPSDEFDASISQVNEKINQSLAFIRRSDELLHNVNTGKSTTNIMITTIIIVIIVVLLSLMAIGLLLYCKAK

SEQ ID NO: 9452 - protein, 553 aa, Artificial Sequence
  derived and/or modified protein sequence (wt) from HRSV__AMA66360.1__F-del
MELPIFKTNAITTILAAVTLCFASSQNITEEFYQSTCSAVSKGYLSALRTGWYTSVITIELSNIKENKCNGTDAKVKLIKQELDKYKNAVTELQLLMQSTPAANNRARRELPRFMNYTLNNTKNTNVTLSKKRKRRFLGFLLGVGSAIASGIAVSKVLHLEGEVNKIKSALLSTNKAVVSLSNGVSVLTSKVLDLKNYIDKQLLPIVNKQSCSISNIETVIEFQQKNNRLLEITREFSVNAGVTTPVSTYMLTNSELLSLINDMPITNDQKKLMSNNVQIVRQQSYSIMSIIKEEVLAYVVQLPLYGVIDTPCWKLHTSPLCTTNTKEGSNICLTRTDRGWYCDNAGSVSFFPQAETCKVQSNRVFCDTMNSLTLPSEVNLCNIDIFNPKYDCKIMTSKTDVSSSVITSLGAIVSCYGKTKCTASNKNRGIIKTFSNGCDYVSNKGVDTVSVGNTLYYVNKQEGKSLYVKGEPIINFYDPLVFPSDEFDASISQVNEKINQSLAFIRKSDELLHNVNAGKSTTNIMITTIIIVIIVILLSLIVVGLLLYCKAR

SEQ ID NO: 9453 - protein, 553 aa, Artificial Sequence
  derived and/or modified protein sequence (wt) from HRSV__AGG39553.1__F-del
MELLIHRSSAIFLTLAINALYLTSSQNITEEFYQSTCSAVSRGYFSALRTGWYTSVITIELSNIKETKCNGTDTKVKLIKQELDKYKNAVTELQLLMQNTPAANNRARREAPQYMNYTVNTTKNLNVSISKKRKRRFLGFLLGVGSAIASGIAVSKVLHLEGEVNKIKNALLSTNKAVVSLSNGVSVLTSKVLDLKNYINNQLLPIVNQQSCRISNIETVIEFQQKNSRLLEITREFSVNAGVTTPLSTYMLTNSELLSLINDMPITNDQKKLMSSNVQIVRQQSYSIMSIIKEEVLAYVVQLPIYGVIDTPCWKLHTSPLCTTNIKEGSNICLTRTDRGWYCDNAGSVSFFPQADTCKVQSNRVFCDTMNSLTLPSEVSLCNTDIFNSKYDCKIMTSKTDISSSVITSLGAIVSCYGKTKCTASNKNRGIIKTFSNGCDYVSNKGVDTVSVGNTLYYVNKLEGKNLYVKGEPIINYYDPLVFPSDEFDASISQVNEKINQSLAFIRRSDELLHNVNTGKSTTNIMITTIIIVIIVVLLSLIAIGLLLYCKAK

SEQ ID NO: 9454 - protein, 553 aa, Artificial Sequence
  derived and/or modified protein sequence (wt) from HRSV__AGG39469.1__F-del
MELPILKTNAITTILAAATLCFASSQNITEEFYQSTCSAVSKGYLSALRTGWYTSVITIELSNIKENKCNGTDAKVKLIKQELDKYKNAVTELQLLMQSTPAANNRARRELPRFMNYTLNNTKNTNVTLSKKRKRRFLGFLLGVGSAIASGIAVSKVLHLEGEVNKIKSALLSTNKAVVSLSNGVSVLTSKVLDLKNYIDKQLLPIVNKQSCSISNIETVIEFQQKNNRLLEITREFSVNAGVTTPVSTYMLTNSELLSLINDMPITNDQKKLMSNNVQIVRQQSYSIMSIIKEEVLAYVVQLPLYGVIDTPCWKLHTSPLCTTNTKEGSNICLTRTDRGWYCDNAGSVSFFPQAETCKVQSNRVFCDTMNSLTLPSEVNLCNIDIFNPKYDCKIMTSKTDVSSSVITSLGAIVSCYGKTKCTASNKNRGIIKTFSNGCDYVSNKGVDTVSVGNTLYYVNKQEGKSLYVKGEPIINFYDPLVFPSDEFDASISQVNEKINQSLAFIRKSDELLHNVNVGKSTTNIMITTIIIVIIVILLSLIAVGLLLYCKAR

SEQ ID NO: 9455 - protein, 553 aa, Artificial Sequence
  derived and/or modified protein sequence (wt) from HRSV__AJZ70144.1__F-del
MELPILKTNAITTILAAVTLCFASSQNITEEFYQSTCSAVSKGYLSALRTGWYTSVITIELSNIKENKCNGTDAKVKLIKQELDKYKNAVTELQLLMQSTPAANSRARRELPRFMNYTLNNTKNTNVTSSKKRKRRFLGFLLGVGSAIASGVAVSKVLHLEGEVNKIKSALLSTNKAVVSLSNGVSVLTSKVLDLKNYIDKQLLPIVNKQSCSISNIETVIEFQQKNNRLLEITREFSVNAGVTTPVSTYMLTNSELLSLINDMPITNDQKKLMSSNVQIVRQQSYSIMSIIKEEVLAYVVQLPLYGVIDTPCWKLHTSPLCTTNTKEGSNICLTRTDRGWYCDNAGSVSFFPQAETCKVQSNRVFCDTMNSLTLPSEVNLCNIDIFNPKYDCKIMTSKTDVSSSVITSLGAIVSCYGKTKCTASNKNRGIIKTFSNGCDYVSNKGVDTVSVGNTLYYVNKQEGKSLYVKGEPIINFYDPLVFPSDEFDASISQVNEKINQSLAFIRKSDELLHNVNAGKSTTNIMITTIIIVIIVILLALIAVGLLLYCKAR

SEQ ID NO: 9456 - protein, 553 aa, Artificial Sequence
  derived and/or modified protein sequence (wt) from HRSV__AJZ70166.1__F-del
MELPILKTNAITTILAAVTLCFASSQNITEEFYQSTCSAVSKGYLSALRTGWYTSVITIELSNIKENKCNGTDAKVKLIKQELDKYKNAVTELQLLMQSTPAANNRARRELPRFMNYTLNNTKNTNVTLSKKRKRRFLGFLLGVGSAIASGVAVSKVLHLEGEVNKIKSALLSTNKAVVSLSNGVSVLTSKVLDLKNYIDKQLLPIVNKQSCSISNIETVIEFQQKNNRLLEITREFSVNAGVTTPVSTYMLTNSELLSLINDMPITNDQKKLMSSNVQIVRQQSYSIMSIIKEEVLAYVVQLPLYGVIDTPCWKLHTSPLCTTNTKEGSNICLTRTDRGWYCDNAGSVSFFPQAETCKVQSNRVFCDTMNSLTLPSEVNLCNIDIFNPKYDCKIMTSKTDVSSSVITSLGAIVSCYGKTKCTASNKNRGIIKTFSNGCDYVSNKGVDTVSVGNTLYYVNKQEGKSLYVKGEPIINFYDPLVFPSDEFDASISQVNEKINQSLAFIRKSDELLHNVNAGKSTTNIMITTIIIVIIVILLALIAVGLLLYCKAR

SEQ ID NO: 9457 - protein, 553 aa, Artificial Sequence
  derived and/or modified protein sequence (wt) from HRSV__AJZ70155.1__F-del
MELPILKTNAITTILAAVTICFASSQNITEEFYQSTCSAVSKGYLSALRTGWYTSVITIELSNIKENKCNGTDAKVKLIKQELDKYKNAVTELQLLMQSTPAANSRARRELPRFMNYTLNNTKNTNVTLSKKRKRRFLGFLLGVGSAIASGVAVSKVLHLEGEVNKIKSALLSTNKAVVSLSNGVSVLTSKVLDLKNYIDKQLLPIVNKQSCSISNIETVIEFQQKNNRLLEITREFSVNAGVTTPVSTYMLTNSELLSLINDMPITNDQKKLMSSNVQIVRQQSYSIMSIIKEEVLAYVVQLPLYGVIDTPCWKLHTSPLCTTNTKEGSNICLTRTDRGWYCDNAGSVSFFPQAETCKVQSNRVFCDTMNSLTLPSEVNLCNIDIFNPKYDCKIMTSKTDVSSSVITSLGAIVSCYGKTKCTASNKNRGIIKTFSNGCDYVSNKGVDTVSVGNTLYYVNKQEGKSLYVKGEPIINFYDPLVFPSDEFDASISQVNEKINQSLAFIRKSDELLHNVNAGKSTTNIMITTIIIVIIVILLALIAVGLLLYCKAR

SEQ ID NO: 9458 - protein, 553 aa, Artificial Sequence
  derived and/or modified protein sequence (wt) from HRSV__AJZ70133.1__F-del
MELPILKTNAITTILAAVTLCFASSQNITEEFYQSTCSAVSKGYLSALRTGWYTSVITIELSNIKENKCNGTDAKVKLIKQELDKYKNAVTELQLLMQSTPAANSRTRRELPRFMNYTLNNTKNTNVTLSKKRKRRFLGFLLGVGSAIASGVAVSKVLHLEGEVNKIKSALLSTNKAVVSLSNGVSVLTSKVLDLKNYIDKQLLPIVNKQSCSISNIETVIEFQQKNNRLLEITREFSVNAGVTTPVSTYMLTNSELLSLINDMPITNDQKKLMSSNVQIVRQQSYSIMSIIKEEVLAYVVQLPLYGVIDTPCWKLHTSPLCTTNTKEGSNICLTRTDRGWYCDNAGSVSFFPQAETCKVQSNRVFCDTMNSLTLPSEVNLCNIDIFNPKYDCKIMTSKTDVSSSVITSLGAIVSCYGKTKCTASNKNRGIIKTFSNGCDYVSNKGVDTVSVGNTLYYVNKQEGKSLYVKGEPIINFYDPLVFPSDEFDASISQVNEKINQSLAFIRKSDELLHNVNAGKSTTNIMITTIIIVIIVILLALIAVGLLLYCKAR

SEQ ID NO: 9459 - protein, 553 aa, Artificial Sequence
  derived and/or modified protein sequence (wt) from HRSV__AJZ70067.1__F-del
MELPILKTNAITTILAAVTLCFASSQNITEEFYQSTCSAVSKGYLSALRTGWYTSVITIELSNIKENKCNGTDAKVKLIKQELDKYKNAVTELQLLMQSTPAANSRARRELPRFMNYTLNNTKNTNVTLSKKRKRRFLGFLLGVGSAIASGVAVSKVLHLEGEVNKIKSALLSTNKAVVSLSNGVSVLTSKVLDLKNYIDKQLLPIVNKQSCSISNIETVIEFQQKNNRLLEITREFSVNAGVTTPVSTYMLTNSELLSLINDMPITNDQKKLMSNNVQIVRQQSYSIMSIIKEEVLAYVVQLPLYGVIDTPCWKLHTSPLCTTNTKEGSNICLTRTDRGWYCDNAGSVSFFPQAETCKVQSNRVFCDTMNSLTLPSEVNLCNIDIFNPKYDCKIMTSKTDVSSSVITSLGAIVSCYGKTKCTASNKNRGIIKTFSNGCDYVSNKGVDTVSVGNTLYYVNKQEGKSLYVKGEPIINFYDPLVFPSDEFDASISQVNEKINQSLAFIRKSDELLHNVNAGKSTTNIMITTIIIVIIVILLSLIAVGLLLYCKAR

SEQ ID NO: 9460 - protein, 553 aa, Artificial Sequence
  derived and/or modified protein sequence (wt) from HRSV__AJZ69946.1__F-del
MELPILKTNAITTILAAVTLCFASSQNITEEFYQSTCSAVSKGYLSALRTGWYTSVITIELSNIKENKCNGTDAKVKLIKQELDKYKNAVTELQLLMQSTPAANSRARRELPRFMNYTLNNTKNTNVTLSKKRKRRFLGFLLGVGSAIASGVAVSKVLHLEGEVNKIKSALLSTNKAVVSLSNGVSVLTSKVLDLKNYIDKQLLPIVNKQSCSISNIETVIEFQQKNNRLLEITREFSVNAGVTTPVSTYMLTNSELLSLINDMPITNDQKKLMSSNVQIVRQQSYSIMSIIKEEVLAYVVQLPLYGVIDTPCWKLHTSPLCTTNTKEGSNICLTRTDRGWYCDNAGSVSFFPQAETCKVQSNRVFCDTMNSLTLPSEVNLCNIDIFNSKYDCKIMTSKTDVSSSVITSLGAIVSCYGKTKCTASNKNRGIIKTFSNGCDYVSNKGVDTVSVGNTLYYVNKQEGKSLYVKGEPIINFYDPLVFPSDEFDASISQVNEKINQSLAFIRKSDELLHNVNAGKSTTNIMITTIIIVIIVILLALIAVGLLLYCKAR

SEQ ID NO: 9461 - protein, 553 aa, Artificial Sequence
  derived and/or modified protein sequence (wt) from HRSV__AJZ69913.1__F-del
MELPILNTNAITTILAAVTLCFTSSQNITEEFYQSTCSAVSKGYLSALRTGWYTSVITIELSNIKENKCNGTDAKVKLIKQELDKYKNAVTELQLLMQSTPAANSRARRELPRFMNYTLNNTKNTNVTLSKKRKRRFLGFLLGVGSAIASGVAVSKVLHLEGEVNKIKSALLSTNKAVVSLSNGVSVLTSKVLDLKNYIDKQLLPIVNKQSCSISNIETVIEFQQKNNRLLEITREFSVNAGVTTPVSTYMLTNSELLSLINDMPITNDQKKLMSNNVQIVRQQSYSIMSIIKEEVLAYVVQLPLYGVIDTPCWKLHTSPLCTTNTKEGSNICLTRTDRGWYCDNAGSVSFFPQAETCKVQSNRVFCDTMNSLTLPSEVNLCNIDIFNPKYDCKIMTSKTDVSSSVITSLGAIVSCYGKTKCTASNKNRGIIKTFSNGCDYVSNKGVDTVSVGNTLYYVNKQEGKSLYVKGEPIINFYDPLVFPSDEFDASISQVNEKINQSLAFIRKSDELLHNVNAGKSTTNIMITTIIIVIIVILLSLIAVGLLLYCKAR

SEQ ID NO: 9462 - protein, 553 aa, Artificial Sequence
  derived and/or modified protein sequence (wt) from HRSV__AJZ69880.1__F-del
MELPILKTNAITTILAAVTLCFASSQNITEEFYQSTCSAVSKGYLSALRTGWYTSVITIELSNIKENKCNGTDAKVKLIKQELDKYKNAVTELQLLMQSTPAANSRARRELPRFMNYTPNNTKNTNVTLSKKRKRRFLGFLLGVGSAIASGVAVSKVLHLEGEVNKIKSALLSTNKAVVSLSNGVSVLTSKVLDLKNYIDKQLLPIVNKQSCSISNIETVIEFQQKNNRLLEITREFSVNAGVTTPVSTYMLTNSELLSLINDMPITNDQKKLMSSNVQIVRQQSYSIMSIIKEEVLAYVVQLPLYGVIDTPCWKLHTSPLCTTNTKEGSNICLTRTDRGWYCDNAGSVSFFPQAETCKVQSNRVFCDTMNSLTLPSEVNLCNIDIFNPKYDCKIMTSKTDVSSSVITSLGAIVSCYGKTKCTASNKNRGIIKTFSNGCDYVSNKGVDTVSVGNTLYYVNKQEGKSLYVKGEPIINFYDPLVFPSDEFDASISQVNEKINQSLAFIRKSDELLHNVNAGKSTTNIMITTIIIVIIVILLALIAVGLLLYCKAR

SEQ ID NO: 9463 - protein, 553 aa, Artificial Sequence
  derived and/or modified protein sequence (wt) from HRSV__AJZ69847.1__F-del
MELPILKTNAITTILAAVTLCFASSQNITEEFYQSTCSAVSKGYLSALRTGWYTSVITIELSNIKENKCNGTDAKVKLIKQELDKYKNAVTELQLLMQSTPAANSRARRELPRFMNYTLNNTKNTNVTLSKKRKRRFLGFLLGVGSAIASGVAVSKVLHLEGEVNKIKSALLSTNKAVVSLSNGVSVLTSKVLDLKNYIDKQLLPIVNKQSCSISNIETVIEFQQKNNRLLEITREFSVNAGVTTPVSTYMLTNSELLSLINDMPITNDQKKLMSSNVQIVRQQSYSIMSIIKEEVLAYVVQLPLYGVIDTPCWKLHTSPLCTTNTKEGSNICLTRTDRGWYCDNAGSVSFFPQAETCKVQSNRVFCDTMNSLTLPSEVNLCNIDIFNPKYDCKIMTSKTDVSSSVITSLGAIVSCYGKTKCTASNKNRGIIKTFSNGCDYVSNKGVDTVSVGNTLYYVNKQEGKSLYVKGEPIINFYDPLVFPSDEFDASISQVNEKINQSLAFIRKSDELLHNVNAGKSTTNIMITTIIIVIIVILLALIAVGLLLYCKAR

SEQ ID NO: 9464 - protein, 553 aa, Artificial Sequence
  derived and/or modified protein sequence (wt) from HRSV__AJZ69869.1__F-del
MELPILKTNAITTIFAAVTLCFASSQNITEEFYQSTCSAVSKGYLSALRTGWYTSVITIELSNIKENKCNGTDAKVKLIKQELDKYKNAVTELQLLMQSTPAANNRARRELPRFMNYTLNNTKNNNVTLSKKRKRRFLGFLLGVGSAIASGVAVSKVLHLEGEVNKIKSALLSTNKAVVSLSNGVSVLTSKVLDLKNYIDKQLLPIVNKQSCSISNIETVIEFQQKNNRLLEITREFSVNAGVTTPVSTYMLTNSELLSLINDMPITNDQKKLMSNNVQIVRQQSYSIMSIIKEEVLAYVVQLPLYGVIDTPCWKLHTSPLCTTNTKEGSNICLTRTDRGWYCDNAGSVSFFPQAETCKVQSNRVFCDTMNSLTLPSEVNLCNIDIFNPKYDCKIMTSKTDVSSSVITSLGAIVSCYGKTKCTASNKNRGIIKTFSNGCDYVSNKGVDTVSVGNTLYYVNKQEGKSLYVKGEPIINFYDPLVFPSDEFDASISQVNEKINQSLAFIRKSDELLHNVNVGKSTTNIMITTIIIVIIVILLLLIAVGLFLYCKAR

SEQ ID NO: 9465 - protein, 553 aa, Artificial Sequence
  derived and/or modified protein sequence (wt) from HRSV__AJO16077.1__F-del
MELLIHRSSAIFLTLAINALYLTSSQNITEEFYQSTCSAVSRGYLSALRTGWYTSVITIELSNIKETKCNGTDTKVKLIKQELDKYKNAVTELQLLMQNTPAVNNRARREAPQYMNYTINITKNLNVSISKKRKRRFLGFLLGVGSAIASGIAVSKVLHLEGEVNKIKNALQSTNKAVVSLSNGVSVLTSKVLDLKNYINNQLLPIVNQQSCRISNIETVIEFQQKNSRLLEITREFSVNAGVTTPLSTYMLTNSELLSLINDMPITNDQKKLMSSNVQIVRQQSYSIMSIIKEEVLAYVVQLPIYGVIDTPCWKLHTSPLCTTNIKEGSNICLTRTDRGWYCDNAGSVSFFPQADTCKVQSNRVFCDTMNSLTLPSEVSLCNTDIFNSKYDCKIMTSKTDISSSVITSLGAIVSCYGKTKCTASNKNRGIIKTFSNGCDYVSNKGVDTVSVGNTLYYVNKLEGKNLYVKGEPIINYYDPLVFPSDEFDASISQVNEKINQSLAFIRRSDELLHNVNTGKSTTNIMITAIIIVIIVVLLSLIAIGLLLYCKAK

SEQ ID NO: 9466 - protein, 553 aa, Artificial Sequence
  derived and/or modified protein sequence (wt) from HRSV__AJO16055.1__F-del
MELPILKTNAITTILAAVTLCFASSQNITEEFYQSTCSAVSKGYLSALRTGWYTSVITIELSNIKENKCNGTDAKVKLIKQELDKYKNAVTELQLLMQSTPAANSRARRELPRFMNHTLNNTKNTNVTLSKKRKRRFLGFLLGVGSAIASGIAVSKVLHLEGEVNKIKSALLSTNKAVVSLSNGVSVLTSKVLDLKNYIDKQLLPIVNKQSCSISNIETVIEFQQKNNRLLEITREFSVNAGVTTPVSTYMLTNSELLSLINDMPITNDQKKLMSSNVQIVRQQSYSIMSIIKEEVLAYVVQLPLYGVIDTPCWKLHTSPLCTTNTKEGSNICLTRTDRGWYCDNAGSVSFFPQAETCKVQSNRVFCDTMNSLTLPSEVNLCNIDIFNPKYDCKIMTSKTDVSSSVITSLGAIVSCYGKTKCTASNKNRGIIKTFSNGCDYVSNKGVDTVSVGNTLYYVNKHEGKSLYVKGEPIINFYDPLVFPSDEFDASISQVNEKINQSLAFIRKSDELLHNVNAGKSTTNIMITTIIIVIIVILLALIAVGLLLYCKAR

SEQ ID NO: 9467 - protein, 553 aa, Artificial Sequence
  derived and/or modified protein sequence (wt) from HRSV__AKE31881.1__F-del
MELLIHRSNAIFLTLAINALYLTSSQNITEEFYQSTCSAVSRGYFSALRTGWYTSVITIELSNIKETKCNGTDTKVKLMKQELDKYKNAVTELQLLMQNTPAANNRARREAPQYMNYTINTTKNLNVSISKKRKRRFLGFLLGVGSAIASGIAVSKVLHLEGEVNKIKNALLSTNKAVVSLSNGVSVLTSKVLDLKNYINNQLLPIVNQQSCRISNIETVIEFQQKNSRLLEITREFSVNAGVTTPLSTYMLTNSELLSLINDMPITNDQKKLMSSNVQIVRQQSYSIMSIIKEEVLAYVVQLPIYGVIDTPCWKLHTSPLCTTNIKEGSNICLTRTDRGWYCDNAGSVSFFPQADTCKVQSNRVFCDTMNSLTLPSEVSLCNTDIFNSKYDCKIMTSKTDISSSVITSLGAIVSCYGKTKCTASNKNRGIIKTFSNGCDYVSNKGVDTVSVGNTLYYVNKLEGKNLYVKGEPIINYYDPLVFPSDEFDASISQVNEKINQSLAFIRRSDELLHNVNAGKSTTNIMITAIIIVIIVVLLSLIAIGLLLYCKAK

SEQ ID NO: 9468 - protein, 553 aa, Artificial Sequence
  derived and/or modified protein sequence (wt) from HRSV__AKE31882.1__F-del
MELLVHRSSAIFLTLAINALYLTSSQNITEEFYQSTCSAVSRGYFSALRTGWYTSVITIELSNIKETKCNGTDTKVKLIKQELDKYKNAVTELQLLMQNTPAANNRARREAPQYMNYTINTTKNLNVSISKKRKRRFLGFLLGVGSAIASGIAVSKVLHLEGEVNKIKNALLSTNKAVVSLSNGVSVLTSKVLDLKNYINNQLLPIVNQQSCRISNIETVIEFQQKNSRLLEITREFSVNAGVTTPLSTYMLTNSELLSLINDMPITNDQKKLMSSNVQIVRQQSYSIMSIIKEEVLAYVVQLPIYGVIDTPCWKLHTSPLCTTNIKEGSNICLTRTDRGWYCDNAGSVSFFPQADTCKVQSNRVFCDTMNSLTLPSEVSLCNTDIFNSKYDCKIMTSKTDISSSVITSLGAIVSCYGKTKCTASNKNRGIIKTFSNGCDYVSNKGVDTVSVGNTLYYVNKLEGKNLYVKGEPIINYYDPLVFPSDEFDASISQVNEKINQSLAFIRRSDELLHNVNTGKSTTNIMITVIIIVIIVVLLSLIAIGLLLYCKAK

SEQ ID NO: 9469 - protein, 553 aa, Artificial Sequence
  derived and/or modified protein sequence (wt) from HRSV__AKE31878.1__F-del
MELLIHRSSAIFLTLAINALYLTSSQNITEEFYQSTCSAVSRGYFSALRTGWYTSVITIELSNIQETKCNGTDTKVKLIKQELDKYKNAVTELQLLMQNTPAANNRARREAPQYMNHTINTTKNLNVSISKKRKRRFLGFLLGVGSAIASGIAVSKVLHLEGEVNKIKNALLSTNKAVVSLSNGVSVLTSKVLDLKNYINNQLLPIVNQQNCRISNIETVIEFQQKNSRLLEITREFSVNAGVTTPLSTYMLTNSELLSLINDMPITNDQKKLMSSNVQIVRQQSYSIMSIIKEEVLAYVVQLPIYGVIDTPCWKLHTSPLCTTNIKEGSNICLTRTDRGWYCDNAGSVSFFPQADTCKVQSNRVFCDTMNSLTLPSEVSLCNTDIFNSKYDCKIMTSKTDISSSVITSLGAIVSCYGKTKCTASNKNRGIIKTFSNGCDYVSNKGVDTVSVGNTLYYVNKLEGKNLYVKGEPIINYYDPLVFPSDEFDASISQVNEKINQSLAFIRRSDELLHNVNTGKSTTNIMITAIIIVIIVVLLSLIAIGLLLYCKAK

SEQ ID NO: 9470 - protein, 553 aa, Artificial Sequence
  derived and/or modified protein sequence (wt) from HRSV__AJF44835.1__F-del
MDLPILKTNAITTIFAAVLLCFASSQNITEEFYQSTCSAVSKGYLSALRTGWYTSVITIELSNIKENKCNGTDAKVKLIKQELDKYKNAVTELQLLMQSTPAANNRARRELPRFMNYTLNNNKNNNVTLSKKRKRRFLGFLLGVGSAIASGIAVSKVLHLEGEVNKIKSALLSTNKAVVSLSNGVSVLTSKVLDLKNYIDKQLLPIVNKQSCSISNIETVIEFQQKNNRLLEITREFSVNAGVTTPVSTYMLTNSELLSLINDMPITNDQKKLMSNNVQIVRQQSYSIMSIIKEEVLAYVVQLPLYGVIDTPCWKLHTSPLCTTNTKEGSNICLTRTDRGWYCDNAGSVSFFPQAETCKVQSNRVFCDTMNSLTLPSEVNLCNIDIFNPKYDCKIMTSKTDVSSSVITSLGAIVSCYGKTKCTASNKNRGIIKTFSNGCDYVSNKGVDTVSVGNTLYYVNKQEGKSLYVKGEPIINFYDPLVFPSDEFDASISQVNEKINQSLAFIRKSDELLHNVNVGKSTTNIMITTIIIVIIVILLLLIAVGLFLYCKAR

SEQ ID NO: 9471 - protein, 553 aa, Artificial Sequence
  derived and/or modified protein sequence (wt) from HRSV__AJF44790.1__F-del
MELSILKTNAITTILAAVTLCFASSQNITEEFYQSTCSAVSKGYLSALRTGWYTSVITIELSNIKENKCNGTDAKVKLIKQELDKYKNAVTELQLLMQSTPAANSRARRELPRFMDYTLNNTKNTNVTLSKKRKRRFLGFLLGVGSAIASGIAVSKVLHLEGEVNKIKSALLSTNKAVVSLSNGVSVLTSKVLDLKNYIDKQLLPIVNKQSCSISNIETVIEFQQKNNRLLEITREFSVNAGVTTPVSTYMLTNSELLSLINDMPITNDQKKLMSSNVQIVRQQSYSIMSIIKEEVLAYVVQLPLYGVIDTPCWKLHTSPLCTTNTKEGSNICLTRTDRGWYCDNAGSVSFFPQAETCKVQSNRVFCDTMNSLTLPSEVNLCNIDIFNPKYDCKIMTSKTDVSSSVITSLGAIVSCYGKTKCTASNKNRGIIKTFSNGCDYVSNKGVDTVSVGNTLYYVNKQEGKSLYVKGEPIINFYDPLVFPSDEFDASISQVNEKINQSLAFIRKSDELLHNVNAGKSTTNIMITTIIIVIIVILLALIAVGLLLYCKAR

SEQ ID NO: 9472 - protein, 553 aa, Artificial Sequence
  derived and/or modified protein sequence (wt) from HRSV__AJF44737.1__F-del
MELPILKTNVITTILTAVTLCFASSQNITEEFYQSTCSAVSKGYLSALRTGWYTSVITIELSNIKENKCNGTDAKVKLIKQELDKYKNAVTELQLLMQSTPAANNRARRELPRFMNYTLNNTKYTNVTLSKKRKRRFLGFLLGVGSAIASGIAVSKVLHLEGEVNKIKSALLSTNKAVVSLSNGVSVLTSKVLDLKNYIDKQLLPIVNKQSCSISNIETVIEFQQKNNRLLEITREFSVNAGVTTPVSTYMLTNSELLSLINDMPITNDQKKLMSNNVQIVRQQSYSIMSIIKEEVLAYVVQLPLYGVIDTPCWKLHTSPLCTTNTKEGSNICLTRTDRGWYCDNAGSVSFFPQAETCKVQSNRVFCDTMNSLTLPSEVNLCNIDIFNPKYDCKIMTSKTDVSSSVITSLGAIVSCYGKTKCTASNKNRGIIKTFSNGCDYVSNKGVDTVSVGNTLYYVNKQEGKSLYVKGEPIINFYDPLVFPSDEFDASISQVNEKINQSLAFIRKSDELLHNVNAGKSTTNIMITTIIIVIVVILLSLIAVGLLLYCKAR

SEQ ID NO: 9473 - protein, 553 aa, Artificial Sequence
  derived and/or modified protein sequence (wt) from HRSV__AJF44716.1__F-del
MELLIHRSSAIFLTLAINALYLASSQNITEEFYQSTCSAVSRGYLSALRTGWYTSVITIELSNIKETKCNGTDTKVKLIKQELDKYKNAVTELQLLMQNTPAANNRARREAPQYMNYTINTTKNLNVSISKKRKRRFLGFLLGVGSAIASGIAVSKVLHLEGEVNKIKNALLSTNKAVVSLSNGVSVLTSKVLDLKNYINNQLLPIVNQQSCRISNIETVIEFQQKNSRLLEITREFSVNAGVTTPLSTYMLTNSELLSLINDMPITNDQKKLMSSNVQIVRQQSYSIMSIIKEEVLAYVVQLPIYGVIDTPCWKLHTSPLCTTNIKEGSNICLTRTDRGWYCDNAGSVSFFPQADTCKVQSNRVFCDTMNSLTLPSEVSLCNTDIFNSKYDCKIMTSKTDISSSVITSLGAIVSCYGKTKCTASNKNRGIIKTFSNGCDYVSNKGVDTVSVGNTLYYVNKLEGKNLYVKGEPIINYYDPLVFPSDEFDASISQVNEKINQSLAFIRRSDELLHNVNTGKSTTNIMITAIIIVIIVVLLSLVAIGLLLYCKAK

SEQ ID NO: 9474 - protein, 553 aa, Artificial Sequence
  derived and/or modified protein sequence (wt) from HRSV__AJF44725.1__F-del
MELPILKTNVITTILAAVTLCFASSQNITEEFYQSTCSAVSKGYLSALRTGWYTSVITIELSNIKENKCNGTDAKVKLIKQELDKYKNAVTELQLLMQSTPAANNRARRELPRFMNYTLNNTKYTNVTLSKKRKRRFLGFLLGVGSAIASGIAVSKVLHLEGEVNKIKSALLSTNKAVVSLSNGVSVLTSKVLDLKNYIDKQLLPIVNKQSCSISNIETVIEFQQKNNRLLEITREFSVNAGVTTPVSTYMLTNSELLSLINDMPITNDQKKLMSNNVQIVRQQSYSIMSIIKEEVLAYVVQLPLYGVIDTPCWKLHTSPLCTTNTKEGSNICLTRTDRGWYCDNAGSVSFFPQAETCKVQSNRVFCDTMNSLTLPSEVNLCNIDIFNPKYDCKIMTSKTDVSSSVITSLGAIVSCYGKTKCTASNKNRGIIKTFSNGCDYVSNKGVDTVSVGNTLYYVNKQEGKSLYVKGEPIINFYDPLVFPSDEFDASISQVNEKINQSLAFIRKSDELLHNVNAGKSTTNIMITTIIIVIVVILLSLIAVGLLLYCKAR

SEQ ID NO: 9475 - protein, 553 aa, Artificial Sequence
  derived and/or modified protein sequence (wt) from HRSV__AJF44643.1__F-del
MELLIHRSSAIFLTLAINALYLASSQNITEEFYQSTCSAVSRGYLSALRTGWYTSVITIELSNIKETKCNGTDTKVKLIKQELDKYKNAVTELQLLMQNTPAANNRARREAPQYMNYTINTTKNLNVSISKKRKRRFLGFLLGVGSAIASGIAVSKVLHLEGEVNKIKNALLSTNKAVVSLSNGVSVLTSKVLDLKNYINNQLLPIVNQQSCRISNIETVIEFQQKNSRLLEITREFSVNAGVTTPLSTYMLTNSELLSLINDMPITNDQKKLMSSNVQIVRQQSYSIMSIIKEEVLAYVVQLPIYGVIDTPCWKLHTSPLCTTNIKEGSNICLTRTDRGWYCDNAGSVSFFPQADTCKVQSNRVFCDTMNSLTLPSEVSLCNTDIFNSKYDCKIMTSKTDISSSVITSLGAIVSCYGKTKCTASNKNRGIIKTFSNGCDYVSNKGVDTVSVGNTLYYVNKLEGKNLYVKGEPIINYYDPLVFPSDEFDASISQVNEKINQSLAFIRRSDELLHNVNTGKSTTNIMITAIIIVIIVVLLSLIAIGLLLYCKAK

SEQ ID NO: 9476 - protein, 553 aa, Artificial Sequence
  derived and/or modified protein sequence (wt) from HRSV__AJF44628.1__F-del
MELLIHRSSAIFLTLAINALYLTSSQNITEEFYQSTCSAVSRGYFSALRTGWYTSVITIELSNIKETKCNGTDTKVKLIKQELDKYKNAVTELQLLMQNTPAANNRARREAPQYMNYTINTTKNLNVSISKKRKRRFLGFLLGVGSAIASGIAVSKVLHLEGEVNKIKNALLSTNKAVVSLSNGVSVLTSKVLDLKNYINNQLLPIVNQQSCRISNIETVIEFQQKNSRLLEITREFSVNAGVTTPLSTYMLTNSELLSLINDMPITNDQKKLMSSNVQIVRQQSYSIMSIIKEEVLAYVVQLPIYGVIDTHCWKLHTSPLCTTNIKEGSNICLTRTDRGWYCDNAGSVSFFPQADTCKVQSNRVFCDTMNSLTLPSEVSLCNTDIFNSKYDCKIMTSKTDISSSVITSLGAIVSCYGKTKCTASNKNRGIIKTFSNGCDYVSNKGVDTVSVGNTLYYVNKLEGKNLYVKGEPIINYYDPLVFPSDEFDASISQVNEKINQSLAFIRRSDELLHNVNTGKSTTNIMITAIIIVIIVVLLSLIAIGLLLYCKAK

SEQ ID NO: 9477 - protein, 553 aa, Artificial Sequence
  derived and/or modified protein sequence (wt) from HRSV__AJF44624.1__F-del
MELLIHRSSAIFLTLAINALYLTSSQNITEEFYQSTCSAVSRGYFSALRTGWYTSVITIELSNIQETKCNGTDTKVKLIKQELDKYKNAVTELQLLMQNTPAINNRARREAPQYMNHTINTTKNLNVSISKKRKRRFLGFLLGVGSAIASGIAVSKVLHLEGEVNKIKNALLSTNKAVVSLSNGVSVLTSKVLDLKNYINNQLLPIVNQQSCRISNIETVIEFQQKNNRLLEITREFSVNAGVTTPLSTYMLTNSELLSLINDMPITNDQKKLMSSNVQIVRQQSYSIMSIIKEEVLAYVVQLPIYGVIDTPCWKLHTSPLCTTNIKEGSNICLTRTDRGWYCDNAGSVSFFPQADTCKVQSNRVFCDTMNSLTLPSEVSLCNTDIFNSKYDCKIMTSKTDISSSVITSLGAIVSCYGKTKCTASNKNRGIIKTFSNGCDYVSNKGVDTVSVGNTLYYVNKLEGKNLYVKGEPIINYYDPLVFPSDEFDASISQVNEKINQSLAFIRRSDELLHNVNTGKSTTNIMITAIIIVIIVVLLSLIAIGLLLYCKAK

SEQ ID NO: 9478 - protein, 553 aa, Artificial Sequence
  derived and/or modified protein sequence (wt) from HRSV__AJF44613.1__F-del
MELLIHRSSAIFLTLAINALYLTSSQNITEEFYQSTCSAVSRGYLSALRTGWYTSVITIELSNIKETKCNGTDTKVKLIKQELDKYKNAVTELQLLMQNTPAANNRARREAPQYMNYTINTTKNSNVSTIKKRKRRFLGFLLGVGSAIASGIAVSKVLHLEGEVNKIKNALLSTNKAVVSLSNGVSVLTSKVLDLKNYINNQLLPIVNQQSCRISNIETVIEFQQKNSRLLEITREFSVNAGVTTPLSTYMLTNSELLSLINDMPITNDQKKLMSSNVQIVRQQSYSIMSIIKEEVLAYVVQLPIYGVIDTPCWKLHTSPLCTTNIKEGSNICLTRTDRGWYCDNAGSVSFFPQADTCKVQSNRVFCDTMNSLTLPSEVSLCNTDIFNSKYDCKIMTSKTDISSSVITSLGAIVSCYGKTKCTASNKNRGIIKTFSNGCDYVSNKGVDTVSVGNTLYYVNKLEGKNLYVKGEPIINYYDPLVFPSDEFDASISQVNEKINQSLAFIRRSDELLHNVNTGKSTTNIMITAIIIVIIVVLLSLIAIGLLLYCKAK

SEQ ID NO: 9479 - protein, 553 aa, Artificial Sequence
  derived and/or modified protein sequence (wt) from HRSV__AJF44566.1__F-del
MELLIHRSSAIFLTLAINALYLTSSQNITEEFYQSTCSAVSRGYFSALRTGWYTSVITIELSNIQETKCNGTDTKVKLIKQELDKYKNAVTELQLLMQNTPAINNRARREAPQYMNHTINTTKNLNVSISKKRKRRFLGFLLGVGSAIASGIAVSKVLHLEGEVNKIKNALLSTNKAVVSLSNGVSVLTSKVLDLKNYINNQLLPIVNQQSCRISNIETVIEFQQKNSRLLEITREFSVNAGVTTPLSTYMLTNSELLSLINDMPITNDQKKLMSSNVQIVRQQSYSIMSIIKEEVLAYVVQLPIYGVIDTPCWKLHTSPLCTTNIKEGSNICLTRTDRGWYCDNAGSVSFFPQADTCKVQSNRVFCDTMNSLTLPSEVSLCNTDIFNSKYDCKIMTSKTDISSSVITSLGAIVSCYGKTKCTASNKNRGIIKTFSNGCDYVSNKGVDTVSVGNTLYYVNKLEGKNLYVKGEPIINYYDPLVFPSDEFDASISQVNEKINQSLAFIRRSDELLHNVNTGKSTTNIMITAIIIVIIVVLLSLIAIGLLLYCKAK

SEQ ID NO: 9480 - protein, 553 aa, Artificial Sequence
  derived and/or modified protein sequence (wt) from HRSV__AJF44555.1__F-del
MELLIHRSSAIFLTLAINALYLTSSQNITEEFYQSTCSAVSRGYFSALRTGWYTSVITIELSNIQETNCNGTDTKVKLIKQELDKYKNAVTELQLLMQNTPAINNRARREAPQYMNHTINTTKNLNVSISKKRKRRFLGFLLGVGSAIASGIAVSKVLHLEGEVNKIKNALLSTNKAVVSLSNGVSVLTSKVLDLKNYINNQLLPIVNQQSCRISNIETVIEFQQKNSRLLEITREFSVNAGVTTPLSTYMLTNSELLSLINDMPITNDQKKLMSSNVQIVRQQSYSIMSIIKEEVLAYVVQLPIYGVIDTPCWKLHTSPLCTTNIKEGSNICLTRTDRGWYCDNAGSVSFFPQADTCKVQSNRVFCDTMNSLTLPSEVSLCNTDIFNSKYDCKIMTSKTDISSSVITSLGAIVSCYGKTKCTASNKNRGIIKTFSNGCDYVSNKGVDTVSVGNTLYYVNKLEGKNLYVKGEPIINYYDPLVFPSDEFDASISQVNEKINQSLAFIRRSDELLHNVNTGKSTTNIMITAIIIVIIVVLLSLIAIGLLLYCKAK

SEQ ID NO: 9481 - protein, 553 aa, Artificial Sequence
  derived and/or modified protein sequence (wt) from HRSV__AJF44526.1__F-del
MELLIHRSSAIFLTLAINALYLTSSQNITEEFYQSTCSAVSRGYFSALRTGWYTSVITIELSNIKETKCNGTDTKVRLIKQELDKYKNAVTELQLLMQNTPAANNRARREAPQYMNYTINTTKNLNVSISKKRKRRFLGFLLGVGSAIASGIAVSKVLHLEGEVNKIKNALLSTNKAVVSLSNGVSVLTSKVLDLKNYINNQLLPIVNQQSCRISNIETVIEFQQKNSRLLEITREFSVNAGVTTPLSTYMLTNSELLSLINDMPITNDQKKLMSSNVQIVRQQSYSIMSIIKEEVLAYVVQLPIYGVIDTHCWKLHTSPLCTTNIKEGSNICLTRTDRGWYCDNAGSVSFFPQADTCKVQSNRVFCDTMNSLTLPSEVSLCNTDIFNSKYDCKIMTSKTDISSSVITSLGAIVSCYGKTKCTASNKNRGIIKTFSNGCDYVSNKGVDTVSVGNTLYYVNKLEGKNLYVKGEPIINYYDPLVFPSDEFDASISQVNEKINQSLAFIRRSDELLHNVNTGKSTTNIMITAIIIVIIVVLLSLIAIGLLLYCKAK

SEQ ID NO: 9482 - protein, 553 aa, Artificial Sequence
  derived and/or modified protein sequence (wt) from HRSV__AJF44517.1__F-del
MELLIHRSSAIFLTLAINALYLTSSQNITEEFYQSTCSAVSRGYLSALRTGWYTSVITIELSNIKETKCNGTDTKVKLIKQELDKYKNAVTELQLLMQNTPAANNRARREAPQYMNYTINTTKNLNVSISKKRKRRFLGFLLGVGSAIASGIAVSKVLHLEGEVNKIKNALLSTNKAVVSLSNGVSVLTSKVLDLKNYINNQLLPIVNQQSCRISNIETVIEFQQKNSRLLEITREFSVNAGVTTPLSTYMLTNSELLSLINDMPITNDQKKLMSSNVQIVRQQSYSIMSIIKEEVLAYVVQLPIYGVIDTPCWKLHTSPLCTTNIKEGSNICLTRTDRGWYCDNAGSVSFFPQADTCKVQSNRVFCDTMNSLTLPSEVSLCNTDIFNSKYDCKIMTSKTDISSSVITSLGAIVSCYGKTKCTASNKNRGIIKTFSNGCDYVSNKGVDTVSVGNTLYYVNKLEGKNLYVKGEPIINYYDPLVFPSDEFDASISQVNEKINQSLAFIRRSDELLHNVNAGKSTTNIMITAIIIVIIVVLLSLIAIGLLLYCKAK

SEQ ID NO: 9483 - protein, 553 aa, Artificial Sequence
  derived and/or modified protein sequence (wt) from HRSV__AKA45882.1__F-del
MELPILKTNAITTILTAVTLCFASSQNITEEFYQSTCSAVSKGYLSALRTGWYTSVITIELSNIKENKCNGTDAKVKLIKQELDKYKNAVTELQLLMQSTPAANNRARRELSRFMNYTLNNTKNTNVTLSKKRKRRFLGFLLGVGSAIASGIAVSKVLHLEGEVNKIKSALLSTNKAVVSLSNGVSVLTSKVLDLKNYIDKQLLPIVNKQSCSISNIETVIEFQQKNNRLLEITREFSVNAGVTTPVSTYMLTNSELLSLINDMPITNDQKKLMSNNVQIVRQQSYSIMSIIKEEVLAYVVQLPLYGVIDTPCWKLHTSPLCTTNTKEGSNICLTRTDRGWYCDNAGSVSFFPQAETCKVQSNRVFCDTMNSLTLPNEVNLCNIDIFNPKYDCKIMTSKTDVSSSVITSLGAIVSCYGKTKCTASNKNRGIIKTFSNGCDYVSNKGVDTVSVGNTLYYVNKQEGKSLYVKGEPIINFYDPLVFPSDEFDASISQVNEKINQSLAFIRKSDELLHNVNAGKSTTNIMITTIIIVIIVILLSLIAVGLLLYCKAR

SEQ ID NO: 9484 - protein, 553 aa, Artificial Sequence
  derived and/or modified protein sequence (wt) from HRSV__AKA45849.1__F-del
MELLIHRSSAIFLTLAINALYLTSSQNITEEFYQSTCSAVSRGYFSALRTGWYTSVITIELSNIKETKCNGTDTKVKLIKQELDKYKNAVTELQLLMQNTPAANNRARREAPQYMNYTINTTKNLNVSISKKRKRRFLGFLLGVGSAIASGIAVSKVLHLEGEVNKIKNALLSTNKAVVSLSNGVSVLTSKVLDLKNYINNQLLPIVNQQSCRISNIETVIEFQQKNSRLLEITREFSVNAGVTTPLSTYMLTNSELLSLINDMPITNDQKKLMSSNAQIVRQQSYSIMSIIKEEVLAYVVQLPIYGVIDTPCWKLHTSPLCTTNIKEGSNICLTRTDRGWYCDNAGSVSFFPQADTCKVQSNRVFCDTMNSLTLPSEVSLCNTDIFNSKYDCKIMTSKTDISSSVITSLGAIVSCYGKTKCTASNKNRGIIKTFSNGCDYVSNKGVDTVSVGNTLYYVNKLEGKNLYVKGEPIINYYDPLVFPSDEFDASISQVNEKINQSLAFIRRSDELLHNVNTGKSTTNIMITAIIIVIIVVLLSLIAIGLLLYCKAK

SEQ ID NO: 9485 - protein, 553 aa, Artificial Sequence
  derived and/or modified protein sequence (wt) from HRSV__AHA83913.1__F-del
MELLIHRSSAIFLTLAINALYLTSSQNITEEFYQSTCSAVSRGYISALRTGWYTSVITIELSNIKETKCNGTDTKVKLIKQELDKYKNAVTELQLLMQNTPAANNRARREAPQYMNYTINTTKNLNVSISKKRKRRFLGFLLGVGSAIASGIAVSKVLHLEGEVNKIKNALLSTNKAVVSLSNGVSVLTSKVLDLKNYINNQLLPIVNQQSCRISNIETVIEFQQKNSRLLEITREFSVNAGVTTPLSTYMLTNSELLSLINDMPITNDQKKLMSSNVQIVRQQSYSIMSIIKEEVLAYVVQLPIYGVIDTPCWKLHTSPLCTTNIKEGSNICLTRTDRGWYCDNAGSVSFFPQADTCKVQSNRVFCDTMNSLTLPSEVSLCNTDIFNSKYDCKIMTSKTDISSSVITSLGAIVSCYGKTKCTASNKNRGIIKTFSNGCDYVSNKGVDTVSVGNTLYYVNKLEGKNLYVKGEPIINYYDPLVFPSDEFDASISQVNEKINQSLAFIRRSDELLHNVNTGKSTTNIMITAIIIVIIVVLLSLIAIGLLLYCKAK

SEQ ID NO: 9486 - protein, 553 aa, Artificial Sequence
  derived and/or modified protein sequence (wt) from HRSV__AGN28715.1__F-del
MELLIHRSSAILLTLAINALYLTSSQNITEEFYQSTCSAVSRGYFSALRTGWYTSVITIELSNIKETKCNGTDTKVKLIKQELDKYKNAVTELQLLMQNTPAANNRARREAPQYMNYTINTTKNLNVSISKKRKRRFLGFLLGVGSAIASGIAVSKVLHLEGEVNKIKNALLSTNKAVVSLSNGVSVLTSKVLDLKNYINNQLLPIVNQQSCRISNIETVIEFQQKNSRLLEITREFSVNAGVTTPLSTYMLTNSELLSLINDMPITNDQKKLMSSNVQIVRQQSYSIMSIIKEEVLAYVVQLPIYGVIDTPCWKLHTSPLCTTNIKEGSNICLTRTDRGWYCDNAGSVSFFPQADTCKVQSNRVFCDTMNSLTLPSEVSLCNTDIFNSKYDCKIMTSKTDISSSVITSLGAIVSCYGKTKCTASNKNRGIIKTFSNGCDYVSNKGVDTVSVGNTLYYVNKLEGKNLYVKGEPIINYYDPLVFPSDEFDASISQVNEKINQSLAFIRRSDELLHNVNTGKSTTNIMITAIIIVIIVVLLSLIAIGLLLYCKAK

SEQ ID NO: 9487 - protein, 553 aa, Artificial Sequence
  derived and/or modified protein sequence (wt) from HRSV__AHA83902.1__F-del
MELLIHRSSAIFLTLAINALYLTSSQNITEEFYQSTCSAVSRGYISALRTGWYTSVITIELSNIKETKCNGTDTKVKLIKQELDKYKNAVTELQLLMQNTPAANNRARREAPQYMNYTINTTKNLNVSISKKRKRRFLGFLLGVGSAIASGIAVSKVLHLEGEVNKIKNALLSTNKAVVSLSNGVSVLTSKVLDLKNYINNQLLPIVNQQSCRISNIETVIEFQQKNSRLLEITREFSVNAGVTTPLSTYMLTNSELLSLINDMPITNDQKKLMSSNVQIVRQQSYSIMSIIKEEVLAYVVQLPIYGVIDTPCWKLHTSPLCTTNIKEGSNICLTRTDRGWYCDNAGSVSFFPQADTCKVQSNRVFCDTMNSLTLPSEVSLCNTDIFNSKYDCKIMTSKTDISSSVITSLGAIVSCYGKTKCTASNKNRGIIKTFSNGCDYVSNKGVDTVSVGNTLYYVNKLEGKNLYVKGEPIINYYDPLMFPSDEFDASISQVNEKINQSLAFIRRSDELLHNVNTGKSTTNIMITAIIIVIIVVLLSLIAIGLLLYCKAK

SEQ ID NO: 9488 - protein, 553 aa, Artificial Sequence
  derived and/or modified protein sequence (wt) from HRSV__AHA83837.1__F-del
MDLPILKTNAITAILAAVSLCFASSQNITEEFYQSTCSAVSKGYLSALRTGWYTSVITIELSNIKENKCNGTDAKVKLIKQELDKYKNAVTELQLLMQSTPAANNRARRELPRFMNYTLNNTKNNNVTLSKKRKRRFLGFLLGVGSAIASGIAVSKVLHLEGEVNKIKSALLSTNKAVVSLSNGVSVLTSKVLDLKNYIDKQLLPIVNKQSCSISNIETVIEFQQKNNRLLEITREFSVNAGVTTPVSTYMLTNSELLSLINDMPITNDQKKLMSNNVQIVRQQSYSIMSIIKEEVLAYVVQLPLYGVIDTPCWKLHTSPLCTTNTKEGSNICLTRTDRGWYCDNAGSVSFFPQAETCKVQSNRVFCDTMNSLTLPNEVNLCNIDIFNPKYDCKIMTSKTDVSSSVITSLGAIVSCYGKTKCTASNKNRGIIKTFSNGCDYVSNKGVDTVSVGNTLYYVNKQEGKSLYVKGEPIINFYDPLVFPSDEFDASISQVNEKINQSLAFIRKSDELLHNVNVGKSTTNIMITTIIIVIIVILLLLIAVGLFLYCKAR

SEQ ID NO: 9489 - protein, 553 aa, Artificial Sequence
  derived and/or modified protein sequence (wt) from HRSV__AHA83826.1__F-del
MDLPILKTNAITAILAAVSLCFASSQNITEEFYQSTCSAVSKGYLSALRTGWYTSVITIELSNIKENKCNGTDAKVKLIKQELDKYKNAVTELQLLMQSTPAANNRARRELPRFMNYTLNNTKNNNVTLSKKRKRRFLGFLLGVGSAIASGIAVSKVLHLEGEVNKIKSALLSTNKAVVSLSNGVSVLTSKVLDLKNYIDKQLLPIVNKQSCSISNIETVIEFQQKNNRLLEITREFSVNAGVTTPVSTYMLTNSELLSLINDMPITNDQKKLMSNNVQIVRQQSYSIMSIIKEEVLAYVVQLPLYGVIDTPCWKLHTSPLCTTNTKEGSNICLTRTDRGWYCDNAGSVSFFPQAETCKVQSNRVFCDTMNSLTLPSEVNLCNIDIFNPKYDCKIMTSKTDVSSSVITSLGAIVSCYGKTKCTASNKNRGIIKTFSNGCDYVSNKGVDTVSVGNTLYYVNKQEGKSLYVKGEPIINFYDPLVFPSDEFDASISQVNEKINQSLAFIRKSNELLHNVNVGKSTTNIMITTIIIVIIVILLLLIAVGLFLYCKAR

SEQ ID NO: 9490 - protein, 553 aa, Artificial Sequence
  derived and/or modified protein sequence (wt) from HRSV__AHA83705.1__F-del
MELLIHRSSAIFLTFAINALYLTSSQNITEEFYQSTCSAVSRGYLSALRTGWYTSVITIELSNIKETKCNGTDTKVKLIKQELDKYKNAVTELQLLMQNTPAANNRARREAPQYMNYTINTTKNLNVSISKKRKRRFLGFLLGVGSAIASGIAVSKVLHLEGEVNKIKNALLSTNKAVVSLSNGVSVLTSKVLDLKNYINNQLLPIVNQQSCRISNIETVIEFQQKNSRLLEITREFSVNAGVTTPLSTYMLTNSELLSLINDMPITNDQKKLMSSNVQIVRQQSYSIMSIIKEEVLAYVVQLPIYGVIDTPCWKLHTSPLCTTNIKEGSNICLTRTDRGWYCDNAGSVSFFPQADTCKVQSNRVFCDTMNSLTLPSEVSLCNTDIFNSKYDCKIMTSKTDISSSVITSLGAIVSCYGKTKCTASNKNRGIIKTFSNGCDYVSNKGVDTVSVGNTLYYVNKLEGKNLYVKGEPIINYYDPLVFPSDEFDASISQVNEKINQSLAFIRRSDELLHNVNTGKSTTNIMITAIIIVIIVVLLSLIAIGLLLYCNAK

SEQ ID NO: 9491 - protein, 553 aa, Artificial Sequence
  derived and/or modified protein sequence (wt) from HRSV__AHA83630.1__F-del
MELPILKTNAITTILAAVTLCFASSQNITEEFYQSTCSAVSKGYLSALRTGWYTSVITIELSNIKENKCNGTDAKVKLIKQELDKYKNAVTELQLLMQSTPAANSRARRELPRFMNYTLNNTKNTNVTLSKKRKRRFLGFLLGVGSAIASGIAVSKVLHLEGEVNKIKSALLSTNKAVVSLSNGVSVLTSKVLDLKNYIDKQLLPIVNKQSCSISNIETVIEFQQKNNRLLEITREFSVNAGVTTPVSTYMLTNSELLSLINDMPITNDQKKLMSSNVQIVRQQSYSIMSIIKEEVLAYVVQLPLYGVIDTPCWKLHTSPLCTTNTKEGSNICLTRTDRGWYCDNAGSVSFFPQAETCKVQSNRVFCDTMNSLTLPSEVNLCNIDIFNPKYDCKIMTSKTDVSSSVITSLGAIVSCYGKTKCTASNKNRGIIKTFSNGCDYVSNKGVDTVSVGNTLYYVNKQEGKSLYVKGEPIINFYDPLVFPSDEFDASISQVNEKINQSLAFIRKSDELLHNVNVGKSTTNIMITTIIIVIIVILLALIAVGLLLYCRAR

SEQ ID NO: 9492 - protein, 553 aa, Artificial Sequence
  derived and/or modified protein sequence (wt) from HRSV__AGG39505.1__F-del
MELLIHRSSAIFLTLAINALYLTSSQNITEEFYQSTCSAVSRGYFSALRTGWYTSVITIELSNIKETKCNGTDTKVKLIKQELDKYKNAVTELQLLMQNTPAANNRARREAPQYMNYTINTTKNLNVSISKKRKRRFLGFLLGVGSAIASGIAVSKVLHLEGEVNKIKNALLSTNKAVVSLSNGVSVLTSKVLDLKNYINNQLLPIVNQQSCRISNIETVIEFQQKNSRLLEITREFSVNAGVTTPLSTYMLTNSELLSLINDMPITNDQKKLMSSNAQIVRQQSYSIMSIIKEEVLAYVVQLPIYGVIDTPCWKLHTSPLCTTNTKEGSNICLTRTDRGWYCDNAGSVSFFPQADTCKVQSNRVFCDTMNSLTLPSEVSLCNTDIFNSKYDCKIMTSKTDISSSVITSLGAIVSCYGKTKCTASNKNRGIIKTFSNGCDYVSNKGVDTVSVGNTLYYVNKLEGKNLYVKGEPIINYYDPLVFPSDEFDASISQVNEKINQSLAFIRRSDELLHNVNTGKSTTNIMITAIIIVIIVVLLSLIAIGLLLYCKAK

SEQ ID NO: 9493 - protein, 553 aa, Artificial Sequence
  derived and/or modified protein sequence (wt) from HRSV__AIY70242.1__F-del
MELPILKANAITTILAAVTLCFASSQNITEEFYQSTCSAVSKGYLSALRTGWYTSVITIELSNIKENKCNGTDAKVKLIKQELDKYKNAVTELQLLMQSTPAANNRARRELPRFMNYTLNNTKNTNVTLSKKRKRRFLGFLLGVGSAIASGIAVSKVLHLEGEVNKIKSALLSTNKAVVSLSNGVSVLTSKVLDLKNYIDKQLLPIVNKQSCSISNIETVIEFQQKNNRLLEITREFSVNAGVTTPVSTYMLTNSELLSLINDMPITNDQKKLMSNNVQIVRQQSYSIMSIIKEEVLAYVVQLPLYGVIDTPCWKLHTSPLCTTNTKEGSNICLTRTDRGWYCDNAGSVSFFPQAETCKVQSNRVFCDTMNSLTLPSEVNLCNVDIFNPKYDCKIMTSKTDVSSSVITSLGAIVSCYGKTKCTASNKNRGIIKTFSNGCDYVSNKGVDTVSVGNTLYYVNKQEGKNLYVKGEPIINFYDPLVFPSDEFDASISQVNEKINQSLAFIRKSDELLHNVNAVKSTTNIMITTIIIVIIVILLSLIVVGLLLYCKAR

SEQ ID NO: 9494 - protein, 553 aa, Artificial Sequence
  derived and/or modified protein sequence (wt) from HRSV__AIY70198.1__F-del
MELPILKANAITTILAAVTLCFASSQNITEEFYQSTCSAVSKGYLSALRTGWYTSVITIELSNIKENKCNGTDAKVKLIKQELDKYKNAVTELQLLMQSTPAANNRARRELPRFMNYTLNNTENTNVTLSKKRKRRFLGFLLGVGSAIASGIAVSKVLHLEGEVNKIKSALLSTNKAVVSLSNGVSVLTSKVLDLKNYIDKQLLPIVNKQSCSISNIETVIEFQQKNNRLLEITREFSVNAGVTTPVSTYMLTNSELLSLINDMPITNDQKKLMSNNVQIVRQQSYSIMSIIKEEVLAYVVQLPLYGVIDTPCWKLHTSPLCTTNTKEGSNICLTRTDRGWYCDNAGSVSFFPQAETCKVQSNRVFCDTMNSLTLPSEVSLCNVDIFNPKYDCKIMTSKTDVSSSVITSLGAIVSCYGKTKCTASNKNRGIIKTFSNGCDYVSNKGVDTVSVGNTLYYVNKQEGKNLYVKGEPIINFYDPLVFPSDEFDASISQVNEKINQSLAFIRKSDELLHNVNAVKSTTNIMITTIIIVIIVILLSLIVVGLLLYCKAR

SEQ ID NO: 9495 - protein, 553 aa, Artificial Sequence
  derived and/or modified protein sequence (wt) from HRSV__AII30203.1__F-del
MELPILKTNAITTILAAATLCFASSQNITEEFYQSTCSAVSKGYLSALRTGWYTSVITIELSNIKENKCNGTDAKVKLIKQELDKYKNAVTELQLLMQSTPAANNRARRELPKFMNYTLNNTKNTNVTLSKKRKRRFLGFLLGVGSAIASGIAVSKVLHLEGEVNKIKSALLSTNKAVVSLSNGVSVLTSKVLDLKNYIDKQLLPIVNKQSCSISNIETVIEFQQKNNRLLEITREFSVNAGVTTPVSTYMLTNSELLSLINDMPITNDQKKLMSNNVQIVRRQSYSIMSIIKEEVLAYVVQLPLYGVIDTPCWKLHTSPLCTTNTKEGSNICLTRTDRGWYCDNAGSVSFFPQAETCKVQSNRVFCDTMNSLTLPSEVNLCNIDIFNPKYDCKIMTSKTDVSSSVITSLGAIVSCYGKTKCTASNKNRGIIKTFSNGCDYVSNKGVDTVSVGNTLYYVNKQEGKSLYVKGEPIINFYDPLVFPSDEFDASISQVNEKINQSLAFIRKSDELLHNVNAGKSTTNIMITTIIIVIIVILLSLIAVGLLLYCKAR

SEQ ID NO: 9496 - protein, 553 aa, Artificial Sequence
  derived and/or modified protein sequence (wt) from HRSV__AHY21463.1__F-del
MELPILKTNAITTIFAAVTLCFASSQNITEEFYQSTCSAVSKGYLSALRTGWYTSVITVELSNIKENKCNGTDAKVKLIKQELDKYKNAVTELQLLMQSTPAANNRARRELPRFMNYTLNNTKNTNVTLSKKRKRRFLGFLLGVGSAIASGIAVSKVLHLEGEVNKIKSALLSTNKAVVSLSNGVSVLTSKVLDLKNYIDKQLLPIVNKQSCSISNIETVIEFQQKNNRLLEITREFSVNAGVTTPVSTYMLTNSELLSLINDMPITNDQKKLMSNNVQIVRQQSYSIMSIIKEEVLAYVVQLPLYGVIDTPCWKLHTSPLCTTNTKEGSNICLTRTDRGWYCDNAGSVSFFPQAETCKVQSNRVFCDTMNSLTLPSEVNLCNIDIFNPKYDCKIMTSKTDVSSSVITSLGAIVSCYGKTKCTASNKNRGIIKTFSNGCDYVSNKGVDTVSVGNTLYYVNKQEGKSLYVKGEPIINFYDPLVFPSDEFDASISQVNEKINQSLAFIRKSDELLHNVNAGKSTTNIMITTIIIVIIVILLSLIAVGLLLYCKAR

SEQ ID NO: 9497 - protein, 553 aa, Artificial Sequence
  derived and/or modified protein sequence (wt) from HRSV__AHY21397.1__F-del
MELLIHRSSAIFLTLAINALYLTSSQNITEEFYQSTCSAVSRGYFSALRTGWYTSVITIELSNIKETKCNGTDTKVKLIKQELDKYKNAVTELQLLMQNTPAANNRARREAPQYTNYTINTTKNLNVSISKKRKRRFLGFLLGVGSAIASGIAVSKVLHLEGEVNKIKNALLSTNKAVVSLSNGVSVLTSKVLDLKNYINNQLLPIVNKQSCRISNIETVIEFQQKNSRLLEITREFSVNAGVTTPLSTYMLTNSELLSLINDMPITNDQKKLMSSNAQIVRQQSYSIMSIIKEEVLAYVVQLPIYGVIDTPCWKLHTSPLCTTNIKEGSNICLTRTDRGWYCDNAGSVSFFPQADTCKVQSNRVFCDTMNSLTLPSEVSLCNTDIFNSKYDCKIMTSKTDISSSVITSLGAIVSCYGKTKCTASNKNRGIIKTFSNGCDYVSNKGVDTVSVGNTLYYVNKLEGKNLYVKGEPIINYYDPLVFPSDEFDASISQVNEKINQSLAFIRRSDELLHNVNTGKSTTNIMITTIIIVIIVVLLSLIAIGLLLYCKAK

SEQ ID NO: 9498 - protein, 553 aa, Artificial Sequence
  derived and/or modified protein sequence (wt) from HRSV__AHY21320.1__F-del
MELPIIKANAITTILIAVTFCFASSQNITEEFYQSTCSAVSKGYLSALRTGWYTSVITIELSNIKENKCNGTDAKVKLIKQELDKYKNAVTELQLLMQSTPAANNRARRELPRFMNYTLNNAKKTNVTLSKKRKRRFLGFLLGVGSAIASGIAVSKVLHLEGEVNKIKSALLSTNKAVVSLSNGVSVLTSKVLDLKNYIDKQLLPIVNKQSCSISNIETVIEFQQKNNRLLEITREFSVNAGVTTPVSTYMLTNSELLSLINDMPITNDQKKLMSNNVQIVRQQSYSIMSIIKEEVLAYVVQLPLYGVIDTPCWKLHTSPLCTTNTKEGSNICLTRTDRGWYCDNAGSVSFFPQADTCKVQSNRVFCDTMNSLTLPSEVNLCNIDIFNPKYDCKIMTSKTDVSSSVITSLGAIVSCYGKTKCTASNKNRGIIKTFSNGCDYVSNKEVDTVSVGNTLYYVNKQEGKSLYVKGEPIINFYDPLVFPSDEFDASISQVNEKINQSLAFIRKSDELLHNVNAGKSTTNIMITTIIIVIIVILLSLIAVGLLLYCKAR

SEQ ID NO: 9499 - protein, 553 aa, Artificial Sequence
  derived and/or modified protein sequence (wt) from HRSV__AHY21298.1__F-del
MELMIHKSSAIFLTLAINALYLTSSQNITEEFYQSTCSAVSRGYFSALRTGWYTSVITIELSNIKETKCNGTDTKVKLIKQELDKYKNAVTELQLLMQNTPAVNNRARREAPQYMNYTINTTKNLNVSISKKRKRRFLGFLLGVGSAIASGIAVSKVLHLEGEVNKIKNALLSTNKAVVSLSNGVSVLTSKVLDLKNYINNQLLPIVNQQSCRISNIETVIEFQQKNSRLLEITREFSVNAGVTTPLSTYMLTNSELLSLINDMPITNDQKKLMSSNVQIVRQQSYSIMSIIKEEVLAYVVQLPIYGVIDTPCWKLHTSPLCTTNIKEGSNICLTRTDRGWYCDNAGSVSFFPQADTCKVQSNRVFCDTMNSLTLPSEVSLCNTDIFNSKYDCKIMTSKTDISSSVITSLGAIVSCYGKTKCTASNKNRGIIKTFSNGCDYVSNKGVDTVSVGNTLYYVNKLEGKNLYVKGEPIINYYDPLVFPSDEFDASISQVNEKINQSLAFIRRSDELLHNVNTGKSTTNIIITTIIIVIIVVLLSLIAIGLLLYCKAK

SEQ ID NO: 9500 - protein, 553 aa, Artificial Sequence
  derived and/or modified protein sequence (wt) from HRSV__AHY21287.1__F-del
MELPIIKANAITTILIAVTFCFASSQNITEEFYQSTCSAVSKGYLSALRTGWYTSVITIELSNIKENKCNGTDAKVKLIKQELDKYKNAVTELQLLMQSTPAANNRARRELPRFMNYTLNNAKKTNVTLSKKRKRRFLGFLLGVGSAIASGIAVSKVLHLEGEVNKIKNALLSTNKAVVSLSNGVSVLTSKVLDLKNYIDKQLLPIVNKQSCSISNIETVIEFQQKNNRLLEITREFSVNAGVTTPVSTYMLTNSELLSLINDMPITNDQKKLMSNNVQIVRQQSYSIMSIIKEEVLAYVVQLPLYGVIDTPCWKLHTSPLCTTNTKEGSNICLTRTDRGWYCDNAGSVSFFPQADTCKVQSNRVFCDTMNSLTLPSEVNLCNIDIFNPKYDCKIMTSKTDVSSSVITSLGAIVSCYGKTKCTASNKNRGIIKTFSNGCDYVSNKGVDTVSVGNTLYYVNKQEGKSLYVKGEPIINFYDPLVFPSDEFDASISQVNEKINQSLAFIRKSDELLHNVNAGKSTTNIMITTIIIVIIVILLSLIAVGLLLYCKAR

SEQ ID NO: 9501 - protein, 553 aa, Artificial Sequence
  derived and/or modified protein sequence (wt) from HRSV__AHY21276.1__F-del
MELPIIKANAITTILIAVTFCFASSQNITEEFYQSTCSAVSKGYLSALRTGWYTSVITIELSNIKENKCNGTDAKVKLIKQELDKYKNAVTELQLLMQSTPAANNRARRELPRFMNYTLNNAKKTNVTLSKKRKRRFLGFLLGVGSAIASGIAVSKVLHLEGEVNKIKSALLSTNKAVVSLSNGVSVLTSKVLDLKNYIDKQLLPIVNKQSCSISNIETVIEFQQKNSRLLEITREFSVNAGVTTPVSTYMLTNSELLSLINDMPITNDQKKLMSNNVQIVRQQSYSIMSIIKEEVLAYVVQLPLYGVIDTPCWKLHTSPLCTTNTKEGSNICLTRTDRGWYCDNAGSVSFFPQADTCKVQSNRVFCDTMNSLTLPSEVNLCNIDIFNPKYDCKIMTSKTDVSSSVITSLGAIVSCYGKTKCTASNKNRGIIKTFSNGCDYVSNKGVDTVSVGNTLYYVNKQEGKSLYVKGEPIINFYDPLVFPSDEFDASISQVNEKINQSLAFIRKSDELLHNVNAGKSTTNIMITTIIIVIIVILLSLIAVGLLLYCKAR

SEQ ID NO: 9502 - protein, 553 aa, Artificial Sequence
  derived and/or modified protein sequence (wt) from HRSV__AHY21254.1__F-del
MELPILKTNAITTILAAVTLCFASSQNITEEFYQSTCSAVSKGYLSALRTGWYTSVITIELSNIKENKCNGTDAKVKLIKQELDKYKNAVTELQLLMQSTPAANNRARRELPRFMNYTLNNTKNTNVTLSKKRKRRFLGFLLGVGSAIASGIAVSKVLHLEGEVNKIKSALLSTNKAVVSLSNGVSVLTSKVLDLKNYIDKQLLPIVNKQSCSISNIETVIEFQQKNNRLLEITREFSVNAGVTTPVSTYMLTNSELLSLINDMPITNDQKKLMSNNVQIVRQQSYSIMSIIKEEVLAYVVQLPLYGVIDTPCWKLHTSPLCTTNTKEGSNICLTRTDRGWYCDNAGSVSFFPQAETCKVQSNRVFCDTMNSLTLSSEVNLCNIDIFNPKYDCKIMTSKTDVSSSVITSLGAIVSCYGKTKCTASNKNRGIIKTFSNGCDYVSNKGVDTVSVGNTLYYVNKQEGKSLYVKGEPIINFYDPLVFPSDEFDASISQVNEKINQSLAFIRKSDELLHNVNAGKSTTNIMITTIIIVIIVILLSLIAVGLLLYCKAR

SEQ ID NO: 9503 - protein, 553 aa, Artificial Sequence
  derived and/or modified protein sequence (wt) from HRSV__AHY21199.1__F-del
MELLIHRSSAIFLTIAINALYLTSSQNITEEFYQSTCSAVSRGYFSALRTGWYTSVITIELSNIKETKCNGTDTKVKLIKQELDKYKNAVTELQLLMQNTPATNNRARREAPQYMNYTINTTKNLNVSISKKRKRRFLGFLLGVGSAIASGIAVSKVLHLEGEVNKIKNALLSTNKAVVSLSNGVSVLTSKVLDLKNYINNQLLPIVNQQSCRISNIETVIEFQQKNSRLLEITREFSVNAGVTTPLSTYMLTNSELLSLINDMPITNDQKKLMSSNVQIVRQQSYSIMSIIKEEVLAYVVQLPIYGVIDTPCWKLHTSPLCTTNIKEGSNICLTRTDRGWYCDNAGSVSFFPQADTCKVQSNRVFCDTMNSLTLPSEVSLCNTDIFNSKYDCKIMTSKTDISSSVITSLGAIVSCYGKTKCTASNKNRGIIKTFSNGCDYVSNKGVDTVSVGNTLYYVNKLEGKNLYVKGEPIINYYDPLVFPSDEFDASISQVNEKINQSLAFIRRSDELLHNVNTGKSTTNIMITAIIIVIIVVLLSLIAIGLLLYCKAK

SEQ ID NO: 9504 - protein, 553 aa, Artificial Sequence
  derived and/or modified protein sequence (wt) from HRSV__AHY21176.1__F-del
MELPILKTNAITTILAAVTLCFASSQNITEEFYQSTCSAVSKGYLSALRTGWYTSVITIELSNIKENKCNGTDAKVKLIKQELDKYKNAVTELQLLMQSTPAANNRARRELPRFMNHTLNNTKNTNVTLSKKRKRRFLGFLLGVGSAIASGIAVSKVLHLEGEVNKIKSALLSTNKAVVSLSNGVSVLTSKVLDLKNYIDKQLLPIVNKQSCSISNIETVIEFQQKNNRLLEITREFSVNAGVTTPVSTYMLTNSELLSLINDMPITNDQKKLMSNNVQIVRQQSYSIMSIIKEEVLAYVVQLPLYGVIDTPCWKLHTSPLCTTNTKEGSNICLTRTDRGWYCDNAGSVSFFPQAETCKVQSNRVFCDTMNSLTLPSEVNLCNIDIFNPKYDCKIMTSKTDVSSSVITSLGAIVSCYGKTKCTASNKNRGIIKTFSNGCDYVSNKGVDTVSVGNTLYYVNKQEGKSLYVKGEPIINFYDPLVFPSDEFDASISQVNEKINQSLAFIRKSDELLHNVNAGKSTTNIMITTIIIVIIVILLSLIAVGLLLYCKAR

SEQ ID NO: 9505 - protein, 553 aa, Artificial Sequence
  derived and/or modified protein sequence (wt) from HRSV__AHX57537.1__F-del
MELPILKTNAITTILAAVTLCFTSSQNITEEFYQSTCSAVSKGYLSALRTGWYTSVITIELSNIKENKCNGTDAKVKLIKQELDKYKNAVTELQLLMQSSPAANSRARRELPRFMNYTLNNTKNTNVTLSKKRKRRFLGFLLGVGSAIASGIAVSKVLHLEGEVNKIKSALLSTNKAVVSLSNGVSVLTSKVLDLKNYIDKQLLPIVNKQSCSISNIETVIEFQQKNNRLLEITREFSVNAGVTTPVSTYMLTNSELLSLINDMPITNDQKKLMSSNVQIVRQQSYSIMSIIKEEVLAYVVQLPLYGVIDTPCWKLHTSPLCTTNTKEGSNICLTRTDRGWYCDNAGSVSFFPQAETCKVQSNRVFCDTMNSLTLPSEVNLCNIDIFNPKYDCKIMTSKTDVSSSVITSLGAIVSCYGKTKCTASNKNRGIIKTFSNGCDYVSNKGVDTVSVGNTLYYVNKQEGKSLYVKGEPIINFYDPLVFPSDEFDASISQVNEKINQSLAFIRKSDELLHNVNAGKSTTNIMITTIIIVIIVILLALIAVGLLLYCKAR

SEQ ID NO: 9506 - protein, 553 aa, Artificial Sequence
  derived and/or modified protein sequence (wt) from HRSV__AHX57471.1__F-del
MELPILKTNAITTILAAVTLCFASSQNITEEFYQSTCSAVSKGYLSALRTGWYTSVITIELSNIKENKCNGTDAKVKLIKQELDKYKNAVTELQLLMQSSPAANSRARRELPRFMNYTLNNTKNTNVTLSKKRKRRFLGFLLGVGSAIASGIAVSKVLHLEGEVNKIKSALLSTNKAVVSLSNGVSVLTSKVLDLKNYIDKQLLPIVNKQSCSISNIETVIEFQQKNNRLLEITREFSVNAGVTTPVSTYMLTNSELLSLINDMPITNDQKKLMSSNVQIVRQQSYSIMSIIKEEVLAYVVQLPLYGVIDTPCWKLHTSPLCTTNTKEGSNICLTRTDRGWYCDNAGSVSFFPQAETCKVQSNRVFCDTMNSLTLPSEVNLCNIDIFNPKYDCKIMTSKTDVSSSVITSLGAIVSCYGKTKCTASNKNRGIIKTFSNGCDYVSNKGVDTVSVGNTLYYVNKQEGKSLYVKGEPIINFYDPLVFPSDEFDASISQVNEKINQSLAFIRKSDELLHNVNAGKSTTNIMITTIIIVIIVILLALIAVGLLLYCKAR

SEQ ID NO: 9507 - protein, 553 aa, Artificial Sequence
  derived and/or modified protein sequence (wt) from HRSV__AHX57427.1__F-del
MELPILKTNAITTILAAVTLCFASSQNITEEFYQSTCSAVSKGYLSALRTGWYTSVITIELSNIKENKCNGTDAKVKLIKQELDKYKNAVTELQLLMQSTPAANSRARRELPRFMNYTLNNTKNTNVTLSKKRKRRFLGFLLGVGSAIASGIAVSKVLHLEGEVNKIKSALLSTNKAVVSLSNGVSVLTSKVLDLKNYIDKQLLPIVNKQSCSISNIETVIEFQQKNNRLLEITREFSVKAGVTTPVSTYMLTNSELLSLINDMPITNDQKKLMSSNVQIVRQQSYSIMSIIKEEVLAYVVQLPLYGVIDTPCWKLHTSPLCTTNTKEGSNICLTRTDRGWYCDNAGSVSFFPQAETCKVQSNRVFCDTMNSLTLPSEVNLCNIDIFNPKYDCKIMTSKTDVSSSVITSLGAIVSCYGKTKCTASNKNRGIIKTFSNGCDYVSNKGVDTVSVGNTLYYVNKQEGKSLYVKGEPIINFYDPLVFPSDEFDASISQVNEKINQSLAFIRKSDELLHNVNAGKSTTNIMITTIIIVIIVILLALIAVGLLLYCKAR

SEQ ID NO: 9508 - protein, 553 aa, Artificial Sequence
  derived and/or modified protein sequence (wt) from HRSV__AHX57042.1__F-del
MELLIHRSSVIFLTLAINALYLTSSQNITEEFYQSTCSAVSRGYFSALRTGWYTSVITIELSNIKETKCNGTDTKVKLIKQELDKYKNAVTELQLLMQNIPAANNRARREAPQYMNYTINTTKNLNVSISKKRKRRFLGFLLGVGSAIASGIAVSKVLHLEGEVNKIKNALLSTNKAVVSLSNGVSVLTSKVLDLKNYINNQLLPIVNQQSCRISNIETVIEFQQKNSRLLEITREFSVNAGVTTPLSTYMLTNSELLSLINDMPITNDQKKLMSSNVQIVRQQSYSIMSIIKEEVLAYVVQLPIYGVIDTPCWKLHTSPLCTTNIKEGSNICLTRTDRGWYCDNAGSVSFFPQADTCKVQSNRVFCDTMNSLTLPSEVSLCNTDIFNSKYDCKIMTSKTDISSSVITSLGAIVSCYGKTKCTASNKNRGIIKTFSNGCDYVSNKGVDTVSVGNTLYYVNKLEGKNLYVKGEPIINYYDPLVFPSDEFDASISQVNEKINQSLAFIRRSDELLHNVNTGKSTTNIMITVIIIVIIVVLLSLIAIGLLLYCKAK

SEQ ID NO: 9509 - protein, 553 aa, Artificial Sequence
  derived and/or modified protein sequence (wt) from HRSV__AIZ95981.1__F-del
MELPIIKANAITTILIAVTFCFASSQNITEEFYQSTCSAVSKGYLSALRTGWYTSVITIELSNIKENKCNGTDAKVKLIKQELDKYKNAVTELQLLMQSTPAANNRARRELPRFMNYTLNNAKKTNVTLSKKRKRRFLGFLLGVGSAIASGIAVSKVLHLEGEVNKIKSALLSTNKAVVSLSNGVSVLTSKVLDLKNYIDKQLLPIVNKQSCSISNIETVIEFQQKNNRLLEITREFSVNAGVTTPVSTYMLTNSELLSLINDMPITNDQKKLMSNNVQIVRQQSYSIMSIIKEEVLAYIVQLPLYGVIDTPCWKLHTSPLCTTNTKEGSNICLTRTDRGWYCDNAGSVSFFPQADTCKVQSNRVFCDTMNSLTLPSEVNLCNIDIFNPKYDCKIMTSKTDVSSSVITSLGAIVSCYGKTKCTASNKNRGIIKTFSNGCDYVSNKGVDTVSVGNTLYYVNKQEGKSLYVKGEPIINFYDPLVFPSNEFDASISQVNEKINQSLAFIRKSDELLHNVNAGKSTTNIMITTIIIVIIVILLSLIAVGLLLYCKAR

SEQ ID NO: 9510 - protein, 553 aa, Artificial Sequence
  derived and/or modified protein sequence (wt) from HRSV__AIZ95893.1__F-del
MELPILKTNAITTILAAVTLCFASSQNITEEFYQSTCSAVSKGYLSALRTGWYTSVITIELSNIKENKCNGTDAKVKLIKQELDKYKNAVTELQLLMQSTPAANNRARRELPRFMNYTLNNTKNTNVTLSKKRKRRFLGFLLGVGSAIASGIAVSKVLHLEGEVNKIKSALLSTNKAVVSLSNGVSVLTSKVLDLKNYIDKQLLPIVNKQSCSISNIETVIEFQQKNNRLLEITREFSVNAGVTTPVSTYMLTNSELLSLINDMPITNDQKKLMSNNVQIVRQQSYSIMSIIKEEVLAYVVQLPLYGVIDTPCWKLHTSPLCTTNTKEGSNICLTRTDRGWYCDNAGSVSFFPQAETCKVQSNRVFCDTMNSLTLPSEVNLCNIDIFNPKYDCKIMTSKTDVSSSVITSLGAIVSCYGKTKCTASNKNRGIIKTFSNGCDYVSNKGVDTVSVGNTLYYVNKQEGKSLYVKGEPIINFYDPLVFPSDEFDASISQVNEKINQSLAFIRKSDELLHNVNAGKSTTNVMITTIIIVIIVILLSLIAVGLLLYCKAR

SEQ ID NO: 9511 - protein, 553 aa, Artificial Sequence
  derived and/or modified protein sequence (wt) from HRSV__AIZ95871.1__F-del
MELLIHKSSAIFLTLAINALYLTSSQNITEEFYQSTCSAVSRGYFSALRTGWYTSVITIELSNIKETKCNGTDTKVKLIKQELDKYKNAVTELQLLMQNTPAANNRARREAPQYMNYTINTTKNLNVSISKKRKRRFLGFLLGVGSAIASGIAVSKVLHLEGEVNKIKNALLSTNKAIVSLSNGVSVLTSKVLDLKNYINNQLLPIVNQQSCRISNIETVIEFQQKNSRLLEITREFSVNAGVTTPLSTYMLTNSELLSLINDMPITNDQKKLMSSNVQIVRQQSYSIMSIIKEEVLAYVVQLPIYGVIDTPCWKLHTSPLCTTNIKEGSNICLTRTDRGWYCDNAGSVSFFPQADTCKVQSNRVFCDTMNSLTLPSEVSLCNTDIFNSKYDCKIMTSKTDISSSVITSLGAIVSCYGKTKCTASNKNRGIIKTFSNGCDYVSNKGVDTVSVGNTLYYVNKLEGKNLYVKGEPIINYYDPLVFPSDEFDASISQVNEKINQSLAFIRRSDELLHNVNTGKSTTNIMITTIIIVIIVVLLSLIAIGLLLYCKAK

SEQ ID NO: 9512 - protein, 553 aa, Artificial Sequence
  derived and/or modified protein sequence (wt) from HRSV__AIZ95816.1__F-del
MELPILKTNAITIILAAVTLCFVSSQNITEEFYQSTCSAVSKGYLSALRTGWYTSVITIELSNIKENKCNGTDAKVKLIKQELDKYKNAVTELQLLMQSTPAANNRARRELPRFMNYTLNSTKNTNVTLSKKRKRRFLGFLLGVGSAIASGIAVSKVLHLEGEVNKIKSALLSTNKAVVSLSNGVSVLTSKVLDLKNYIDKQLLPIVNKQSCSISNIETVIEFQQKNNRLLEITREFSVNAGVTTPVSTYMLTNSELLSLINDMPITNDQKKLMSNNVQIVRQQSYSIMSIIKEEVLAYVVQLPLYGVIDTPCWKLHTSPLCTTNTKEGSNICLTRTDRGWYCDNAGSVSFFPQAETCKVQSNRVFCDTMNSLTLPSEVNLCNIDIFNPKYDCKIMTSKTDVSSSVITSLGAIVSCYGKTKCTASNKNRGIIKTFSNGCDYVSNKGVDTVSVGNTLYYVNKQEGKSLYVKGEPIINFYDPLVFPSDEFDASISQVNEKINQSLAFIRKSDELLHNVNVGKSTTNIMITTIIIVIIVILLLLIAVGLFLYCKAR

SEQ ID NO: 9513 - protein, 553 aa, Artificial Sequence
  derived and/or modified protein sequence (wt) from HRSV__AIZ95772.1__F-del
MELPILKTNAITTILAAVTLCFASSQNITEEFYQSTCSAVSKGYLSALRTGWYTSVITIELSNIKENKCNGTDAKVKLIKQELDKYKNAVTELQLLMQSTPAANNRARRELPRFMNYTLNNTKNTNVTLSKKRKRRFLGFLLGVGSAIASGIAVSKVLHLEGEVNKIKSALLSTNKAVVSLSTGVSVLTSKVLDLKNYIDKQLLPIVNKQSCSISNIETVIEFQQKNNRLLEITREFSVNAGVTTPVSTYMLTNSELLSLINDMPITNDQKKLMSNNVQIVRQQSYSIMSIIKEEVLAYVVQLPLYGVIDTPCWKLHTSPLCTTNTKEGSNICLTRTDRGWYCDNAGSVSFFPQAETCKVQSNRVFCDTMNSLTLPSEVNLCNIDIFNPKYDCKIMTSKTDVSSSVITSLGAIVSCYGKTKCTASNKNRGIIKTFSNGCDYVSNKGVDTVSVGNTLYYVNKQEGKSLYVKGEPIINFYDPLVFPSDEFDASISQVNEKINQSLAFIRKSDELLHNVNVGKSTTNIMITTIIIVIIVILLLLIAVGLFLYCKAR

SEQ ID NO: 9514 - protein, 553 aa, Artificial Sequence
  derived and/or modified protein sequence (wt) from HRSV__AIZ95629.1__F-del
MELLIHRSSAIFLTLAINALYFTSGQNITEEFYQSTCSAVSRGYFSALRTGWYTSVITIELSNIKETKCNGTDTKVKLIKQELDKYKNAVTELQLLMQNTPAANNRARREAPQYMNYTINTTKNLNVSTSKKRKRRFLGFLLGVGSAIASGIAVSKVLHLEGEVNKIKNALLSTNKAVVSLSNGVSVLTSKVLDLKNYINNQLLPIVNQQSCRISNIETVIEFQQKNSRLLEITREFSVNAGVTTPLSTYMLTNSELLSLINDMPITNDQKKLMSSNVQIVRQQSYSIMSIIKEEVLAYVVQLPIYGVIDTPCWKLHTSPLCTTNIKEGSNICLTRTDRGWYCDNAGSVSFFPQADTCKVQSNRVFCDTMNSLTLPSEVSLCNTDIFNSKYDCKIMTSKTDISSSVITSLGAIVSCYGKTKCTASNKNRGIIKTFSNGCDYVSNKGVDTVSVGNTLYYVNKLEGKNLYVKGEPIINYYDPLVFPSDEFDASISQVNEKINQSLAFIRRSDELLHNVNTGKSTTNIMITAIIIVIIVVLLSLIAIGLLLYCKAK

SEQ ID NO: 9515 - protein, 553 aa, Artificial Sequence
  derived and/or modified protein sequence (wt) from HRSV__AIZ95673.1__F-del
MESLIHRSSAIFLTLAINALYLTSSQNITEEFYQSTCSAVSRGYFSALRTGWYTSVITIELSNIKETKCNGTDTKVKLIKQELDKYKNAVTELQLLMQNTPAANNRARREAPQYMNYTINTTKNLNVSISKKRKRRFLGFLLGVGSAIASGIAVSKVLHLEGEVNKIKNALLSTNKAVVSLSNGVSVLTSKVLDLKNYINNQLLPIVNQQSCRISNIETVIEFQQKNSRLLEITREFSVNAGVTTPLSTYMLTNSELLSLINDMPITNDQKKLMSSNVQIVRQQSYSIMSIIKEEVLAYVVQLPIYGVIDTPCWKLHTSPLCTTNIKEGSNICLTRTDRGWYCDNAGSVSFFPQADTCKVQSNRVFCDTMNSLTLPSEVSLCNTDIFNSKYDCKIMTSKTDISSSVITSLGAIVSCYGKTKCTASNKNRGIIKTFSNGCDYVSNKGVDTVSVGNTLYYVNKLEGKNLYVKGEPIINYYDPLVFPSDEFDASISQVNEKINQSLAFIRRSDELLHNVNTGKSTTNIMITTIIIVIIVVLLSLIAIGLLLYCKAK

SEQ ID NO: 9516 - protein, 553 aa, Artificial Sequence
  derived and/or modified protein sequence (wt) from HRSV__AIZ95596.1__F-del
MELPILKTNAITTILAAATLCFASSQNITEEFYQSTCSAVSKGYLSALRTGWYTSVITIELSNIKENKCNGTDVKVKLIKQELDKYKNAVTELQLLMQSTPAANNRARRELPRFMNYTLNNTKNTNVTLSKKRKRRFLGFLLGVGSAIASGIAVSKVLHLEGEVNKIKSALLSTNKAVVSLSNGVSVLTSKVLDLKNYIDKQLLPIVNKQSCSISNIETVIEFQQKNNRLLEITREFSVNAGVTTPVSTYMLTNSELLSLINDMPITNDQKKLMSNNVQIVRQQSYSIMSIIKEEVLAYVVQLPLYGVIDTPCWKLHTSPLCTTNTKEGSNICLTRTDRGWYCDNAGSVSFFPQAETCKVQSNRVFCDTMNSLTLPSEVNLCNIDIFNPKYDCKIMTSKTDVSSSVITSLGAIVSCYGKTKCTASNKNRGIIKTFSNGCDYVSNKGVDTVSVGNTLYYVNKQEGKSLYVKGEPIINFYDPLVFPSDEFDASISQVNEKINQSLAFIRKSDELLHNVNAGKSTTNIMITTIIIVIIVILLSLIAVGLLLYCKAR

SEQ ID NO: 9517 - protein, 553 aa, Artificial Sequence
  derived and/or modified protein sequence (wt) from HRSV__AIZ95585.1__F-del
MELPILKTNAITTILAAVTLCFASSQNITEEFYQSTCSAVSKGYLSALRTGWYTSVITIELSNIKENKCNGTDAKVKLIKQELDKYKNAVTELQLLMQSTPAANNRARRELPRFMNYTLNSTKNTNVTLSKKRKRRFLGFLLGVGSAIASGIAVSKVLHLEGEVDKIKSALLSTNKAVVSLSNGVSVLTSKVLDLKNYIDKQLLPIVNKQSCSISNIETVIEFQQKNNRLLEITREFSVNAGVTTPVSTYMLTNSELLSLINDMPITNDQKKLMSNNVQIVRQQSYSIMSIIKEEVLAYVVQLPLYGVIDTPCWKLHTSPLCTTNTKEGSNICLTRTDRGWYCDNAGSVSFFPQAETCKVQSNRVFCDTMNSLTLPSEVNLCNIDIFNPKYDCKIMTSKTDVSSSVITSLGAIVSCYGKTKCTASNKNRGIIKTFSNGCDYVSNKGVDTVSVGNTLYYVNKQEGKSLYVKGEPIINFYDPLVFPSDEFDASISQVNEKINQSLAFIRKSDELLHNVNVGKSTTNIMITTIIIVIIVILLLLIAVGLFLYCKAR

SEQ ID NO: 9518 - protein, 553 aa, Artificial Sequence
  derived and/or modified protein sequence (wt) from HRSV__AIZ95552.1__F-del
MELPILKTNAITTILAAVTLCLASSQNITEEFYQSTCSAVSKGYLSALRTGWYTSVITIELSNIKENKCNGTDAKVKLIKQELDKYKNAVTELQLLMQSTPAANNRARRELPRFMNYTLNNTKNTNVTLSKKRKRRFLGFLLGVGSAIASGIAVSKVLHLEGEVNKIKSALLSTNKAVVSLSNGVSVLTSKVLDLKNYIDKQLLPIVNKQSCSISNIETVIEFQQKNNRLLEITREFSVNAGVTTPVSTYMLTNSELLSLINDMPITNDQKKLMSNNVQIVRQQSYSIMSIIKEEVLAYVVQLPLYGVIDTPCWKLHTSPLCTTNTKEGSNICLTRTDRGWYCDNAGSVSFFPQAETCKVQSNRVFCDTMNSLTLPSEVNLCNIDIFNPKYDCKIMTSKTDVSSSVITSLGAIVSCYGKTKCTASNKNRGIIKTFSNGCDYVSNKGVDTVSVGNTLYYVNKQEGKSLYVKGEPIINFYDPLVFPSDEFDASISQVNEKINQSLAFIRKSDELLHNVNAGKSTTNIMITTIIIVIIVILLSLIAVGLLLYCKAR

SEQ ID NO: 9519 - protein, 553 aa, Artificial Sequence
  derived and/or modified protein sequence (wt) from HRSV__AHX57570.1__F-del
MELPILKTNAITTILAAVTLCFASSQNITEEFYQSTCSAVSKGYLSALRTGWYTSVITIELSNIKENKCNGTDAKVKLIKQELDKYKNAVTELQLLMQSTPAANSRARRELPRFMNYTLKNTKNTNVTLSKKRKRRFLGFLLGVGSAIASGIAVSKVLHLEGEVNKIKSALLSTNKAVVSLSNGVSVLTSKVLDLKNYIDKQLLPIVNKQSCSISNIETVIEFQQKNNRLLEITREFSVNAGVTTPVSTYMLTNSELLSLINDMPITNDQKKLMSSNVQIVRQQSYSIMSIIKEEVLAYVVQLPLYGVIDTPCWKLHTSPLCTTNTKEGSNICLTRTDRGWYCDNAGSVSFFPQAETCKVQSNRVFCDTMNSLTLPSEVNLCNIDIFNPKYDCKIMTSKTDVSSSVITSLGAIVSCYGKTKCTASNKNRGIIKTFSNGCDYVSNKGVDTVSVGNTLYYVNKQEGKSLYVKGEPIINFYDPLVFPSDEFDASISQVNEKINQSLAFIRKSDELLHNVNAGKSTTNIMITTIIIVIIVILLALIAVGLLLYCKAR

SEQ ID NO: 9520 - protein, 553 aa, Artificial Sequence
  derived and/or modified protein sequence (wt) from HRSV__AHX57152.1__F-del
MELPILKTNAITTILAAVTLCFASSQNITEEFYQSTCSAVSKGYLSALRTGWYTSVITIELSNIKENKCNGTDAKVKLIKQELDKYKNAVTELQLLMQSTPAANSRARRELPRFMNYTLNNTKYTNVTLSKKRKRRFLGFLLGVGSAIASGIAVSKVLHLEGEVNKIKSALLSTNKAVVSLSNGVSVLTSKVLDLKNYIDKQLLPIVNKQSCSISNIETVIEFQQKNNRLLEITREFSVNAGVTTPVSTYMLTNSELLSLINDMPITNDQKKLMSSNVQIVRQQSYSIMSIIKEEVLAYVVQLPLYGVIDTPCWKLHTSPLCTTNTKEGSNICLTRTDRGWYCDNAGSVSFFPQAETCKVQSNRVFCDTMNSLTLPSEVNLCNIDIFNPKYDCKIMTSKTDVSSSVITSLGAIVSCYGKTKCTASNKNRGIIKTFSNGCDYVSNKGVDTVSVGNTLYYVNKQEGKSLYVKGEPIINFYDPLVFPSDEFDASISQVNEKINQSLAFIRKSDELLHNVNAGKSTTNIMITTIIIVIIVILLALIAVGLLLYCKAR

SEQ ID NO: 9521 - protein, 553 aa, Artificial Sequence
  derived and/or modified protein sequence (wt) from HRSV__AHX57064.1__F-del
MELPILKTNAITTILAAVTLCFASSQNITEEFYQSTCSAVSKGYLSALRTGWYTSVITIELSNIKENKCNGTDAKVKLIKQELDKYKNAVTELQLLMQSTPAANSRARRELPRFMNYTLNNTKNTNVTLSKKRKRRFLGFLLGVGSAIASGIAVSKVLHLEGEVNKIKSALLSTNKAVVSLSNGVSVLTSKVLDLKNYIDKQLLPIVNKQSCSISNIETVIEFQQKNNRLLEITREFSVNAGVTTPVSTYMLTNGELLSLINDMPITNDQKKLMSSNVQIVRQQSYSIMSIIKEEVLAYVVQLPLYGVIDTPCWKLHTSPLCTTNTKEGSNICLTRTDRGWYCDNAGSVSFFPQAETCKVQSNRVFCDTMNSLTLPSEVNLCNIDIFNPKYDCKIMTSKTDVSSSVITSLGAIVSCYGKTKCTASNKNRGIIKTFSNGCDYVSNKGVDTVSVGNTLYYVNKQEGKSLYVKGEPIINFYDPLVFPSDEFDASISQVNEKINQSLAFIRKSDELLYNVNAGKSTTNIMITTIIIVIIVILLALIAVGLLLYCKAR

SEQ ID NO: 9522 - protein, 553 aa, Artificial Sequence
  derived and/or modified protein sequence (wt) from HRSV__AHX57009.1__F-del
MELPILKTNAITTILAAVTLCFASSQNITEEFYQSTCSAVSKGYLSALRTGWYTSVITIELSNIKENKCNGTDAKVKLIKQELDKYKNAVTELQLLMQSTPAANSRARRELPRFMNYTLNNTKNTNVILSKKRKRRFLGFLLGVGSAIASGIAVSKVLHLEGEVNKIKSALLSTNKAVVSLSNGVSVLTSKVLDLKNYIDKQLLPIVNKQSCSISNIETVIEFQQKNNRLLEITREFSVNAGVTTPVSTYMLTNSELLSLINDMPITNDQKKLMSSNVQIVRQQSYSIMSIIKEEVLAYVVQLPLYGVIDTPCWKLHTSPLCTTNTKEGSNICLTRTDRGWYCDNAGSVSFFPQAETCKVQSNRVFCDTMNSLTLPSEVNLCNIDIFNPKYDCKIMTSKTDVSSSVITSLGAIVSCYGKTKCTASNKNRGIIKTFSNGCDYVSNKGVDTVSVGNTLYYVNKQEGKSLYVKGEPIINFYDPLVFPSDEFDASISQVNEKINQSLAFIRKSDELLHNVNAGKSTTNIMITTIIIVIIVILLALIAVGLLLYCKAR

SEQ ID NO: 9523 - protein, 553 aa, Artificial Sequence
  derived and/or modified protein sequence (wt) from HRSV__AHX56987.1__F-del
MELLIHRSSAIFLTLAINALYLTSSQNITEEFYQSTCSAVSRGYFSALRTGWYTSVITIELSNIKETKCNGTDTKVKLIKQELDKYKNAVTELQLLMQNTPAANNRARREAPQYMNYTINTIKNLNVSISKKRKRRFLGFLLGVGSAIASGIAVSKVLHLEGEVNKIKNALLSTNKAVVSLSNGVSVLTSKVLDLKNYINNQLLPIVNQQSCRISNIETVIEFQQKNSRLLEITREFSVNAGVTTPLSTYMLTNSELLSLINDMPITNDQKKLMSSNVQIVRQQSYSIMSIIKEEVLAYVVQLPIYGVIDTPCWKLHTSPLCTTNIKEGSNICLTRTDRGWYCDNAGSVSFFPQADTCKVQSNRVFCDTMNSLTLPSEVSLCNTDIFNSKYDCKIMTSKTDISSSVITSLGAIVSCYGKTKCTASNKNRGIIKTFSNGCDYVSNKGVDTVSVGNTLYYVNKLEGKNLYVKGEPIINYYDPLVFPSDEFDASISQVNEKINQSLAFIRRSDELLHNINTGKSTTNIMITVIIIVIIVVLLSLIAIGLLLYCKAK

SEQ ID NO: 9524 - protein, 553 aa, Artificial Sequence
  derived and/or modified protein sequence (wt) from HRSV__AHV82100.1__F-del
MELPILKTNAITTILAAVTLCFASSQNITEEFYQSTCSAVSKGYLSALRTGWYTSVITIELSNIKENKCNGTDAKVKLIKQELDKYKNAVTELQLLMQSTPAANSRARRELPRFMNYTLNNTKNTNVTLSKKRKRRFLGFLLGVGSAIASGIAVSKVLHLEGEVNKIKSALLSTNKAVVSLSNGVSVLTSKVLDLKNYIDKQLLPIVNKQSCSISNIETVIEFQQKNNRLLEITREFSVNAGVTTPVSTYMLTNSELLSLINDMPITNDQKKLMSNNVQIVRQQSYSIMSIIKEEVLAYVVQLPLYGVIDTPCWKLHTSPLCTTNTKEGSNICLTRTDRGWYCDNAGSVSFFPQAETCKVQSNRVFCDTMNSLTLPSEVNLCNIDIFNPKYDCKIMTSKTDVSSSVITSLGAIVSCYGKTKCTASNKNRGIIKTFSNGCDYVSNKGVDTVSVGNTLYYVNKQEGKSLYVKGEPIINFYDPLVFPSDEFDASISQVNEKINQSLAFIRKSDELLHNVNAGKSTTNIMITTIIIVIIVILLALIAVGLLLYCKAR

SEQ ID NO: 9525 - protein, 553 aa, Artificial Sequence
  derived and/or modified protein sequence (wt) from HRSV__AHV82001.1__F-del
MELLIHRSSAIFLTLAINALYLTSSQNITEEFYQSTCSAVSRGYLSALRTGWYTSVITIELSNIKETKCNGTDTKVKLIKQELDKYKNAVTELQLLMQNTPAVNNRARREAPQYMNYTINTTKNLNVSISKKRKRRFLGFLLGVGSAIASGIAVSKVLHLEGEVNKIKNALLSTNKAVVSLSNGVSVLTSKVLDLKNYINNQLLPIVNQQSCRISNIETVIEFQQKNSRLLEITREFSVNAGVTTPLSTYMLTNSELLSLINDMPITNDQKKLMSSNVQIVRQQSYSIMSIIKEEVLAYVVQLPIYGVIDTPCWKLHTSPLCTTNTKEGSNICLTRTDRGWYCDNAGSVSFFPQADTCKVQSNRVFCDTMNSLTLPSEVSLCNTDIFNSKYDCKIMTSKTDISSSVITSLGAIVSCYGKTKCTASNKNRGIIKTFSNGCDYVSNKGVDTVSVGNTLYYVNKLEGKNLYVKGEPIINYYDPLVFPSDEFDASISQVNEKINQSLAFIRRSDELLHNVNTGKSTTNIMITAIIIVIIVVLLSLIAIGLLLYCKAK

SEQ ID NO: 9526 - protein, 553 aa, Artificial Sequence
  derived and/or modified protein sequence (wt) from HRSV__AHV81891.1__F-del
MELPILKTNAITTILAAVTLCFTSSQNITEEFYQSTCSAVSKGYLSALRTGWYTSVITIELSNIKENKCNGTDAKVKLIKQELDKYKNAVTELQLLMQSTPAANNRARRELPRFMNYTLNNTKTTNVTLSKKRKRRFLGFLLGVGSAIASGIAVSKVLHLEGEVNKIKSALLSTNKAVVSLSNGVSVLTSKVLDLKNYIDKQLLPIVNKQSCSISNIETVIEFQQKNNRLLEITREFSVNAGVTTPVSTYMLTNSELLSLINDMPITNDQKKLMSNNVQIVRQQSYSIMSIIKEEVLAYVVQLPLYGVIDTPCWKLHTSPLCTTNTKEGSNICLTRTDRGWYCDNAGSVSFFPQAETCKVQSNRVFCDTMNSLTLPSEVNLCNIDIFNPKYDCKIMTSKTDVSSSVITSLGAIVSCYGKTKCTASNKNRGIIKTFSNGCDYVSNKGVDTVSVGNTLYYVNKQEGKSLYVKGEPIINFYDPLVFPSDEFDASISQVNEKINQSLAFIRKSDELLHNVNAGKSTTNIMITTIIIVIIVILLSLIAVGLLLYCKAR

SEQ ID NO: 9527 - protein, 553 aa, Artificial Sequence
  derived and/or modified protein sequence (wt) from HRSV__AHV81880.1__F-del
MDLPILKTNAITTILAAVTLCFTSSQNITEEFYQSTCSAVSKGYLSALRTGWYTSVITIELSNIKENKCNGTDAKVKLIKQELDKYKNAVTELQLLMQSTPASNNRARRELPRFMNHTLNNTKNTNVTLSKKRKRRFLGFLLGVGSAIASGIAVSKVLHLEGEVNKIKSALLSTNKAVVSLSNGVSVLTSKVLDLKNYIDKQLLPIVNKQSCSISNIETVIEFQQKNNRLLEITREFSVNAGVTTPVSTYMLTNSELLSLINDMPITNDQKKLMSNNVQIVRQQSYSIMSIIKEEVLAYVVQLPLYGVIDTPCWKLHTSPLCTTNTKEGSNICLTRTDRGWYCDNAGSVSFFPQAETCKVQSNRVFCDTMNSLTLPSEVNLCNIDIFNPKYDCKIMTSKTDVSSSVITSLGAIVSCYGKTKCTASNKNRGIIKTFSNGCDYVSNKGVDTVSVGNTLYYVNKQEGKSLYVKGEPIINFYDPLVFPSDEFDASISQVNEKINQSLAFIRKSDELLHNVNAGKSTTNIMITTIIIVIVVILLSLIAVGLLLYCKAR

SEQ ID NO: 9528 - protein, 553 aa, Artificial Sequence
  derived and/or modified protein sequence (wt) from HRSV__AHV81836.1__F-del
MELLIHRSSAIFLTLAINALYLTSSQNITEEFYQSTCSAVSRGYLSALRTGWYTSVITIELSNIKETKCNGTDTKVKLIKQELDKYKNAVTELQLLMQNTPAVNNRARREAPQYMNCTINTTKNLNVSISKKRKRRFLGFLLGVGSAIASGIAVSKVLHLEGEVNKIKNALLSTNKAVVSLSNGVSVLTSKVLDLKNYINNQLLPIVNQQSCRISNIETVIEFQQKNSRLLEITREFSVNAGVTTPLSTYMLTNSELLSLINDMPITNDQKKLMSSNVQIVRQQSYSIMSIIKEEVLAYVVQLPIYGVIDTPCWKLHTSPLCTTNIKEGSNICLTRTDRGWYCDNAGSVSFFPQADTCKVQSNRVFCDTMNSLTLPSEVSLCNTDIFNSKYDCKIMTSKTDISSSVITSLGAIVSCYGKTKCTASNKNRGIIKTFSNGCDYVSNKGVDTVSVGNTLYYVNKLEGKNLYVKGEPIINYYDPLVFPSDEFDASISQVNEKINQSLAFIRRSDELLHNVNTGKSTTNIMITAIIIVIIVVLLSLIAIGLLLYCKAK

SEQ ID NO: 9529 - protein, 553 aa, Artificial Sequence
  derived and/or modified protein sequence (wt) from HRSV__AHV81682.1__F-del
MELPVLKTNAITTILAAVTLCFASSQNITEEFYQSTCSAVSKGYLSALRTGWYTSVITIELSNIKENKCNGTDAKVKLIKQELDKYKNAVTELQLLMQSTPAANSRARRELPRFMNYTLNNTKNTNVTLSKKRKRRFLGFLLGVGSAIASGIAVSKVLHLEGEVNKIKSALLSTNKAVVSLSNGVSVLTSKVLDLKNYIDKQLLPIVNKQSCSISNIETVIEFQQKNNRLLEITREFSVNAGVTTPVSTYMLTNSELLSLINDMPITNDQKKLMSSNVQIVRQQSYSIMSIIKEEVLAYVVQLPLYGVIDTPCWKLHTSPLCTTNTKEGSNICLTRTDRGWYCDNAGSVSFFPQAETCKVQSNRVFCDTMNSLTLPSEVNLCNIDIFNPKYDCKIMTSKTDVSSSVITSLGAIVSCYGKTKCTASNKNRGIIKTFSNGCDYVSNKGVDTVSVGNTLYYVNKQEGKSLYVKGEPIINFYDPLVFPSDEFDASISQVNEKINQSLAFIRKSDELLHNVNAGKSTTNIMITTIIIVIIVILLALIAVGLLLYCKAR

SEQ ID NO: 9530 - protein, 553 aa, Artificial Sequence
  derived and/or modified protein sequence (wt) from HRSV__AHV81649.1__F-del
MELPIHRSSAIFLTLAINALYLTSSQNITEEFYQSTCSAVSRGYLSALRTGWYTSVITIELSNIKETKCNGTDTKVKLIKQELDKYKNAVTELQLLMQNTPAVNNRARREAPQYMNYTINTTKNLNVSISKKRKRRFLGFLLGVGSAIASGIAVSKVLHLEGEVNKIKNALLSTNKAVVSLSNGVSVLTSKVLDLKNYINNQLLPIVNQQSCRISNIETVIEFQQKNSRLLEITREFSVNAGVTTPLSTYMLTNSELLSLINDMPITNDQKKLMSSNVQIVRQQSYSIMSIIKEEVLAYVVQLPIYGVIDTPCWKLHTSPLCTTNIKEGSNICLTRTDRGWYCDNAGSVSFFPQADTCKVQSNRVFCDTMNSLTLPSEVSLCNTDIFNSKYDCKIMTSKTDISSSVITSLGAIVSCYGKTKCTASNKNRGIIKTFSNGCDYVSNKGVDTVSVGNTLYYVNKLEGKNLYVKGEPIINYYDPLVFPSDEFDASISQVNEKINQSLAFIRRSDELLHNVNTGKSTTNIMITAIIIVIIVVLLSLIAIGLLLYCKAK

SEQ ID NO: 9531 - protein, 553 aa, Artificial Sequence
  derived and/or modified protein sequence (wt) from HRSV__AHV81484.1__F-del
MELPILKTNAITTILAAVTLCFASSQNITEEFYQSTCSAVSKGYLSALRTGWYTSVITIELSNIKENKCNGTDTKVKLIKQELDKYKNAVTELQLLMQSTPAANNRARRELPRFMNYTLNNTKTTNVTLSKKRKRRFLGFLLGVGSAIASGIAVSKVLHLEGEVNKIKSALLSTNKAVVSLSNGVSVLTSKVLDLKNYIDKQLLPIVNKQSCSISNIETVIEFQQKNNRLLEITREFSVNAGVTTPVSTYMLTNSELLSLINDMPITNDQKKLMSNNVQIVRQQSYSIMSIIKEEVLAYVVQLPLYGVIDTPCWKLHTSPLCTTNTKEGSNICLTRTDRGWYCDNAGSVSFFPQAETCKVQSNRVFCDTMNSLTLPSEVNLCNVDIFNPKYDCKIMTSKTDVSSSVITSLGAIVSCYGKTKCTASNKNRGIIKTFSNGCDYVSNKGVDTVSVGNTLYYVNKQEGKSLYVKGEPIINFYDPLVFPSDEFDASISQVNEKINQSLAFIRKSDELLHNVNAGKSTTNIMITTIIIVIIVILLSLIAVGLLLYCKAR

SEQ ID NO: 9532 - protein, 553 aa, Artificial Sequence
  derived and/or modified protein sequence (wt) from HRSV__AHV81462.1__F-del
MELPILKTNAITTILAAVTLCFASSQNITEEFYQSTCSAVSKGYLSALRTGWYTSVITIELSNIKENKCNGTDAKVKLIKQELDRYKNAVTELQLLMQSTPAANSRARRELPRFMNYTLNNTKNTNVTLSKKRKRRFLGFLLGVGSAIASGIAVSKVLHLEGEVNKIKSALLSTNKAVVSLSNGVSVLTSKVLDLKNYIDKQLLPIVNKQSCSISNIETVIEFQQKNNRLLEITREFSVNAGVTTPVSTYMLTNSELLSLINDMPITNDQKKLMSSNVQIVRQQSYSIMSIIKEEVLAYVVQLPLYGVIDTPCWKLHTSPLCTTNTKEGSNICLTRTDRGWYCDNAGSVSFFPQAETCKVQSNRVFCDTMNSLTLPSEVNLCNIDIFNPKYDCKIMTSKTDVSSSVITSLGAIVSCYGKTKCTASNKNRGIIKTFSNGCDYVSNKGVDTVSVGNTLYYVNKQEGKSLYVKGEPIINFYDPLVFPSDEFDASISQVNEKINQSLAFIRKSDELLHNVNAGKSTTNIMITTIIIVIIVILLALIAVGLLLYCKAR

SEQ ID NO: 9533 - protein, 553 aa, Artificial Sequence
  derived and/or modified protein sequence (wt) from HRSV__AHV81385.1__F-del
MDLPILKTNAITTILAAVTLCFASSQNITEEFYQSTCSAVSKGYLSALRTGWYTSVITIELSNIKENKCNGTDAKVKLIKQELDKYKNAVTELQLLMQSTPASNNRARRELPRFMNHTLNNTKNTNVTLSKKRKRRFLGFLLGVGSAIASGIAVSKVLHLEGEVNKIKSALLSTNKAVVSLSNGVSVLTSKVLDLKNYIDKQLLPIVNKQSCSISNIETVIEFQQKNNRLLEITREFSVNAGVTTPVSTYMLTNSELLSLINDMPITNDQKKLMSNNVQIVRQQSYSIMSIIKEEVLAYVVQLPLYGVIDTPCWKLHTSPLCTTNTKEGSNICLTRTDRGWYCDNAGSVSFFPQAETCKVQSNRVFCDTMNSLTLPSEVNLCNIDIFNPKYDCKIMTSKTDVSSSVITSLGAIVSCYGKTKCTASNKNRGIIKTFSNGCDYVSNKGVDTVSVGNTLYYVNKQEGKSLYVKGEPIINFYDPLVFPSDEFDASISQVNEKINQSLAFIRKSDELLHNVNAGKSTTNIMITTIIIVIVVILLSLIAVGLLLYCKAR

SEQ ID NO: 9534 - protein, 553 aa, Artificial Sequence
  derived and/or modified protein sequence (wt) from HRSV__AHV81363.1__F-del
MELPILKTNAITTVLAAVTLCFASSQNITEEFYQSTCSAVSKGYLSALRTGWYTSVITIELSNIKENKCNGTDAKVKLIKQELDKYKNAVTELQLLMQSTPAANSRARRELPRFMNYTLNNTKNTNVTLSKKRKRRFLGFLLGVGSAIASGIAVSKVLHLEGEVNKIKSALLSTNKAVVSLSNGVSVLTSKVLDLKNYIDKQLLPIVNKQSCSISNIETVIEFQQKNNRLLEITREFSVNAGVTTPVSTYMLTNSELLSLINDMPITNDQKKLMSSNVQIVRQQSYSIMSIIKEEVLAYVVQLPLYGVIDTPCWKLHTSPLCTTNTKEGSNICLTRTDRGWYCDNAGSVSFFPQAETCKVQSNRVFCDTMNSLTLPSEVNLCNIDIFNPKYDCKIMTSKTDVSSSVITSLGAIVSCYGKTKCTASNKNRGIIKTFSNGCDYVSNKGVDTVSVGNTLYYVNKQEGKSLYVKGEPIINFYDPLVFPSDEFDASISQVNEKINQSLAFIRKSDELLHNVNAGKSTTNIMITTIIIVIIVILLALIAVGLLLYCKAR

SEQ ID NO: 9535 - protein, 553 aa, Artificial Sequence
  derived and/or modified protein sequence (wt) from HRSV__AHV81330.1__F-del
MELPILKTNAITTILAAVTLCFASSQNITEEFYQSTCSAVSKGFLSALRTGWYTSVITIELSNIKENKCNGTDAKVKLIKQELDKYKNAVTELQLLMQSTPAANSRARRELPRFMNYTLNNTKNTNVTLSKKRKRRFLGFLLGVGSAIASGIAVSKVLHLEGEVNKIKSALLSTNKAVVSLSNGVSVLTSKVLDLKNYIDKQLLPIVNKQSCSISNIETVIEFQQKNNRLLEITREFSVNAGVTTPVSTYMLTNSELLSLINDMPITNDQKKLMSSNVQIVRQQSYSIMSIIKEEVLAYVVQLPLYGVIDTPCWKLHTSPLCTTNTKEGSNICLTRTDRGWYCDNAGSVSFFPQAETCKVQSNRVFCDTMNSLTLPSEVNLCNIDIFNPKYDCKIMTSKTDVSSSVITSLGAIVSCYGKTKCTASNKNRGIIKTFSNGCDYVSNKGVDTVSVGNTLYYVNKQEGKSLYVKGEPIINFYDPLVFPSDEFDASISQVNEKINQSLAFIRKSDELLHNVNAGKSTTNIMITTIIIVIIVILLALIAVGLLLYCKAR

SEQ ID NO: 9536 - protein, 553 aa, Artificial Sequence
  derived and/or modified protein sequence (wt) from HRSV__AHV81253.1__F-del
MELPILKTNAITTILAAVTLCFASSQNITEEFYQSTCSAVSKGYLSALRTGWYTSVITIELSNIKENKCNGTDAKVKLIKQELDKYKNAVTELQLLMQSTPAANSRARRELPRFMNYTLNNTNNTNVTLSKKRKRRFLGFLLGVGSAIASGIAVSKVLHLEGEVNKIKSALLSTNKAVVSLSNGVSVLTSKVLDLKNYIDKQLLPIVNKQSCSISNIETVIEFQQKNNRLLEITREFSVNAGVTTPVSTYMLTNSELLSLINDMPITNDQKKLMSNNVQIVRQQSYSIMSIIKEEVLAYVVQLPLYGVIDTPCWKLHTSPLCTTNTKEGSNICLTRTDRGWYCDNAGSVSFFPQADTCKVQSNRVFCDTMNSLTLPSEVNLCNIDIFNPKYDCKIMTSKTDVSSSVITSLGAIVSCYGKTKCTASNKNRGIIKTFSNGCDYVSNKGVDTVSVGNTLYYVNKQEGKSLYVKGEPIINFYDPLVFPSDEFDASISQVNEKINQSLAFIRKSDELLHNVNAGKSTTNIMITTIIIVIIVILLSLIAVGLLLYCKAR

SEQ ID NO: 9537 - protein, 553 aa, Artificial Sequence
  derived and/or modified protein sequence (wt) from HRSV__AHV81154.1__F-del
MELPILKTNAITTILAAVTLCFASSQNITEEFYQSTCSAVSKGYLSALRTGWYTSVITIELSNIKENKCNGTDTKVKLIKQELDKYKNAVTELQLLMQSTPAANNRARRELPRFMNYTLNNTKTTNVTLSKKRKRRFLGFLLGVGSAIASGIAVSKVLHLEGEVNKIKSALLSTNKAVVSLSNGVSVLTSKVLDLKNYIDKQLLPIVNKQSCSISNIETVIEFQQKNNRLLEITREFSVNAGVTTPVSTYMLTNSELLSLINDMPITNDQKKLMSNNVQIVRQQSYSIMSIIKEEVLAYVVQLPLYGVIDTPCWKLHTSPLCTTNTKEGSNICLTRTDRGWYCDNAGSVSFFPQAETCKVQSNRVFCDTMNSLTLPSEVNLCNIDIFNPKYDCKIMTSKTDVSSSVITSLGAIVSCYGKTKCTASNKNRGIIKTFSNGCDYVSNKGVDTVSVGNTLYYVNKQEGKSLYVKGEPIINFYDPLVFPSDEFDASISQVNEKINQSLAFIRKSDELLHNVNAGKSTTNIMITTIIIVIIVILLSLIAVGLLLYCKAR

SEQ ID NO: 9538 - protein, 553 aa, Artificial Sequence
  derived and/or modified protein sequence (wt) from HRSV__AHV81122.1__F-del
MELPILKTNAITTILAAVTLCFASSQNITEEFYQSTCSAVSKGYLSALRTGWYTSVITIELSNIKENKCNGTDAKVKLIKQELDKYKNAVTELQLLMQSTPAANSRARRELPRFMNYTLNNTNNTNVTLSKKRKRRFLGFLLGVGSAIASGIAVSKVLHLEGEVKKIKSALLSTNKAVVSLSNGVSVLTSKVLDLKNYIDKQLLPIVNKQSCSISNIETVIEFQQKNNRLLEITREFSVNAGVTTPVSTYMLTNSELLSLINDMPITNDQKKLMSNNVQIVRQQSYSIMSIIKEEVLAYVVQLPLYGVIDTPCWKLHTSPLCTTNTKEGSNICLTRTDRGWYCDNAGSVSFFPQADTCKVQSNRVFCDTMNSLTLPSEVNLCNIDIFNPKYDCKIMTSKTDVSSSVITSLGAIVSCYGKTKCTASNKNRGIIKTFSNGCDYVSNKGVDTVSVGNTLYYVNKQEGKSLYVKGEPIINFYDPLVFPSDEFDASISQVNEKINQSLAFIRKSDELLHNVNAGKSTTNIMITTIIIVIIVILLSLIAVGLLLYCKAR

SEQ ID NO: 9539 - protein, 553 aa, Artificial Sequence
  derived and/or modified protein sequence (wt) from HRSV__AHV81089.1__F-del
MGLLIHGSSAVFLTLAINALYLTSSQNITEEFYQSTCSAVSRGYLSALRTGWYTSVITIELSNIKETKCNGTDTKVKLIKQELDKYKNAVTELQLLMQNTPAVNNRARREAPQYMNYTINTTKNLNVSISKKRKRRFLGFLLGVGSAIASGIAVSKVLHLEGEVNKIKNALLSTNKAVVSLSNGVSVLTSKVLDLKNYINNQLLPIVNQQSCRISNIETVIEFQQKNSRLLEITREFSVNAGVTTPLSTYMLTNSELLSLINDMPITNDQKKLMSSNVQIVRQQSYSIMSIIKEEVLAYVVQLPIYGVIDTPCWKLHTSPLCTTNIKEGSNICLTRTDRGWYCDNAGSVSFFPQADTCKVQSNRVFCDTMNSLTLPSEVSLCNTDIFNSKYDCKIMTSKTDISSSVITSLGAIVSCYGKTKCTASNKNRGIIKTFSNGCDYVSNKGVDTVSVGNTLYYVNKLEGKNLYVKGEPIINYYDPLVFPSDEFDASISQVNEKINQSLAFIRRSDELLHNVNTGKSTTNIMITAIIIVIIVVLLSLIAIGLLLYCKAK

SEQ ID NO: 9540 - protein, 553 aa, Artificial Sequence
  derived and/or modified protein sequence (wt) from HRSV__AHV81012.1__F-del
MELPILKTNAITTILAAVTLCFASSQNITEEFYQSTCSAVSKGYLSALRTGWYTSVITIELSNIKENKCNGTDAKVKLIKQELDKYKNAVTELQLLMQSTPAANSRARRELPRFMNNTLNNTKNTNVTLSKKRKRRFLGFLLGVGSAIASGIAVSKVLHLEGEVNKIKSALLSTNKAVVSLSNGVSVLTSKVLDLKNYIDKQLLPIVNKQSCSISNIETVIEFQQKNNRLLEITREFSVNAGVTTPVSTYMLTNSELLSLINDMPITNDQKKLMSSNVQIVRQQSYSIMSIIKEEVLAYVVQLPLYGVIDTPCWKLHTSPLCTTNTKEGSNICLTRTDRGWYCDNAGSVSFFPQAETCKVQSNRVFCDTMNSLTLPSEVNLCNIDIFNPKYDCKIMTSKTDVSSSVITSLGAIVSCYGKTKCTASNKNRGIIKTFSNGCDYVSNKGVDTVSVGNTLYYVNKQEGKSLYVKGEPIINFYDPLVFPSDEFDASISQVNEKINQSLAFIRKSDELLHNVNAGKSTTNIMITTIIIVIIVILLALIAVGLLLYCKAR

SEQ ID NO: 9541 - protein, 553 aa, Artificial Sequence
  derived and/or modified protein sequence (wt) from HRSV__AHV80957.1__F-del
MELPILKTNAITTILAAVTLCFASSQNITEEFYQSTCSAVSKGYLSALRTGWYTSVITIELSNIKENKCNGTDAKVKLIKQELDKYKNAVTELQLLMQSTPAANSRARRELPRFMNHTLNNTKNTNVTLSKKRKRRFLGFLLGVGSAIASGIAVSKVLHLEGEVNKIKSALLSTNKAVVSLSNGVSVLTSKVLDLKNYIDKQLLPIVNKQSCSISNIETVIEFQQKNNRLLEITREFSVNAGVTTPVSTYMLTNSELLSLINDMPITNDQKKLMSNNVQIVRQQSYSIMSIIKEEVLAYVVQLPLYGVIDTPCWKLHTSPLCTTNTKEGSNICLTRTDRGWYCDNAGSVSFFPQADTCKVQSNRVFCDTMNSLTLPSEVNLCNTDIFNPKYDCKIMTSKTDVSSSVITSLGAIVSCYGKTKCTASNKNRGIIKTFSNGCDYVSNKGVDTVSVGNTLYYVNKQEGKSLYVKGEPIINFYDPLVFPSDEFDASISQVNEKINQSLAFIRKSDELLHNVNAGKSTTNIMITTIIIVIIVILLSLIAVGLLLYCKAR

SEQ ID NO: 9542 - protein, 553 aa, Artificial Sequence
  derived and/or modified protein sequence (wt) from HRSV__AHV80880.1__F-del
MELPILKTNAITTILAAVTLCFASSQNITEEFYQSTCSAVSKGYLSALRTGWYTSVITIELSNIKENKCNGTDAKVKLIKQELDKYKNAVTELQLLMQSTPAANSRARRELPRFMNYILNNTKNTNVTLSKKRKRRFLGFLLGVGSAIASGIAVSKVLHLEGEVNKIKSALLSTNKAVVSLSNGVSVLTSKVLDLKNYIDKQLLPIVNKQSCSISNIETVIEFQQKNNRLLEITREFSVNAGVTTPVSTYMLTNSELLSLINDMPITNDQKKLMSSNVQIVRQQSYSIMSIIKEEVLAYVVQLPLYGVIDTPCWKLHTSPLCTTNTKEGSNICLTRTDRGWYCDNAGSVSFFPQAETCKVQSNRVFCDTMNSLTLPSEVNLCNIDIFNPKYDCKIMTSKTDVSSSVITSLGAIVSCYGKTKCTASNKNRGIIKTFSNGCDYVSNKGVDTVSVGNTLYYVNKQEGKSLYVKGEPIINFYDPLVFPSDEFDASISQVNEKINQSLAFIRKSDELLHNVNAGKSTTNIMITTIIIVIIVILLALIAVGLLLYCKAR

SEQ ID NO: 9543 - protein, 553 aa, Artificial Sequence
  derived and/or modified protein sequence (wt) from HRSV__AHV80869.1__F-del
MELPILKTNAITTILAAVTLCLASSQNITEEFYQSTCSAVSKGYLSALRTGWYTSVITIELSNIKENKCNGTDAKVKLIKQELDKYKNAVTELQLLMQSTPAANSRARRELPRFRNYTLNNTKNTNVTLSKKRKRRFLGFLLGVGSAIASGIAVSKVLHLEGEVNKIKSALLSTNKAVVSLSNGVSVLTSKVLDLKNYIDKQLLPIVNKQSCSISNIETVIEFQQKNNRLLEITREFSVNAGVTTPVSTYMLTNSELLSLINDMPITNDQKKLMSNNVQIVRQQSYSIMSIIKEEVLAYVVQLPLYGVIDTPCWKLHTSPLCTTNTKEGSNICLTRTDRGWYCDNAGSVSFFPQAETCKVQSNRVFCDTMNSLTLPSEVNLCNIDIFNPKYDCKIMTSKTDVSSSVITSLGAIVSCYGKTKCTASNKNRGIIKTFSNGCDYVSNKGVDTVSVGNTLYYVNKQEGKSLYVKGEPIINFYDPLVFPSDEFDASISQVNEKINQSLAFIRKSDELLHNVNAGKSTTNIMITTIIIVIIVILLSLIAVGLLLYCKAR

SEQ ID NO: 9544 - protein, 553 aa, Artificial Sequence
  derived and/or modified protein sequence (wt) from HRSV__AHV80836.1__F-del
MELLIHRSSAIFLTLAINALYLTSSQNITEEFYQSTCSAVSRGYLSALRTGWYTSVITIELSNIKETKCNGTDTKVKLIKQELDKYKNAVTELQLLMQNTPAVNNRARREAPQYMNYTINTTKNLNVSISKKRKRRFLGFLLGVGSAIASGIAVSKVLHLEGEVNKIKNALLSTNKAVVSLSNGVSVLTSKVLDLKNYINNQLLPIVNQQSCRISNIETVIEFQQKNSRLLEITREFSVNAGVTTPLSTYMLTNSELLSLINDMPITNDQKKLMSSNVQIVRQQSYSIMSIIKEEVLAYVVQLPIYGVIDTPCWKLHTSPLCATNIKEGSNICLTRTDRGWYCDNAGSVSFFPQADTCKVQSNRVFCDTMNSLTLPSEVSLCNTDIFNSKYDCKIMTSKTDISSSVITSLGAIVSCYGKTKCTASNKNRGIIKTFSNGCDYVSNKGVDTVSVGNTLYYVNKLEGKNLYVKGEPIINYYDPLVFPSDEFDASISQVNEKINQSLAFIRRSDELLHNVNTGKSTTNIMITAIIIVIIVVLLSLIAIGLLLYCKAK

SEQ ID NO: 9545 - protein, 553 aa, Artificial Sequence
  derived and/or modified protein sequence (wt) from HRSV__AHV80803.1__F-del
MELLIHRSSAIFLTLAINALYLTSSQNITEEFYQSTCSAVSRGYLSALRTGWYTSVITIELSNIKETKCNGTDTKVKLIKQELDKYKNAVTELQLLMQNTPAVNNRARREAPQYMNYTINTTKNLNVSISKKRKRRFLGFLLGVGSAIASGIAVSKVLHLEGEVNKIKDALLSTNKAVVSLSNGVSVLTSKVLDLKNYINNQLLPIVNQQSCRISNIETVIEFQQKNSRLLEITREFSVNAGVTTPLSTYMLTNSELLSLINDMPITNDQKKLMSSNVQIVRQQSYSIMSIIKEEVLAYVVQLPIYGVIDTPCWKLHTSPLCTTNIKEGSNICLTRTDRGWYCDNAGSVSFFPQADTCKVQSNRVFCDTMNSLTLPSEVSLCNTDIFNSKYDCKIMTSKTDISSSVITSLGAIVSCYGKTKCTASNKNRGIIKTFSNGCDYVSNKGVDTVSVGNTLYYVNKLEGKNLYVKGEPIINYYDPLVFPSDEFDASISQVNEKINQSLAFIRRSDELLHNVNTGKSTTNIMITAIIIVIIVVLLSLIAIGLLLYCKAK

SEQ ID NO: 9546 - protein, 553 aa, Artificial Sequence
  derived and/or modified protein sequence (wt) from HRSV__AGG39559.1__F-del
MELLIHRSSAIFLTLAINALYLTSSQNITEEFYQSTCSAVSRGYFSALRTGWYTSVITIELSNIKETKCNGTDTKVKLIKQELDKYKNAVTELQQLMQNTPAANNRARREAPQYMNYTINTTKNLNVSISKKRKRRFLGFLLGVGSAIASGIAVSKVLHLEGEVNKIKNALLSTNKAVVSLSNGVSVLTSKVLDLKNYINNQLLPIVNQQSCRISNIETVIEFQQKNSRLLEITREFSVNAGVTTPLSTYMLTNSELLSLINDMPITNDQKKLMSSNVQIVRQQSYSIMSIIKEEVLAYVVQLPIYGVIDTPCWKLHTSPLCTTNIKEGSNICLTRTDRGWYCDNAGSVSFFPQADTCKVQSNRVFCDTMNSLTLPSEVSLCNTDIFNSKYDCKIMTSKTDISSSVITSLGAIVSCYGKTKCTASNKNRGIIKTFSNGCDYVSNKGVDTVSVGNTLYYVNKLEGKNLYVKGEPIINYYDPLVFPSDEFDASISQVNEKINQSLAFIRRSDELLHNVNTGKSTTNIMITAIIIVIIVVLLSLIAIGLLLYCKAK

SEQ ID NO: 9547 - protein, 553 aa, Artificial Sequence
  derived and/or modified protein sequence (wt) from HRSV__AGG39562.1__F-del
MELLIHRSSAIFLTLAINALYLTSSQNITEEFYQSTCSAVSRGYFSALRTGWYTSVITIELSNIKETKCNGTDTKVKLIKQELDKYKNAVTELQLLMQNTPSANNRARREAPQYMNYTINTTKNLNVSISKKRKRRFLGFLLGVGSAIASGIAVSKVLHLEGEVNKIKNALLSTNKAVVSLSNGVSVLTSKVLDLKNYINNQLLPIVNQQSCRISNIETVIEFQQKNSRLLEITREFSVNAGVTTPLSTYMLTNSELLSLINDMPITNDQKKLMSSNVQIVRQQSYSIMSIIKEEVLAYVVQLPIYGVIDTPCWKLHTSPLCTTNIKEGSNICLTRTDRGWYCDNAGSVSFFPQADTCKVQSNRVFCDTMNSLTLPSEVSLCNTDIFNSKYDCKIMTSKTDISSSVITSLGAIVSCYGKTKCTASNKNRGIIKTFSNGCDYVSNKGVDTVSVGNTLYYVNKLEGKNLYVKGEPIINYYDPLVFPSDEFDASISQVNEKINQSLAFIRRSDELLHNVNAGKSTTNIMITAIIIVIIVVLLSLIAIGLLLYCKAK

SEQ ID NO: 9548 - protein, 553 aa, Artificial Sequence
  derived and/or modified protein sequence (wt) from HRSV__AGG39556.1__F-del
MELLIHRSSAIFLTLAINALYLTSSQNITEEFYQSTCSAVSRGYFSALRTGWYTSVITIELSNIKETKCNGTDTKVKLIKQELDKYKNAVTELQLLMQNTPAANNRARREAPQYMNYTINTTKNLNVSISKKRKRRFLGFLLGVGSAIASGIAVSKVLHLEGEVNKIKNALLSTNKAVVSLSNGVSVLTSKVLDLKNYINNQLLPIVNQQSCRISNIETVIEFQQKNSRLLEITREFSVNAGVTTPLSTYMLTNSELLSLINDMPITNDQKKLMSSNVQIVRQQSYSIMSIMKEEVLAYVVQLPIYGVIDTPCWKLHTSPLCTTNIKEGSNICLTRTDRGWYCDNAGSVSFFPQADTCKVQSNRVFCDTMNSLTLPSEVSLCNTDIFNSKYDCKIMTSKTDISSSVITSLGAIVSCYGKTKCTASNKNRGIIKTFSNGCDYVSNKGVDTVSVGNTLYYVNKLEGKNLYVKGEPIINYYDPLVFPSDEFDASISQVNEKINQSLAFIRRSDELLHNVNTGKSTTNIMITAIIIVIIVVLLSLIAIGLLLYCKAK

SEQ ID NO: 9549 - protein, 553 aa, Artificial Sequence
  derived and/or modified protein sequence (wt) from HRSV__AGG39550.1__F-del
MELLIHRSSAIFLTLAINALYLTSSQNITEEFYQSTCSAVSRGYFSALRTGWYTSVITIELSNIKETKCNGTDTKVKLIKQELDKYKNAVTELQLLMQNTPAANNRARREAPQYMNYTINTTKNLNVSISKKRKRRFLGFLLGVGSAIASGIAVSKVLHLEGEVNKIKNALLSTNKAVVSLSNGVSVLTSKVLDLKNYINNQLLPIVNQQSCRIFNIETVIEFQQKNSRLLEITREFSVNAGVTTPLSTYMLTNSELLSLINDMPITNDQKKLMSSNVQIVRQQSYSIMSIIKEEVLAYVVQLPIYGVIDTPCWKLHTSPLCTTNIKEGSNICLTRTDRGWYCDNAGSVSFFPQADTCKVQSNRVFCDTMNSLTLPSEVSLCNTDIFNSKYDCKIMTSKTDISSSVITSLGAIVSCYGKTKCTASNKNRGIIKTFSNGCDYVSNKGVDTVSVGNTLYYVNKLEGKNLYVKGEPIINYYDPLVFPSDEFDASISQVNEKINQSLAFIRRSDELLHNVNAGKSTTNIMITAIIIVIIVVLLSLIAIGLLLYCKAK

SEQ ID NO: 9550 - protein, 553 aa, Artificial Sequence
  derived and/or modified protein sequence (wt) from HRSV__AGG39547.1__F-del
MELLIHRSSAIFLTLAINALYLTSSQNITEEFYQSTCSAVSRGYFSALRTGWYTSVITIELSNIKETKCNGTDTKVKLIKQELDKYKNAVTELQLLMQNTPAANNRARREAPQYMNYTINTTKNLNVSISKKRKRRFLGFLLGVGSAIASGIAVSKVLHLEGEVNKIKNALLSTNKAVVSLSNGVSVLTSKVLDLKNYINNQLLPILNQQSCRISNIETVIEFQQKNSRLLEITREFSVNAGVTTPLSTYMLTNSELLSLINDMPITNDQKKLMSSNVQIVRQQSYSIMSIIKEEVLAYVVQLPIYGVIDTPCWKLHTSPLCTTNIKEGSNICLTRTDRGWYCDNAGSVSFFPQADTCKVQSNRVFCDTMNSLTLPSEVSLCNTDIFNSKYDCKIMTSKTDISSSVITSLGAIVSCYGKTKCTASNKNRGIIKTFSNGCDYVSNKGVDTVSVGNTLYYVNKLEGKNLYVKGEPIINYYDPLVFPSDEFDASISQVNEKINQSLAFIRRSDELLHNVNAGKSTTNIMITAIIIVIIVVLLSLIAIGLLLYCKAK

SEQ ID NO: 9551 - protein, 553 aa, Artificial Sequence
  derived and/or modified protein sequence (wt) from HRSV__AGG39544.1__F-del
MELLIHRSSAIFLTLAINALYLTSSQNITEEFYQSTCSAVSRGYFSALRTGWYTSVITIELSNIKETKCNGTDTKVKLIKQELDKYKNAVTELQLLMQNTPAANNRARREAPQYMNYTINTTKNLNVSISKKRKRRFLGFLLGVGSAIASGIAVSKVLHLEGEVNKIKNALLSTNKAVVSLSNGVSVLTSKVLDLKNYINNQILPIVNQQSCRISNIETVIEFQQKNSRLLEITREFSVNAGVTTPLSTYMLTNSELLSLINDMPITNDQKKLMSSNVQIVRQQSYSIMSIIKEEVLAYVVQLPIYGVIDTPCWKLHTSPLCTTNIKEGSNICLTRTDRGWYCDNAGSVSFFPQADTCKVQSNRVFCDTMNSLTLPSEVSLCNTDIFNSKYDCKIMTSKTDISSSVITSLGAIVSCYGKTKCTASNKNRGIIKTFSNGCDYVSNKGVDTVSVGNTLYYVNKLEGKNLYVKGEPIINYYDPLVFPSDEFDASISQVNEKINQSLAFIRRSDELLHNVNTGKSTTNIMITAIIIVIIVVLLSLIAIGLLLYCKAK

SEQ ID NO: 9552 - protein, 553 aa, Artificial Sequence
  derived and/or modified protein sequence (wt) from HRSV__AGG39541.1__F-del
MELLIHRSSAIFLTLAINALYLTSSQNITEEFYQSTCSAVSRGYFSALRTGWYTSVITIELSNIKETKCNGTDTKVKLIKQELDKYKNAVTELQLLMQNTPAANNRARREAPQYMNYTINTTKNLNVSISKKRKRRFLGFLLGVGSAIASGIAVSKVLHLEGEVNKIKNALLSTNKAVVSLSNGVSVLTSKVLDLKNYINNQLLPIVNQQSCRIFNIETVIEFQQKNSRLLEITREFSVNAGVTTPLSTYMLTNSELLSLINDMPITNDQKKLMSSNVQIVRQQSYSIMSIIKEEVLAYVVQLPIYGVIDTPCWKLHTSPLCTTNIKEGSNICLTRTDRGWYCDNAGSVSFFPQADTCKVQSNRVFCDTMNSLTLPSEVSLCNTDIFNSKYDCKIMTSKTDISSSVITSLGAIVSCYGKTKCTASNKNRGIIKTFSNGCDYVSNKGVDTVSVGNTLYYVNKLEGKNLYVKGEPIINYYDPLVFPSDEFDASISQVNEKINQSLAFIRRSDELLHNVNTGKSTTNIMITAIIIVIIVVLLSLIAIGLLLYCKAK

SEQ ID NO: 9553 - protein, 553 aa, Artificial Sequence
  derived and/or modified protein sequence (wt) from HRSV__AGG39529.1__F-del
MELLIHRSNAIFLTLAINALYLTSSQNITEEFYQSTCSAVSRGYFSALRTGWYTSVITIELSNIKETKCNGTDTKVKLIKQELDKYKNAVTELQLLMQNTPAANNRARREAPQYMNYTINTTKNLNVSISKKRKRRFLGFLLGVGSAIASGIAVSKVLHLEGEVNKIKNALLSTNKAVVSLSNGVSVLTSKVLDLKNYINNQLLPIVNQQSCRISNIETVIEFQQKNSRLLEITREFSVNAGVTTPLSTYMLTNSELLSLINDMPITNDQKKLMSSNVQIVRQQSYSIMSIIKEEVLAYVVQLPIYGVIDTPCWKLHTSPLCTTNIKEGSNICLTRTDRGWYCDNAGSVSFFPQADTCKVQSNRVFCDTMNSLTLPSEVSLCNTDIFNSKYDCKIMTSKTDISSSVITSLGAIVSCYGKTKCTASNKNRGIIKTFSNGCDYVSNKGVDTVSVGNTLYYVNKLEGKNLYVKGEPIINYYDPLVFPSDEFDASISQVNEKINQSLAFIRRSDELLHNVNAGKSTTNIMITAIIIVIIVVLLSLIAIGLLLYCKAK

SEQ ID NO: 9554 - protein, 553 aa, Artificial Sequence
  derived and/or modified protein sequence (wt) from HRSV__AGG39526.1__F-del
MELLIHRSSAIFLTLAINALYLTSSQNITEEFYQSTCSAVSRGYFSALRTGWYTSVITIELSNIKETKCNGTDTKVKLIKQELNKYKNAVTELQLLMQNTPAANNRARREAPQYMNYTINTTKNLNVSISKKRKRRFLGFLLGVGSAIASGIAVSKVLHLEGEVNKIKNALLSTNKAVVSLSNGVSVLTSKVLDLKNYINNQLLPIVNQQSCRISNIETVIEFQQKNSRLLEITREFSVNAGVTTPLSTYMLTNSELLSLINDMPITNDQKKLMSSNVQIVRQQSYSIMSIIKEEVLAYVVQLPIYGVIDTPCWKLHTSPLCTTNIKEGSNICLTRTDRGWYCDNAGSVSFFPQADTCKVQSNRVFCDTMNSLTLPSEVSLCNTDIFNSKYDCKIMTSKTDISSSVITSLGAIVSCYGKTKCTASNKNRGIIKTFSNGCDYVSNKGVDTVSVGNTLYYVNKLEGKNLYVKGEPIINYYDPLVFPSDEFDASISQVNEKINQSLAFIRRSDELLHNVNAGKSTTNIMITAIIIVIIVVLLSLIAIGLLLYCKAK

SEQ ID NO: 9555 - protein, 553 aa, Artificial Sequence
  derived and/or modified protein sequence (wt) from HRSV__AGG39523.1__F-del
MELLIHRSIAIFLTLAINALYLTSSQNITEEFYQSTCSAVSRGYFSALRTGWYTSVITIELSNITETKCNGTDTKVKLIKQELDKYKNAVTELQLLMQNTPAANNRARREAPQYMNYTINTTKNLNVSISKKRKRRFLGFLLGVGSAIASGIAVSKVLHLEGEVNKIKNALLSTNKAVVSLSNGVSVLTSKVLDLKNYINNQLLPIVNQQSCRISNIETVIEFQQKNSRLLEITREFSVNAGVTTPLSTYMLTNSELLSLINDMPITNDQKKLMSSNVQIVRQQSYSIMSIIKEEVLAYVVQLPIYGVIDTPCWKLHTSPLCTTNIKEGSNICLTRTDRGWYCDNAGSVSFFPQADTCKVQSNRVFCDTMNSLTLPSEVSLCNTDIFNSKYDCKIMTSKTDISSSVITSLGAIVSCYGKTKCTASNKNRGIIKTFSNGCDYVSNKGVDTVSVGNTLYYVNKLEGKNLYVKGEPIINYYDPLVFPSDEFDASISQVNEKINQSLAFIRRSDELLHNVNVGKSTTNIMITAIIIVIIVVLLSLIAIGLLLYCKAK

SEQ ID NO: 9556 - protein, 553 aa, Artificial Sequence
  derived and/or modified protein sequence (wt) from HRSV__AGG39514.1__F-del
MELLIHRSSAIFLTLAINALYLTSSQNITEEFYQSTCSAVSRGYLSALRTGWYTSVITIELSNIKETKCNGTDTKVKLIKQELDKYKNAVTELQLLMQNTPVANNRARREAPQYMNYTINTTKNLNVSISKKRKRRFLGFLLGVGSAIASGIAVSKVLHLEGEVNKIKNALLSTNKAVVSLSNGVSVLTSKVLDLKNYINNQLLPIVNQQSCRISNIETVIEFQQKNSRLLEITREFSVNAGVTTPLSTYMLTNSELLSLINDMPITNDQKKLMSSNVQIVRQQSYSIMSIIKEEVLAYVVQLPIYGVIDTPCWKLHTSPLCTTNTKEGSNICLTRTDRGWYCDNAGSVSFFPQADTCKVQSNRVFCDTMYSLTLPSEVSLCNTDIFNSKYDCKIMTSKTDISSSVITSLGAIVSCYGKTKCTASNKNRGIIKTFSNGCDYVSNKGVDTVSVGNTLYYVNKLEGKNLYVKGEPIINYYDPLVFPSDEFDASISQVNEKINQSLAFIRRSDELLHNVNTGKSTTNIMITAIIIVIIVVLLSLIAIGLLLYCKAK

SEQ ID NO: 9557 - protein, 553 aa, Artificial Sequence
  derived and/or modified protein sequence (wt) from HRSV__AGG39502.1__F-del
MELLVHRSSAIFLTLAINALYLTSSQNITEEFYQSTCSAVSRGYFSALRTGWYTSVITIELSNIKETKCNGTDTKVKLIKQELDKYKNAVTELQLLMQNTPAANNRARREAPQYMNYTINTTNNLNVSISKKRKRRFLGFLLGVGSAIASGIAVSKVLHLEGEVNKIKNALLSTNKAVVSLSNGVSVLTSKVLDLKNYINNQLLPIVNQQSCRISNIETVIEFQQKNSRLLEIAREFSVNAGVTTPLSTYMLTNSELLSLINDMPITNDQKKLMSSNVQIVRQQSYSIMSIIKEEVLAYVVQLPIYGVIDTPCWKLHTSPLCTTNIKEGSNICLTRTDRGWYCDNAGSVSFFPQADTCKVQSNRVFCDTMNSLTLPSEVSLCNTDIFNSKYDCKIMTSKTDISSSVITSLGAIVSCYGKTKCTASNKNRGIIKTFSNGCDYVSNKGVDTVSVGNTLYYVNKLEGKNLYVKGEPIINYYDPLVFPSDEFDASISQVNEKINQSLAFIRRSDELLHNVNTGKSTTNIMITAIIIVIIVVLLSLIAIGLLLYCKAK

SEQ ID NO: 9558 - protein, 553 aa, Artificial Sequence
  derived and/or modified protein sequence (wt) from HRSV__AGG39499.1__F-del
MELLIHRSSAIFLTLAINALYLTSSQNITEEFYQSTCSAVSRGYFSALRTGWYTSVITIELSNIKETKCNGTDTKVKLIKQELDKYKNAVTELQLLMQNIPAANNRARREAPQYMNYTINTTKNLNVSISKKRKRRFLGFLLGVGSAIASGIAVSKVLHLEGEVNKIKNALLSTNKAVVSLSNGVSVLTSKVLDLKNYINNQLLPIVNQQSCRISNIETVIEFQQKNSRLLEITREFSVNAGVTTPLSTYMLTNSELLSLINDMPITNDQKKLMSSNAQIVRQQSYSIMSIIKEEVLAYVVQLPIYGVIDTPCWKLHTSPLCTTNIKEGSNICLTRTDRGWYCDNAGSVSFFPQADTCKVQSNRVFCDTMNSLTLPSEVSLCNTDIFNSKYDCKIMTSKTDISSSVITSLGAIVSCYGKTKCTASNKNRGIIKTFSNGCDYVSNKGVDTVSVGNTLYYVNKLEGKNLYVKGEPIINYYDPLVFPSDEFDASISQVNEKINQSLAFIRRSDELLHNVNTGKSTTNIMITAIIIVIIVVLLSLIAIGLLLYCKAK

SEQ ID NO: 9559 - protein, 553 aa, Artificial Sequence
  derived and/or modified protein sequence (wt) from HRSV__AGG39496.1__F-del
MELLIHRSSAIFLTLAINALYLTSSQNITEEFYQSTCSAVSRGYFSALRTGWYTSVITIELSNIKETKCNGTDTKVKLIKQELDKYKNAVTELQLLMQNTPAANNRARREAPQYMNYTINTTKNLNVSISKKRKRRFLGFLLGVGSAIASGIAVSKVLHLEGEVNKIKNALLSTNKAVVSLSNGISVLTSKVLDLKNYINNQLLPIVNQQSCRITNIETVIEFQQKNSRLLEITREFSVNAGVTTPLSTYMLTNSELLSLINDMPITNDQKKLMSSNVQIVRQQSYSIMSIIKEEVLAYVVQLPIYGVIDTPCWKLHTSPLCTTNIKEGSNICLTRTDRGWYCDNAGSVSFFPQADTCKVQSNRVFCDTMNSLTLPSEVSLCNTDIFNSKYDCKIMTSKTDISSSVITSLGAIVSCYGKTKCTASNKNRGIIKTFSNGCDYVSNKGVDTVSVGNTLYYVNKLEGKNLYVKGEPIINYYDPLVFPSDEFDASISQVNEKINQSLAFIRRSDELLHNVNAGKSTTNIMITAIIIVIIVVLLSLIAIGLLLYCKAK

SEQ ID NO: 9560 - protein, 553 aa, Artificial Sequence
  derived and/or modified protein sequence (wt) from HRSV__AGG39493.1__F-del
MELLIHRSSAIFLTLAINALYLTSSQNITEEFYQSTCSAVSRGYFSALRTGWYTSVITIELSNIKETKCNGTDTKVKLIKQELDKYKNAVTELQQLMQNTPAANNRARREAPQYMNYTINTTKNLNVSISKKRKRRFLGFLLGVGSAIASGIAVSKVLHLEGEVNKIKNALLSTNKAVVSLSNGVSVLTSKVLDLKNYINNQLLPIVNQQSCRISNIETVIEFQQKNSRLLEITREFSVNAGVTTPLSTYMLTNSELLSLINDMPITNDQKKLMSSNVQIVRQQSYSIMSIIKEEVLAYVVQLPIYGVIDTPCWKLHTSPLCTTNIKEGSNICLTRTDRGWYCDNAGSVSFFPQADTCKVQSNRVFCDTMNSLTLPSEVSLCNTDIFNSKYDCKIMTSKTDISSSVITSLGAIVSCYGKTKCTASNKNRGIIKTFSNGCDYVSNKGVDTVSVGNTLYYVNKLEGKNLYVKGEPIINYYDPLVFPSDEFDASISQVNEKINQSLAFIRRSDELLHNVNAGKSTTNIMITAIIIVIIVVLLSLIAIGLLLYCKAK

SEQ ID NO: 9561 - protein, 553 aa, Artificial Sequence
  derived and/or modified protein sequence (wt) from HRSV__AGG39484.1__F-del
MELLIHRSSAIFLTLAINALYLTSSQNITEEFYQSTCSAVSRGYLSALRTGWYTSVITIELSNIKETKCNGTDTKVKLIKQELDKYKNAVTELQLLMQNTPAANNRARREAPQYMNYTINTTKNLNVSISKKRKRRFLGFLLGVGSAIASGIAVSKVLHLEGEVNKIKNALLSTNKAVVSLSNGVSVLTSKVLDLKNYINNQLLPIVNQQSCRITNIETVIEFQQKNSRLLEITREFSVNAGVTTPLSTYMLTNSELLSLINDMPITNDQKKLMSSNVQIVRQQSYSIMSIIKEEVLAYVVQLPIYGVIDTPCWKLHTSPLCTTNIKEGSNICLTRTDRGWYCDNAGSVSFFPQADTCKVQSNRVFCDTMNSLTLPSEVSLCNTDIFNSKYDCKIMTSKTDISSSVITSLGAIVSCYGKTKCTASNKNRGIIKTFSNGCDYVSNKGVDTVSVGNTLYYVNKLEGKNLYVKGEPIINYYDPLVFPSDEFDASISQVNEKINQSLAFIRRSDELLHNVNTGKSTTNIMITTIIIVIIVVLLSLIAIGLLLYCKAK

SEQ ID NO: 9562 - protein, 553 aa, Artificial Sequence
  derived and/or modified protein sequence (wt) from HRSV__AGG39490.1__F-del
MELLIHRSSAIFLTLAINALYFTSSQNITEEFYQSTCSAVSRGYFSALRTGWYTSVITIELSNIKETKCNGTDTKVKLIKQELDKYKNAVTELQLLMQNTPAANNRARREAPQYMNYTINTTKNLNVSISKKRKRRFLGFLLGVGSAIASGIAVSKVLHLEGEVNKIKNALLSTNKAVVSLSNGVSVLTSKVLDLKNYINNQLLPIVNQQSCRISNIETVIEFQQKNSRLLEITREFSVNAGVTTPLSTYMLTNSELLSLINDMPITNDQKKLMSSNVQIVRQQSYSIMSIIKEEVLAYVVQLPIYGVIDTPCWKLHTSPLCTTNIKEGSNICLTRTDRGWYCDNAGSVSFFPQADTCKVQSNRVFCDTMNSLTLPSEVSLCNTDIFNSKYDCKIMTSKTDISSSVITSLGAIVSCYGKTKCTASNKNRGIIKTFSNGCDYVSNKGVDTVSVGNTLYYVNKLEGKNLYVKGEPIINYYDPLVFPSDEFDASISQVNEKINQSLAFIRRSDELLHNVNTGKSTTNIMITAIIIVIIVVLLSLIAIGLLLYCKAK

SEQ ID NO: 9563 - protein, 553 aa, Artificial Sequence
  derived and/or modified protein sequence (wt) from HRSV__AGG39487.1__F-del
MELLIHRSSAIFLTLAVNALYLTSSQNITEEFYQSTCSAVSRGYFSALRTGWYTSVITIELSNIKETKCNGTDTKVKLIKQELDKYKNAVTELQLLMQNTPAANNRARREAPQYMNYTINTTKNLNVSISKKRKRRFLGFLLGVGSAIASGMAVSKVLHLEGEVNKIKNALLSTNKAVVSLSNGISVLTSKVLDLKNYINNRLLPIVNQQSCRISNIETVIEFQQKNSRLLEITREFSVNAGVTTPLSTYMLTNSELLSLINDMPITNDQKKLMSSNVQIVRQQSYSIMSIIKEEVLAYVVQLPIYGVIDTPCWKLHTSPLCTTNIKEGSNICLTRTDRGWYCDNAGSVSFFPQADTCKVQSNRVFCDTMNSLTLPSEVSLCNTDIFNSKYDCKIMTSKTDISSSVITSLGAIVSCYGKTKCTASNKNRGIIKTFSNGCDYVSNKGVDTVSVGNTLYYVNKLEGKNLYVKGEPIINYYDPLVFPSDEFDASISQVNEKINQSLAFIRRSDELLHNVNTGKSTTNIMITTIIIVIIVVLLSLIAIGLLLYCKAK

SEQ ID NO: 9564 - protein, 553 aa, Artificial Sequence
  derived and/or modified protein sequence (wt) from HRSV__AGG39475.1__F-del
MELPILKTNAITTILAAVTLCFASSQNITEEFYQSTCSAVSKGYLSALRTGWYTSVITIELSNIKENKCNGTDAKVKLIKQELDKYKNAVTELQLLMQSTQAANNRARRELPRFMNYTLNNTKNTNVTLSKKRKRRFLGFLLGVGSAIASGIAVSKVLHLEGEVNKIKSALLSTNKAVVSLSNGVSVLTSKVLDLKNYIDKQLLPIVNKQSCSISNIETVIEFQQKNNRLLEITREFSVNAGVTTPVSTYMLTNSELLSLINDMPITNDQKKLMSNNVQIVRQQSYSIMSIIKEEVLAYVVQLPLYGVIDTPCWKLHTSPLCTTNTKEGSNICLTRTDRGWYCDNAGSVSFFPQAETCKVQSNRVFCDTMNSLTLPSEVNLCNIDIFNSKYDCKIMTSKTDVSSSVITSLGAIVSCYGKTKCTASNKNRGIIKTFSNGCDYVSNKGVDTVSVGNTLYYVNKQEGKSLYVKGEPIINFYDPLVFPSDEFDASISQVNEKINQSLAFIRKSDELLHNVNVGKSTTNIMITTIIIVIIVILLLLIAVGLFLYCKAR

SEQ ID NO: 9565 - protein, 553 aa, Artificial Sequence
  derived and/or modified protein sequence (wt) from HRSV__AGG39466.1__F-del
MELLILKANVIATILTAVTFCFASSQNITEEFYQSTCSAVSKGYLSALRTGWYTSVITIELSNIKENKCNGTDAKVKLIKQELDKYKNAVTELQLLMQSTSAANNRARRELPRFMNYTLNNAKKTNVTLSKKRKRRFLGFLLGVGSAIASGIAVSKVLHLEGEVNKIKSALLSTNKAVVSLSNGVSVLTSKVLDLKNYIDKQLLPIVNKQSCSISNIETVIEFQQKNNRLLEITREFSVNAGVTTPVSTYMLTNSELLSLINDMPITNDQKKLMSNNVQIVRQQSYSIMSIIKEEVLAYVVQLPLYGVIDTPCWKLHTSPLCTTNTKEGSNICLTRTDRGWYCDNAGSVSFFPQAETCKVQSNRVFCDTMNSLTLPSEVNLCNVDIFNPKYDCKIMTSKTDVSSSVITSLGAIVSCYGKTKCTASNKNRGIIKTFSNGCDYVSNKGVDTVSVGNTLYYVNKQEGKSLYVKGEPIINFYDPLVFPSDEFDASISQVNEKINQSLAFIRKSDELLHNVNAGKSTTNIMITTIIIVIIVILLSLIAVGLLLYCKAR

SEQ ID NO: 9566 - protein, 553 aa, Artificial Sequence
  derived and/or modified protein sequence (wt) from HRSV__AGG39463.1__F-del
MELPILKTNAITTILAAVTLCFASSQNITEEFYQSTCSAVSKGYLSALRTGWYTSVITIELSNIKENKCNGTDAKVKLIKQELDKYKNAVTELQLLMQSTPAANNRARRELPRFMNYTLNNTKNTNVTLSKKRKRRFLGFLLGVGSAIASGIAVSKVLHLEGEVNKIKSALLSTNKAVVSLSNGVSVLTSKVLDLKNYIDKQLLPIVNKQSCSISNIETVIEFQQKNNRLLEITREFSVNAGVTTPVSTYMLTNNELLSLINDMPITNDQKKLMSNNVQIVRQQSYSIMSIIKEEVLAYVVQLPLYGVIDTPCWKLHTSPLCTTNTKEGSNICLTRTDRGWYCDNAGSVSFFPQAETCKVQSNRVFCDTMNSLTLPSEVNLCNIDIFNPKYDCKIMTSKTDVSSSVITSLGAIVSCYGKTKCTASNKNRGIIKTFSNGCDYVSNKGVDTVSVGNTLYYVNKQEGKSLYVKGEPIINFYDPLVFPSDEFDASISQVNEKINQSLAFIRKSDELLHNVNVGKSTTNIMITTIIIVIIVILLLLIAVGLFLYCKAR

SEQ ID NO: 9567 - protein, 553 aa, Artificial Sequence
  derived and/or modified protein sequence (wt) from HRSV__AGG39454.1__F-del
MELPILKINAITTILAAVTLCFASSQNITEEFYQSTCSAVSKGYLSALRTGWYTSVITIELSNIKENKCNGTDAKVKLIKQELDKYKNAVTELQLLMQSTPAANNRARRELPRFMNYTLNNTKNTNVTVSKKRKRRFLGFLLGVGSAIASGIAVSKVLHLEGEVNKIKSALLSTNKAVVSLSNGVSVLTSKVLDLKNYIDKQLLPIVNKQSCSISNIETVIEFQQKNNRLLEITREFSVNAGVTTPVSTYMLTNSELLSLINDMPITNDQKKLMSNNVQIVRQQSYSIMSIIKEEVLAYVVQLPLYGVIDTPCWKLHTSPLCTTNTKEGSNICLTRTDRGWYCDNAGSVSFFPQAETCKVQSNRVFCDTMNSLTLPSEVNLCNIDIFNPKYDCKIMTSKTDVSSSVITSLGAIVSCYGKTKCTASNKNRGIIKTFSNGCDYVSNKGVDTVSVGNTLYYVNKQEGKSLYVKGEPIINFYDPLVFPSDEFDASISQVNEKINQSLAFIRKSDELLHNVNAGKSTTNIMITTIIIVIIVILLSLIAVGLLLYCKAR

SEQ ID NO: 9568 - protein, 553 aa, Artificial Sequence
  derived and/or modified protein sequence (wt) from HRSV__AGG39442.1__F-del
MELPILKTNAITTILAAVTLCFASSQNITEEFYQSTCSAVSKGYLSALRTGWYTSVITIELSSIKENKCNGTDAKVKLIKQELDKYKNAVTELQLLMQSTPAANNRARRELPRFMNYTFNNTKTTNVTLSRKRKRRFLGFLLGVGSAIASGIAVSKVLHLEGEVNKIKSALLSTNKAVVSLSNGVSVLTSKVLDLKNYIDKQLLPIVNKQSCSISNIETVIEFQQKNNRLLEITREFSVNAGVTTPVSTYMLTNSELLSLINDMPITNDQKKLMSNNVQIVRQQSYSIMSIIKEEVLAYVVQLPLYGVIDTPCWKLHTSPLCTTNTKEGSNICLTRTDRGWYCDNAGSVSFFPQAETCKVQSNRVFCDTMNSLTLPSEVNLCNIDIFNPKYDCKIMTSKTDVSSSVITSLGAIVSCYGKTKCTASNKNRGIIKTFSNGCDYVSNKGVDTVSVGNTLYYVNKQEGKSLYVKGEPIINFYDPLVFPSDEFDASISQVNEKINQSLAFIRKSDELLHNVNAGKSTTNIMITTIIIVIIVILLSLIAVGLLLYCKAR

SEQ ID NO: 9569 - protein, 553 aa, Artificial Sequence
  derived and/or modified protein sequence (wt) from HRSV__AGG39439.1__F-del
MELPILKTNAITTIFAAVTLCFASSQNITEEFYQSTCSAVSKGYLSALRTGWYTSVITIELSNIKENKCNGTDAKVKLIKQELDKYKNAVTELQLLMQSTPAANNRARRELPRFMNYTLNNTKNNNVTLSRKRKRRFLGFLLGVGSAIASGIAVSKVLHLEGEVNKIKSALLSTNKAVVSLSNGVSVLTSKVLDLKNYIDKQLLPIVNKQSCSISNIETVIEFQQKNNRLLEITREFSVNAGVTTPVSTYMLTNSELLSLINDMPITNDQKKLMSNNVQIVRQQSYSIMSIIKEEVLAYVVQLPLYGVIDTPCWKLHTSPLCTTNTKEGSNICLTRTDRGWYCDNAGSVSFFPQAETCKVQSNRVFCDTMNSLTLPSEVNLCNIDIFNPKYDCKIMTSKTDVSSSVITSLGAIVSCYGKTKCTASNKNRGIIKTFSNGCDYVSNKGVDTVSVGNTLYYVNKQEGKSLYVKGEPIINFYDPLVFPSDEFDASISQVNEKINQSLAFIRKSDELLHNVNVGKSTTNIMITTIIIVIIVILLLLIAVGLFLYCKAR

SEQ ID NO: 9570 - protein, 553 aa, Artificial Sequence
  derived and/or modified protein sequence (wt) from HRSV__AGG39436.1__F-del
MELPILKTNAITTIFAAVTLCFASSQNITEEFYQSTCSAVSKGYLSALRTGWYTSVITIELSNIKENKCNGTDAKVKLIKQELDKYKNAVTELQLLMQSTPAANNRARRELPRFMNYTFNNTKTTNVTLSKKRKRRFLGFLLGVGSAIASGIAVSKVLHLEGEVNKIKSALLSTNKAVVSLSNGVSVLTSKVLDLKNYIDKQLLPIVNKQSCSISNIETVIEFQQKNNRLLEITREFSVNAGVTTPVSTYMLTNSELLSLINDMPITNDQKKLMSNNVQIVRQQSYSIMSIIKEEVLAYVVQLPLYGVIDTPCWKLHTSPLCTTNTKEGSNICLTRTDRGWYCDNAGSVSFFPQAETCKVQSNRVFCDTMNSLTLPSEVNLCNIDIFNPKYDCKIMTSKTDVSSSVITSLGAIVSCYGKTKCTASNKNRGIIKTFSNGCDYVSNKGVDTVSVGNTLYYVNKQEGKSLYVKGEPIINFYDPLVFPSDEFDASISQVNEKINQSLAFIRKSDELLHNVNAGKSTTNIMITTIIIVIIVILLSLIAVGLLLYCKAR

SEQ ID NO: 9571 - protein, 553 aa, Artificial Sequence
  derived and/or modified protein sequence (wt) from HRSV__AGG39415.1__F-del
MDLPILKTNAITTILAAVLLCFASSQNITEEFYQSTCSAVSKGYLSALRTGWYTSVITIELSNIKENKCNGTDAKVKLIKQELDKYKNAVTELQLLMQSTPAANNRARRELPRFMNYTLNNTKNNNVTLSKKRKRRFLGFLLGVGSAIASGIAVSKVLHLEGEVNKIKNALLSTNKAVVSLSNGVSVLTSKVLDLKNYIDKQLLPIVNKQSCSISNIETVIEFQQKNNRLLEITREFSVNAGVTTPVSTYMLTNSELLSLINDMPITNDQKKLMSNNVQIVRQQSYSIMSIIKEEVLAYVVQLPLYGVIDTPCWKLHTSPLCTTNTKEGSNICLTRTDRGWYCDNAGSVSFFPQAETCKVQSNRVFCDTMNSLTLPSEVNLCNIDIFNPKYDCKIMTSKTDVSSSVITSLGAIVSCYGKTKCTASNKNRGIIKTFSNGCDYVSNKGVDTVSVGNTLYYVNKQEGKSLYVKGEPIINFYDPLVFPSDEFDASISQVNEKINQSLAFIRKSDELLHNVNVGKSTTNIMITTIIIVIIVILLLLIAVGLFLYCKAR

SEQ ID NO: 9572 - protein, 553 aa, Artificial Sequence
  derived and/or modified protein sequence (wt) from HRSV__AGG39403.1__F-del
MELPILKTNAITTILAAVTLCFASSQNITEEFYQSTCSAVSKGYLSALRTGWYTSVITIELSNIKENMCNGTDAKVKLIKQELDKYKNAVTELQLLMQSTPAANNRARRELPRFMNYTLNNTKNTNVTLSKKRKRRFLGFLLGVGSAIASGIAVSKVLHLEGEVNKIKSALLSTNKAVVSLSNGVSVLTSKVLDLKNYIDKQLLPIVNKQSCSISNIETVIEFQQKNNRLLEITREFSVNAGVTTPVSTYMLTNSELLSLINDMPITNDQKKLMSNNVQIVRQQSYSIMSIIKEEVLAYVVQLPLYGVIDTPCWKLHTSPLCTTNTKEGSNICLTRTDRGWYCDNAGSVSFFPQAETCKVQSNRVFCDTMNSLTLPSEVNLCNIDIFNPKYDCKIMTSKTDVSSSVITSLGAIVSCYGKTKCTASNKNRGIIKTFSNGCDYVSNKGVDTVSVGNTLYYVNKQEGKSLYVKGEPIINFYDPLVFPSDEFDASISQVNEKINQSLAFIRKSDELLHNVNVGKSTTNIMITTIIIVIIVILLLLIAVGLFLYCKAR

SEQ ID NO: 9573 - protein, 553 aa, Artificial Sequence
  derived and/or modified protein sequence (wt) from HRSV__AGG39397.1__F-del
MELPIIKANAITTILIAVTFCFASSQNITEEFYQSTCSAVSKGYLSALRTGWYTSVITIELSNIKENKCNGTDAKVKLIKQELDKYKNAVTELQLLMQSTTAANNRARRELPRFMNYTLNNAKKTNVTLSKKRKRRFLGFLLGVGSAIASGIAVSKVLHLEGEVNKIKSALLSTNKAVVSLSNGVSVLTSKVLDLKNYIDKQLLPIVNKQSCSISNIETVIEFQQKNNRLLEITREFSVNAGVTTPVSTYMLTNSELLSLINDMPITNDQKKLMSNNVQIVRQQSYSIMSIIKEEVLAYVVQLPLYGVIDTPCWKLHTSPLCTTNTKEGSNICLTRTDRGWYCDNAGSVSFFPQADTCKVQSNRVFCDTMNSLTLPSEVNLCNIDIFNPKYDCKIMTSKTDVSSSVITSLGAIVSCYGKTKCTASNKNRGIIKTFSNGCDYVSNKGVDTVSVGNTLYYVNKQEGKSLYVKGEPIINFYDPLVFPSDEFDASISQVNEKINQSLAFIRKSDELLHNVNAGKSTTNIMITTIIIVIIVILLSLIAVGLLLYCKAR

SEQ ID NO: 9574 - protein, 553 aa, Artificial Sequence
  derived and/or modified protein sequence (wt) from HRSV__AGG39391.1__F-del
MDLPILKTNAITAILAAVSLCFVSSQNITEEFYQSTCSAVSKGYLSALRTGWYTSVITIELSNIKENKCNGTDAKVKLIKQELDKYKNAVTELQLLMQSTPAANNRARRELPRFMNYTLNNTKNNNVTLSKKRKRRFLGFLLGVGSAIASGIAVSKVLHLEGEVNKIKSALLSTNKAVVSLSNGVSVLTSKVLDLKNYIDKQLLPIVNKQSCSISNIETVIEFQQKNNRLLEITREFSVNAGVTTPVSTYMLTNSELLSLINDMPITNDQKKLMSNNVQIVRQQSYSIMSIIKEEVLAYVVQLPLYGVIDTPCWKLHTSPLCTTNTKEGSNICLTRTDRGWYCDNAGSVSFFPQAETCKVQSNRVFCDTMNSLTLPSEVNLCNIDIFNPKYDCKIMTSKTDVSSSVITSLGAIVSCYGKTKCTASNKNRGIIKTFSNGCDYVSNKGVDTVSVGNTLYYVNKQEGKSLYVKGEPIINFYDPLVFPSDEFDASISQVNEKINQSLAFIRKSDELLHNVNVGKSTTNIMITTIIIVIIVILLLLIAVGLFLYCKAR

SEQ ID NO: 9575 - protein, 553 aa, Artificial Sequence
  derived and/or modified protein sequence (wt) from HRSV__AGG39379.1__F-del
MELPILKTNAITTILAAVTLCFASSQNITEEFYQSTCSAVSKGYLSALRTGWYTSVITIELSNIKENKCNGTDAKVKLIKQELDKYKNAVTELQLLMQSTPAANNRARRELPRFMNYTLNNTKTTNVTLSKKRKRRFLGFLLGVGSAIASGIAVSKVLHLEGEVNKIKSALLSTNKAVVSLSNGVSVLTSKVLDLKNYIDKQLLPIVNKQSCSISNIETVIEFQQKNNRLLEITREFSVNAGVTTPVSTYMLTNSELLSLINDMPITNDQKKLMSNNVQIVRQQSYSIMSIIKEEVLAYVVQLPLYGVIDTPCWKLHTSPLCTTNTKEGSNICLTRTDRGWYCDNAGSVSFFPQAETCKVQSNRVFCDTMNSLTLPSEVNLCNTDIFNPKYDCKIMTSKTDVSSSVITSLGAIVSCYGKTKCTASNKNRGIIKTFSNGCDYVSNKGVDTVSVGNTLYYVNKQEGKSLYVKGEPIINFYDPLVFPSDEFDASISQVNEKINQSLAFIRKSDELLHNVNAGKSTTNIMITTIIIVIIVILLSLIAVGLLLYCKAR

SEQ ID NO: 9576 - protein, 553 aa, Artificial Sequence
  derived and/or modified protein sequence (wt) from HRSV__AHL84194.1__F-del
MELLILKANAITTILTAVTFCFASGQNITEEFYQSTCSAVSKGYLSALRTGWYTSVITIELSNIKKNKCNGTDAKVKLIKQELDKYKNAVTELQLLMQSTPATNNRARRELPRFMNYTLNNAKKTNVTLSKKRKRRFLGFLLGVGSAIASGVAVSKVLHLEGEVNKIKSALLSTNKAVVSLSNGVSVLTSKVLDLKNYIDKQLLPIVNKQSCSISNIETVIEFQQKNNRLLEITREFSVNAGVTTPVSTYMLTNSELLSLINDMPITNDQKKLMSNNVQIVRQQSYSIMSIIKEEVLAYVVQLPLYGVIDTPCWKLHTSPLCTTNTKEGSNICLTRTDRGWYCDNAGSVSFFPQAETCKVQSNRVFCDTMNSLTLPSEVNLCNVDIFNPKYDCKIMTSKTDVSSSVITSLGAIVSCYGKTKCTASNKNRGIIKTFSNGCDYVSNKGVDTVSVGNTLYYVNKQEGKSLYVKGEPIINFYDPLVFPSDEFDASISQVNEKINQSLAFIRKSDELLHNVNAGKSTTNIMITTIIIVIIVILLSLIAVGLLLYCKAR

SEQ ID NO: 9577 - protein, 553 aa, Artificial Sequence
  derived and/or modified protein sequence (wt) from HRSV__AHA84012.1__F-del
MELLIHRSSAIFLTLAINALYLTSSQNITEEFYQSTCSAVSRGYFSALRTGWYTSVITIELSNIQETKCNGTDTKVKLIKQELDKYKNAVTELQLLMQNTPAANNRARREAPQYMNHTINTTKNLNVSISKKRKRRFLGFLLGVGSAIASGIAVSKVLHLEGEVNKIKNALLSTNKAVVSLSNGVSVLTSKVLDLKNYINNQLLPIVNQQSCRISNIETVIEFQQKNSRLLEITREFSVNAGVTTPLSTYMLTNSELLSLINDMPITNDQKKLMSSNVQIVRQQSYSIMSIIKEEVLAYVVQLPIYGVIDTPCWKLHTSPLCTTNIKEGSNICLTRTDRGWYCDNAGSVSFFPQADTCKVQSNRVFCDTMNSLTLPSEVSLCNTDIFNSKYDCKIMTSKTDISSSVITSLGAIVSCYGKTKCTASNKNRGIIKTFSNGCDYVSNKGVDTVSVGNTLYYVNKLEGKNLYVKGEPIINYYDPLVFPSDEFDASISQVNEKINQSLAFIRRSDELLHNVNTGKSTTNIMMTAIIIVIIVVLLSLIAIGLLLYCKAK

SEQ ID NO: 9578 - protein, 553 aa, Artificial Sequence
  derived and/or modified protein sequence (wt) from HRSV__AHJ60043.1__F-del
MELLIHRSSAIFLTLAINALYLTSSQNITEEFYQSTCSAVSRGYFSALRTGWYTSVITIELSNITETKCNGTDTKVKLIKQELDKYKNAVTELQLLMQNTPAANNRARREAPQHMNYTINTTKNLNVSISKKRKRRFLGFLLGVGSAIASGIAVSKVLHLEGEVNKIKNALLSTNKAVVSLSNGVSVLTSKVLDLKNYINNQLLPIVNQQSCRIFNIETVIEFQQKNSRLLEITREFSVNAGVTTPLSTYMLTNSELLSLINDMPITNDQKKLMSSNVQIVRQQSYSIMSIIKEEVLAYVVQLPIYGVIDTPCWKLHTSPLCTTNIKEGSNICLTRTDRGWYCDNAGSVSFFPQADTCKVQSNRVFCDTMNSLTLPSEVSLCNTDIFNSKYDCKIMTSKTDISSSVITSLGAIVSCYGKTKCTASNKNRGIIKTFSNGCDYVSNKGVDTVSVGNTLYYVNKLEGKNLYVKGEPIINYYDPLVFPSDEFDASISQVNEKINQSLAFIRKSDELLHNVNTGKSTTNIMITTIIIVIIVVLLSLIAIGLLLYCKAK

SEQ ID NO: 9579 - protein, 553 aa, Artificial Sequence
  derived and/or modified protein sequence (wt) from HRSV__BAO49770.1__F-del
MELPILKTNAITTILAAVTLCFASSQNITEEFYQSTCSAVSKGYLSALRTGGYTSVITIELSNIKENKCNGTDAKVKLIKQELDKYKNAVTELQLLMQSTPAANSRARRELPRFMNYTLNNTKNTNVTLSKKRKRRFLGFLLGVGSAIASGIAVSKVLHLEGEVNKIKSAPLSTNKAVVSLSNGVSVLTSKVLDLKNYIDKQLLPIVNKQSCSISNIETVIEFQQKNNRLLEITREFSVNAGVTTPVSTYMLTNSELLSLINDMPITNDQKKLMSSNVQIVRQQSYSIMSIIKEEVLAYVVQLPLYGVIDTPCWKLHTSPLCTTNTKEGSNICLTRTDRGWYCDNAGSVSFFPQAETCKVQSNRVFCDTMNSLTLPSEVNLCNIDIFNPKYDCKIMTSKTDVSSSVITSLGAIVSCYGKTKCTASNKNRGIIKTFSNGCDYVSNKGVDTVSVGNTLYYVNKQEGKSLYVKGEPIINFYDPLVFPSDEFDASISQVNEKINQSLAFIRKSDELLHNVNAGKSTTNIMITTIIIVIIVILLALIAVGLLLYCKAR

SEQ ID NO: 9580 - protein, 553 aa, Artificial Sequence
  derived and/or modified protein sequence (wt) from HRSV__BAO49766.1__F-del
MELPILKTNAITTILAAVTLCFASSQNITEEFYQSTCSAVSKGYLSALRTGWYTSVITIELSNIKENKCNGPDAKVKLIKQELDKYKNAVTELQLLMQSTPAGNSRARRELPRFMNYTLNNTKNTNVTLSKKRKRRFLGFLLGVGSAIASGIAVSKVLHLEGEVNKIKSALLSTNKAVVSLSNGVSVLTSKVLDLKNYIDKQLLPIVNKQSCSISNIETVIEFQQKNNRLLEITREFSVNAGVTTPVSTYMLTNSELLSLINDMPITNDQKKLMSSNVQIVRQQSYSIMSIIKEEVLAYVVQLPLYGVIDTPCWKLHTSPLCTTNTKEGSNICLTRTDRGWYCDNAGSVSFFPQAETCKVQSNRVFCDTMNSLTLPSEVNLCNIDIFNPKYDCKIMTSKTDVSSSVITSLGAIVSCYGKTKCTASNKNRGIIKTFSNGCDYVSNKGVDTVSVGNTLYYVNKQEGKSLYVKGEPIINFYDPLVFPSDEFDASISQVNEKINQSLAFIRKSDELLHNVNAGKSTTNIMITTIIIVIIVILLALIAVGLLLYCKAR

SEQ ID NO: 9581 - protein, 553 aa, Artificial Sequence
  derived and/or modified protein sequence (wt) from HRSV__BAO49767.1__F-del
MELPILKTNAITTILAAVTLCFASSQNITEEFYQSTCSAVCKGYLSALRTGWYTSVITIELSNIKENKCNGTDAKVKLIKQELDKYKNAVTELQLLMQSTPAANSRARRELPRFMNYTLNNTKNTNVTLSKKRKRRFLGFLLGVGSAIASGIAVSKVLHLEGEVNKIKSALLSTNKAVVSLSNGVSVLTSKVLDLKNYIDKQLLPIVNKQSCSISNIETVIEFQQKNNRLLEITREFSVNAGVTTPVSTYMLTNSELLSLINDMPITNDQKKLMSSNVQIVRQQSYSIMSIIKEEVLAYVVQLPLYGVIDTPCWKLHTSPLCTTNTKEGSNICLTRTDRGWYCDNAGSVSFFPQAETCKVQSNRVFCDTMNSLTLPSEVNLCNIDIFNPKYDCKIMTSKTDVSSSVITSLGAIVSCYGKTKCTASNKNRGIIKTFSNGCDYVSNKGVDTVSVGNTLYYVNKQEGKSLYVKGEPIINFYDPLVFPSDEFDASISQVNEKINQSLAFIRKSDELLHNVNAGKSTTNIMITTIIIVIIVILLALIAVGLLLYCKAR

SEQ ID NO: 9582 - protein, 553 aa, Artificial Sequence
  derived and/or modified protein sequence (wt) from HRSV__AHA84034.1__F-del
MELPILKTNAITTILAAVTLCFASSQNITEEFYQSTCSAVSKGYLSALRTGWYTSVITIELSNIKENKCNGTDAKVKLIKQELDKYKNAVTELQLLMQSTPAANSRARRELPRFMNYTLNNTKNTNVTLSKKRKRRFLGFLLGVGSAIASGIAVSKVLHLEGEVNKIKSALLSTNKAVVSLSNGVSVLTSKVLDLKNYIDKQLLPIVNKQSCSISNIETVIEFQQKNNRLLEITREFSVNAGVTTPVSTYMLTNSELLSLINDMPITNDQKKLMSSNVQIVRQQSYSIMSIIKEEVLAYVVQLPLYGVIDTPCWKLHTSPLCTTNTKEGSNICLTRTDRGWYCDNAGSVSFFPQAETCKVQSNRVFCDTMNSLTLPSEVDLCNIDIFNPKYDCKIMTSKTDVSSSVITSLGAIVSCYGKTKCTASNKNRGIIKTFSNGCDYVSNKGVDTVSVGNTLYYVNKQEGKSLYVKGEPIINFYDPLVFPSDEFDASISQVNEKINQSLAFIRKSDELLHNVNAGKSTTNIMITTIIIVIIVILLALIAVGLLLYCKAR

SEQ ID NO: 9583 - protein, 553 aa, Artificial Sequence
  derived and/or modified protein sequence (wt) from HRSV__AHA84023.1__F-del
MELPILKTNAITTIFATVTLCFASSQNITEEFYQSTCSAVSKGYLSALRTGWYTSVITIELSNIKENKCNGTDAKVKLIKQELDKYKNAVTELQLLMQSTPAANNRARRELPRFMNYTLNNTKNNNVTLSKKRKRRFLGFLLGVGSAIASGIAVSKVLHLEGEVNKIKSALLSTNKAVVSLSNGVSVLTSKVLDLKNYIDKQLLPIVNKQSCSISNIETVIEFQQKNNRLLEITREFSVNAGVTTPVSTYMLTNSELLSLINDMPITNDQKKLMSNNVQIVRQQSYSIMSIIKEEVLAYVVQLPLYGVIDTPCWKLHTSPLCTTNTKEGSNICLTRTDRGWYCDNAGSVSFFPQAETCKVQSNRVFCDTMNSLTLPSEVNLCNVDIFNPKYDCKIMTSKTDVSSSVITSLGAIVSCYGKTKCTASNKNRGIIKTFSNGCDYVSNKGVDTVSVGNTLYYVNKQEGKSLYVKGEPIINFYDPLVFPSDEFDASISQVNEKINQSLAFIRKSDELLHNVNVGKSTTNIMITTIIIVIIVILLLLIAVGLFLYCKAR

SEQ ID NO: 9584 - protein, 553 aa, Artificial Sequence
  derived and/or modified protein sequence (wt) from HRSV__AHA83990.1__F-del
MELLIHRSSAIFLTLAINALYLTSSQNITEEFYQSTCSAVSRGYLSALRTGWYTSVITIELSNIKETKCNGTDTKVKLIKQELDKYKNAVTELQLLMQNTPAVNNRARREAPQYMNYTINTTKNLNVSISKKRKRRFLGFLLGVGSAIASGIAVSKVLHLEGEVNKIKNALLSTNKAVVSLSNGVSVLTSKVLDLKNYINNQLLPIVNQQSCRIFNIETVIEFQQKNSRLLEITREFSVNAGVTTPLSTYMLTNSELLSLINDMPITNDQKKLMSSNVQIVRQQSYSIMSIIKEEVLAYVVQLPIYGVIDTPCWKLHTSPLCTTNIKEGSNICLTRTDRGWYCDNAGSVSFFPQADTCKVQSNRVFCDTMNSLTLPSEVSLCNTDIFNSKYDCKIMTSKTDISSSVITSLGAIVSCYGKTKCTASNKNRGIIKTFSNGCDYVSNKGVDTVSVGNTLYYVNKLEGKNLYVKGEPIINYYDPLVFPSDEFDASISQVNEKINQSLAFIRRSDELLHNVNTGKSTTNIMITAIIIVIIVVLLSLIAIGLLLYCKAK

SEQ ID NO: 9585 - protein, 553 aa, Artificial Sequence
  derived and/or modified protein sequence (wt) from HRSV__AHA83957.1__F-del
MELPILKTNAITTILAVVTLCFASSQNITEEFYQSTCSAVSKGYLSALRTGWYTSVITIELSNIKENKCNGTDAKVKLIKQELDKYKNAVTELQLLMQSTPASNNRARRELPRFMNYTLNNTKNTNVTLSKKRKRRFLGFLLGVGSAIASGIAVSKVLHLEGEVNKIKSALLSTNKAVVSLSNGVSVLTSKVLDLKNYIDKQLLPIVNKQSCSISNIETVIEFQQKNNRLLEITREFSVNAGVTTPVSTYMLTNSELLSLINDMPITNDQKKLMSNNVQIVRQQSYSIMSIIKEEVLAYVVQLPLYGVIDTPCWKLHTSPLCTTNTKEGSNICLTRTDRGWYCDNAGSVSFFPQAETCKVQSNRVFCDTMNSLTLPSEVNLCNIDIFNPKYDCKIMTSKTDVSSSVITSLGAIVSCYGKTKCTASNKNRGIIKTFSNGCDYVSNKGVDTVSVGNTLYYVNKQEGKSLYVKGEPIINFYDPLVFPSDEFDASISQVNEKINQSLAFIRKSDELLHNVNAGKSTTNIMITTIIIVIVVILLSLIAVGLLLYCKAR

SEQ ID NO: 9586 - protein, 553 aa, Artificial Sequence
  derived and/or modified protein sequence (wt) from HRSV__AHA83924.1__F-del
MELLIHRSSAIFLTLAINALYLTSSQNITEEFYQSTCSAVSRGYFSALRTGWYTSVITIELSNIKETKCNGTDTKVKLIKQELDKYKNAVTELQLLMQNIPAANNRARREAPQYMNYTINTTKNLNVSISKKRKRRFLGFLLGVGSAIASGIAVSKVLHLEGEVNKIKNALLSTNKAVVSLSNGVSVLTSKVLDLKNYINNQLLPIVNQQSCRISNIETVIEFQQKNSRLLEITREFSVNAGVTTPLSTYMLTNSELLSLINDMPITNDQKKLMSSNVQIVRQQSYSIMSIIKEEVLAYVVQLPIYGVIDTPCWKLHTSPLCTTNIKEGSNICLTRTDRGWYCDNAGSVSFFPQADTCKVQSNRVFCDTMNSLTLPSEVSLCNTDIFNSKYDCKIMTSKTDISSSVITSLGAIVSCYGKTKCTASNKNRGIIKTFSNGCDYVSNKGVDTVSVGNTLYYVNKLEGKNFYVKGEPIINYYDPLVFPSDEFDASISQVNEKINQSLAFIRRSDELLHNVNTGKSTTNIMITAIIIVIIVVLLSLIAIGLLLYCKAK

SEQ ID NO: 9587 - protein, 553 aa, Artificial Sequence
  derived and/or modified protein sequence (wt) from HRSV__AHA83891.1__F-del
MELLIHRSSAIFLTLAINALYLTSSQNITEEFYQSTCSAVSRGYLSALRTGWYTSVITIELSNIKETKCNGTDTKVKLIKQELDKYKNAVTELQLLMQNTPAANNRARREAPQYMNYTINATKNLNVSISKKRKRRFLGFLLGVGSAIASGIAVSKVLHLEGEVNKIKNALLSTNKAVVSLSNGVSVLTSKVLDLKNYINNQLLPIVNQQSCRISNIETVIEFQQKNSRLLEITREFSVNAGVTTPLSTYMLTNSELLSLINDMPITNDQKKLMSSNVQIVRQQSYSIMSIIKEEVLAYVVQLPIYGVIDTPCWKLHTSPLCTTNIKEGSNICLTRTDRGWYCDNAGSVSFFPQADTCKVQSNRVFCDTMNSLTLPSEVSLCNTDIFNSKYDCKIMTSKTDISSSVITSLGAIVSCYGKTKCTASNKNRGIIKTFSNGCDYVSNKGVDTVSVGNTLYYVNKLEGKNLYVKGEPIINYYDPLVFPSDEFDASISQVNEKINQSLAFIRRSDELLHNVNTGKSTTNIMITAIIIVIIVVLLSLIAIGLLLYCKAK

SEQ ID NO: 9588 - protein, 553 aa, Artificial Sequence
  derived and/or modified protein sequence (wt) from HRSV__AHA83880.1__F-del
MDLPILKINAITAILAAVSLCFASSQNITEEFYQSTCSAVSKGYLSALRTGWYTSVITIELSNIKENKCNGTDAKVKLIKQELDKYKNAVTELQLLMQSTPAANNRARRELPRFMNYTLNNTKNNNVTLSKKRKRRFLGFLLGVGSAIASGIAVSKVLHLEGEVNKIKSALLSTNKAVVSLSNGVSVLTSKVLDLKNYIDKQLLPIVNKQSCSISNIETVIEFQQKNNRLLEITREFSVNAGVTTPVSTYMLTNSELLSLINDMPITNDQKKLMSNNVQIVRQQSYSIMSIIKEEVLAYVVQLPLYGVIDTPCWKLHTSPLCTTNTKEGSNICLTRTDRGWYCDNAGSVSFFPQAETCKVQSNRVFCDTMNSLTLPSEVNLCNIDIFNPKYDCKIMTSKTDVSSSVITSLGAIVSCYGKTKCTASNKNRGIIKTFSNGCDYVSNKGVDTVSVGNTLYYVNKQEGKSLYVKGEPIINFYDPLVFPSDEFDASISQVNEKINQSLAFIRKSDELLHNVNVGKSTTNIMITTIIIVIIVILLLLIAVGLFLYCKAR

SEQ ID NO: 9589 - protein, 553 aa, Artificial Sequence
  derived and/or modified protein sequence (wt) from HRSV__AHA83782.1__F-del
MDLPILKTNAITAILAAVSLCFASSQNITEEFYQSTCSAVSKGYLSALRTGWYTSVITIELSNIKENKCNGTDAKVKLIKQELDKYKNAVTELQLLMQSTPAANNRARRELPRFMNYTLNNTKNNNITLSKKRKRRFLGFLLGVGSAIASGIAVSKVLHLEGEVNKIKSALLSTNKAVVSLSNGVSVLTSKVLDLKNYIDKQLLPIVNKQSCSISNIETVIEFQQKNNRLLEITREFSVNAGVTTPVSTYMLTNSELLSLINDMPITNDQKKLMSNNVQIVRQQSYSIMSIIKEEVLAYVVQLPLYGVIDTPCWKLHTSPLCTTNTKEGSNICLTRTDRGWYCDNAGSVSFFPQAETCKVQSNRVFCDTMNSLTLPSEVNLCNIDIFNPKYDCKIMTSKTDVSSSVITSLGAIVSCYGKTKCTASNKNRGIIKTFSNGCDYVSNKGVDTVSVGNTLYYVNKQEGKSLYVKGEPIINFYDPLVFPSDEFDASISQVNEKINQSLAFIRKSDELLHNVNVGKSTTNIMITTIIIVIIVILLLLIAVGLFLYCKAR

SEQ ID NO: 9590 - protein, 553 aa, Artificial Sequence
  derived and/or modified protein sequence (wt) from HRSV__AHA83760.1__F-del
MELPIINTNAITTILAAVTLCFASSQNITEEFYQSTCSAVSKGYLSALRTGWYTSVITIELSNIKENKCNGTDAKVKLIKQELDKYKNAVTELQLLMQSTPAANSRARRELPRFMNYTLNNTKNTNVTLSKKRKRRFLGFLLGVGSAIASGIAVSKVLHLEGEVNKIKSALLSTNKAVVSLSNGVSVLTSKVLDLKNYMDKQLLPIVNKQSCSISNIETVIEFQQKNNRLLEITREFSVNAGVTTPVSTYMLTNNELLSLINDMPITNDQKKLMSNNVQIVRQQSYSIMSIIKEEVLAYVVQLPLYGVIDTPCWKLHTSPLCTTNTKEGSNICLTRTDRGWYCDNAGSVSFFPQAETCKVQSNRVFCDTMNSLTLPSEVNLCNIDIFNPKYDCKIMTSKTDVSSSVITSLGAIVSCYGKTKCTASNKNRGIIKTFSNGCDYVSNKGVDTVSVGNTLYYVNKQEGKSLYVKGEPIINFYDPLVFPSDEFDASISQVNEKINQSLAFIRKSDELLHNVNAGKSTTNIMITTIIIVIIVILLSLIAVGLLLYCKAR

SEQ ID NO: 9591 - protein, 553 aa, Artificial Sequence
  derived and/or modified protein sequence (wt) from HRSV__AHA83694.1__F-del
MELPILKTNAITTILAAVTLCFASSQNITEEFYQSTCSAVSKGYLSALRTGWYTSVITIELSNIKENKCNGTDAKVKLIKQELDKYKNAVTELQLLMQSTPAANNRARRELPRFMNYTLNNTKNNNVTLSKKRKRRFLGFLLGVGSAIASGIAVSKVLHLEGEVNKIKSALLSTNKAVVSLSNGVSVLTSKVLDLKNYIDKQLLPIVNKQSCSISNIETVIEFQQKNNRLLEITREFSVNAGVTTPVSTYMLTNSELLSLINDMPITNDQKKLMSNNVQIVRQQSYSIMSIIKEEVLAYVVQLPLYGVIDTPCWKLHTSPLCTTNTKEGSNICLTRTDRGWYCDNAGSVSFFPQAETCKVQSNRVFCDTMNSLTLPSDVNLCNIDIFNPKYDCKIMTSKTDVSSSVITSLGAIVSCYGKTKCTASNKNRGIIKTFSNGCDYVSNKGVDTVSVGNTLYYVNKQEGKSLYVKGEPIINFYDPLVFPSDEFDASISQVNEKINQSLAFIRKSDELLHNVNVGKSTTNIMITTIIIVIIVILLLLIAVGLFLYCKAR

SEQ ID NO: 9592 - protein, 553 aa, Artificial Sequence
  derived and/or modified protein sequence (wt) from HRSV__AGT75357.1__F-del
MELLIHRSSAIFLTLAINALYLTSSQNITEEFYQSTCSAVSRGYLSALRTGWYTSVITIELSNIKETKCNGTDTKVKLIKQELDKYKNAVTELQLLMQNTPAANNRARREAPQYMNYTINTTKNLNVSISKKRKRRFLGFLLGVGSAIASGIAVSKVLHLEGEVNKIKNALLSTNKAVVSLSNGVSVLTSKVLDLKNYINNQLLPIVNQQSCRISNIETVIEFQQKNSRLLEITREFSVNAGVTIPLSTYMLTNSELLSLINDMPITNDQKKLMSSNVQIVRQQSYSIMSIIKEEVLAYVVQLPIYGVIDTPCWKLHTSPLCTTNIKEGSNICLTRTDRGWYCDNAGSVSFFPQADTCKVQSNRVFCDTMNSLTLPSEVSLCNTDIFNSKYDCKIMTSKTDISSSVITSLGAIVSCYGKTKCTASNKNRGIIKTFSNGCDYVSNKGVDTVSVGNTLYYVNKLEGKNLYVKGEPIINYYDPLVFPSDEFDASISQVNEKINQSLAFIRRSDELLHNVNTGKSTTNIMITVIIIVIIVVLLSLIAIGLLLYCKAK

SEQ ID NO: 9593 - protein, 553 aa, Artificial Sequence
  derived and/or modified protein sequence (wt) from HRSV__AGN92848.1__F-del
MELPILKTNAITTILAAVTLCFASSQNITEEFYQSTCSAVSKGYLSALRTGWYTSVITIELSNIKENKCNGTDAKVKLIKQELDKYKNAVTELQLLMQSTPAANSRARRELPRFMNYTINNTKNTNVTLSKKRKRRFLGFLLGVGSAIASGIAVSKVLHLEGEVNKIKSALLSTNKAVVSLSNGVSVLTSKVLDLKNYIDKQLLPIVNKQSCSISNIETVIEFQQKNNRLLEITREFSVNAGVTTPVSTYMLTNSELLSLINDMPITNDQKKLMSSNVQIVRQQSYSIMSIIKEEVLAYVVQLPLYGVIDTPCWKLHTSPLCTTNTKEGSNICLTRTDRGWYCDNAGSVSFFPQAETCKVQSNRVFCDTMNSLTLPSEVNLCNIDIFNPKYDCKIMTSKTDVSSSVITSLGAIVSCYGKTKCTASNKNRGIIKTFSNGCDYVSNKGVDTVSVGNTLYYVNKQEGKSLYVKGEPIINFYDPLLFPSDEFDASISQVNEKINQSLAFIRKSDELLHNVNAGKSTTNIMITTIIIVIIVILLALIAVGLLLYCKAR

SEQ ID NO: 9594 - protein, 553 aa, Artificial Sequence
  derived and/or modified protein sequence (wt) from HRSV__AGN28792.1__F-del
MELLIHRSSAIFLTLAINALYLTSSQNITEEFYQSTCSAVSRGYFSALRTGWYTSVITIELSNIKETKCNGTDTKVKLIKQELDKYKNAVTELQLLMQNTPAANNRARREAPQYMNYTINTTKNLNVSISKKRKRRFLGFLLGVGSAIASGMAVSKVLHLEGEVNKIKNALLSTNKAVVSLSNGVSVLTSKVLDLKNYINNQLLPIVNQQSCRISNIETVIEFQQKNSRLLEITREFSVNAGVTTPLSTYMLTNSELLSLINDMPITNDQKKLMSSNVQIVRQQSYSIMSIIKEEVLAYVVQLPIYGVIDTPCWKLHTSPLCTTNIKEGSNICLTRTDRGWYCDNAGSVSFFPQADTCKVQSNRVFCDTMNSLTLPSEVSLCNTDIFNSKYDCKIMTSKTDISSSVITSLGAIVSCYGKTKCTASNKNRGIIKTFSNGCDYVSNKGVDTVSVGNTLYYVNKLEGKNLYVKGEPIINYYDPLVFPSDEFDASISQVNEKINQSLAFIRRSDELLHNVNTGKSTTNIMITAIIIVIIVVLLSLIAIGLLLYCKAK

SEQ ID NO: 9595 - protein, 553 aa, Artificial Sequence
  derived and/or modified protein sequence (wt) from HRSV__AGN28781.1__F-del
MELLIHRSSAIFLTLAINALYLTSSQNITEEFYQSTCSAVSRGYFSALRTGWYTSVITIELSNIKEIKCNGTDTKVKLIKQELDKYKNAVTELQLLMQNTPAANNRARREAPQYMNYTINTTKNLNVSISKKRKRRFLGFLLGVGSAIASGIAVSKVLHLEGEVNKIKNALLSTNKAVVSLSNGVSVLTSKVLDLKNYINNQLLPIVNQQSCRISNIETVIEFQQKNSRLLEITREFSVNAGVTTPLSTYMLTNSELLSLINDMPITNDQKKLMSSNVQIVRQQSYSIMSIIKEEVLAYVVQLPIYGVIDTPCWKLHTSPLCTTNIKEGSNICLTRTDRGWYCDNAGSVSFFPQADTCKVQSNRVFCDTMNSLTLPSEVSLCNTDIFNSKYDCKIMTSKTDISSSVITSLGAIVSCYGKTKCTASNKNRGIIKTFSNGCDYVSNKGVDTVSVGNTLYYVNKLEGKNLYVKGEPIINYYDPLVFPSDEFDASISQVNEKINQSLAFIRRSDELLHNVNTGKSTTNIMITVIIIVIIVVLLSLIAIGLLLYCKAK

SEQ ID NO: 9596 - protein, 553 aa, Artificial Sequence
  derived and/or modified protein sequence (wt) from HRSV__AGN28759.1__F-del
MELLIHRSSAIFLTLAINALYLTSSQNITEEFYQSTCSAVSRGYFSALRTGWYTSVITIELSNIKETKCNGTDTKVKLIKQELDKYKNAVTELQLLMQNIPAANNRARREAPQYMNYTINTTKNLNVSISKKRKRRFLGFLLGVGSAIASGIAVSKVLHLEGEVNKIKNALLSTNKAVVSLSNGVSVLTSKVLDLKNYINNQLLPIVNQQSCRISNIETVIEFQQKNSRLLEITREFSVNAGVTTPLSTYMLTNSELLSLINDMPITNDQKKLMSSNVQIVRQQSYSIMSIIKEEVLAYVVQLPIYGVIDTPCWKLHTSPLCTTNIKEGSNICLTRTDRGWYCDNAGSVSFFPQADTCKVQSNRVFCDTMNSLTLPSEVSLCNTDIFNSKYDCKIMTSKTDISSSVITSLGAIVSCYGKTKCTASNKNRGIIKTFSNGCDYVSNKGVDTVSVGNTLYYVNKLEGKNLYVKGEPIINYYDPLVFPSDEFDASISQVNEKINQSLAFIRRSDELLHNVNTGKSTTNIMITAIIIVIIVVLLSLIAIGLLLYCKAK

SEQ ID NO: 9597 - protein, 553 aa, Artificial Sequence
  derived and/or modified protein sequence (wt) from HRSV__AGN28748.1__F-del
MELLIHRSSAIFLTLAINALYLTSSQNITEEFYQSTCSAVSRGYFSALRTGWYTSVITIELSNIKETKCNGTDTKVKLIKQELDKYKNAVTELQLLMQNTPAANNRARREAPQYMNYTINTTKNLNVSISKKRKRRFLGFLLGVGSAIASGIAVSKVLHLEGEVNKIKNALLSTNKAVVSLSNGVSVLTSKVLDLKNYINNQLLPIVNQQSCRISNIETVIEFQQKNSRLLEITREFSVNAGVTTPLSTYMLTNSELLSLINDMPITNDQKKLMSSNVQIVRQQSYSIMSIIKEEVLAYVVQLPIYGVIDTPCWKLHTSPLCTTNIKEGSNICLTRTDRGWYCDNAGSVSFFPQADTCKVQSNRVFCDTMNSLTLPSEVSLCNTDIFNSKYDCKIMTSKTDISSSVITSLGAIVSCYGKTKCTASNKNRGIIKTFSNGCDYVSNKGVDTVSVGNTLYYVNKLEGKNLYVKGEPIINYYDPLVFPSDEFDASISQVNEKINQSLAFIRRSDELLHNINTGKSTTNIMITAIIIVIIVVLLSLIAIGLLLYCKAK

SEQ ID NO: 9598 - protein, 553 aa, Artificial Sequence
  derived and/or modified protein sequence (wt) from HRSV__AGN28693.1__F-del
MELLIHRSSAILLTLAINALYLTSSQNITEEFYQSTCSAVSRGYFSALRTGWYTSVITIELSNIKETKCNGTDTKVKLIKQELDKYKNAVTELQLLMQNTPAANNRARREAPQYMNYTINTTKKLNVSISKKRKRRFLGFLLGVGSAIASGIAVSKVLHLEGEVNKIKNALLSTNKAVVSLSNGVSVLTSKVLDLKNYINNQLLPIVNQQSCRISNIETVIEFQQKNSRLLEITREFSVNAGVTTPLSTYMLTNSELLSLINDMPITNDQKKLMSSNVQIVRQQSYSIMSIIKEEVLAYVVQLPIYGVIDTPCWKLHTSPLCTTNIKEGSNICLTRTDRGWYCDNAGSVSFFPQADTCKVQSNRVFCDTMNSLTLPSEVSLCNTDIFNSKYDCKIMTSKTDISSSVITSLGAIVSCYGKTKCTASNKNRGIIKTFSNGCDYVSNKGVDTVSVGNTLYYVNKLEGKNLYVKGEPIINYYDPLVFPSDEFDASISQVNEKINQSLAFIRRSDELLHNVNTGKSTTNIMITAIIIVIIVVLLSLIAIGLLLYCKAK

SEQ ID NO: 9599 - protein, 553 aa, Artificial Sequence
  derived and/or modified protein sequence (wt) from HRSV__AGN28638.1__F-del
MELLIHRSSAIFLTLAINALYLTSSQNITEEFYQSTCSAVSRGYLSALRTGWYTSVITIELSNIKETKCNGTDTKVKLIKQELDKYKNAVTELQLLMQNTPAANNRARREAPQYMNYTINTTKNLNVSISKKRKRRFLGFLLGVGSAIASGIAVSKVLHLEGEVNKIKNALLSTNKAVVSLSNGVSVLTSKVLDLKNYINNQLLPIVNQQSCRISNIETVIEFQQKNSRLLEITREFSVNAGVTTPLSTYMLTNSELLSLINDMPITNDQKKLMSSNVQIVRQQSYSIMSIIKEEVLAYVVQLPIYGVIDTPCWKLHTSPLCTTNIKEGSNICLTRTDRGWYCDNAGSVSFFPQADTCKVQSNRVFCDTMNSLTLPSEVSLCNTDIFNSKYDCKIMTSKTDISSSVITSLGAIVSCYGKTKCTASNKNRGIIKTFSNGCDYVSNKGVDTVSVGNTLYYVNKLEGKNLYVKGEPIINYYDPLVFPSDEFDASISQVNEKINQSLAFIRRSDELLHNVNAGKSTTNIMITAIIIVIIVVLLSLIAIGLLLYCKAQ

SEQ ID NO: 9600 - protein, 553 aa, Artificial Sequence
  derived and/or modified protein sequence (wt) from HRSV__AGN28627.1__F-del
MELLIHRSSAIFLTLAINALYLTSSQNITEEFYQSTCSAVSRGYLSALRTGWYTSVITIELSNIKETKCNGTDTKVKLIKQELDKYKNAVTELQLLMQNTPAANNRARREAPQYMNYTINTTKNLNVSISKKRKRRFLGFLLGVGSAIASGIAVSKVLHLEGEVNKIKNALLSTNKAVVSLSNGVSVLTSKVLDLKNYINNQLLPIVNQQSCRISNIETVIEFQQKNSRLLEITREFSVNAGVTTPLSTYMLTNSELLSLINDMPITNDQKKLMSSNVQIVRQQSYSIMSIIKEEVLAYVVQLPIYGVIDTPCWKLHTSPLCTTNIREGSNICLTRTDRGWYCDNAGSVSFFPQADTCKVQSNRVFCDTMNSLTLPSEVSLCNTDIFNSKYDCKIMTSKTDISSSVITSLGAIVSCYGKTKCTASNKNRGIIKTFSNGCDYVSNKGVDTVSVGNTLYYVNKLEGKNLYVKGEPIINYYDPLVFPSDEFDASISQVNEKINQSLAFIRRSDELLHNVNTGKSTTNIMITVIIIVIIVVLLSLIAIGLLLYCKAK

SEQ ID NO: 9601 - protein, 553 aa, Artificial Sequence
  derived and/or modified protein sequence (wt) from HRSV__AGN28539.1__F-del
MELLIHRSSAIFLTLAINALYITSSQNITEEFYQSTCSAVSRGYLSALRTGWYTSVITIELSNIKETKCNGTDTKVKLIKQELDKYKNAVTELQLLMQNTPAVNNRARREAPQYMNYTINTTKNPNVSISKKRKRRFLGFLLGVGSAIASGIAVSKVLHLEGEVNKIKNALLSTNKAVVSLSNGVSVLTSKVLDLKNYINNQLLPIVNQQSCRISNIETVIEFQQKNSRLLEITREFSVNAGVTTPLSTYMLTNSELLSLINDMPITNDQKKLMSSNVQIVRQQSYSIMSIIKEEVLAYVVQLPIYGVIDTPCWKLHTSPLCTTNIKEGSNICLTRTDRGWYCDNAGSVSFFPQADTCKVQSNRVFCDTMNSLTLPSEVSLCNTDIFNSKYDCKIMTSKTDISSSVITSLGAIVSCYGKTKCTASNKNRGIIKTFSNGCDYVSNKGVDTVSVGNTLYYVNKLEGKNLYVKGEPIINYYDPLVFPSDEFDASISQVNEKINQSLAFIRRSDELLHNVNTGKSTTNIMITAIIIVIIVVLLSLIAIGLLLYCKAK

SEQ ID NO: 9602 - protein, 553 aa, Artificial Sequence
  derived and/or modified protein sequence (wt) from HRSV__AGN28528.1__F-del
MELLIHRSSAIFLTLAINALYLTSSQNITEEFYQSTCSAVSRGYLSALRTGWYTSVITIELSNIKETKCNGTDTKVKLIKQELDKYKNAVTELQLLMQNTPAANNRARREASQYMNYTINTTKNLNVSISKKRKRRFLGFLLGVGSAIASGIAVSKVLHLEGEVNKIKNALLSTNKAVVSLSNGVSVLTSKVLDLKNYINNQLLPIVNQQSCRISNIETVIEFQQKNSRLLEITREFSVNAGVTTPLSTYMLTNSELLSLINDMPITNDQKKLMSSNVQIVRQQSYSIMSIIKEEVLAYVVQLPIYGVIDTPCWKLHTSPLCTTNIKEGSNICLTRTDRGWYCDNAGSVSFFPQADTCKVQSNRVFCDTMNSLTLPSEVSLCNTDIFNSKYDCKIMTSKTDISSSVITSLGAIVSCYGKTKCTASNKNRGIIKTFSNGCDYVSNKGVDTVSVGNTLYYVNKLEGKNLYVKGEPIINYYDPLVFPSDEFDASISQVNEKINQSLAFIRRSDELLHNVNTGKSTTNIMITAIIIVIIVVLLSLIAIGLLLYCKAK

SEQ ID NO: 9603 - protein, 553 aa, Artificial Sequence
  derived and/or modified protein sequence (wt) from HRSV__AGN28462.1__F-del
MELLIHRSSAIFLTLAINALYLTSSQNITEEFYQSTCSAVSRGYLSALRTGWYTSVITIELSNIKETKCNGTDTKVKLIKQELDKYKNAVTELQLLMQNTPAANNRARREAPQYMNYTINTTKNLNVSISKKRKRRFLGFLLGVGSAIASGIAVSKVLHLEGEVNKIKNALLSTNKAVVSLSNGVSVLTSKVLDLKNYINNQLLPIVNQQSCRISNIETVIEFQQKNSRLLEITREFSVNAGVTTPLSTYMLTNSELLSLINDMPITNDQKKLMSSNVQIVRQQSYSIMSIMKEEVLAYVVQLPIYGVIDTPCWKLHTSPLCTTNIKEGSNICLTRTDRGWYCDNAGSVSFFPQADTCKVQSNRVFCDTMNSLTLPSEVSLCNTDIFNSKYDCKIMTSKTDISSSVITSLGAIVSCYGKTKCTASNKNRGIIKTFSNGCDYVSNKGVDTVSVGNTLYYVNKLEGKNLYVKGEPIINYYDPLVFPSDEFDASISQVNEKINQSLAFIRRSDELLHNVNTGKSTTNIMITVIIIVIIVVLLSLIAIGLLLYCKAK

SEQ ID NO: 9604 - protein, 553 aa, Artificial Sequence
  derived and/or modified protein sequence (wt) from HRSV__AGN28440.1__F-del
MELLIHRSSAIFLTLAINALYLTSSQNITEEFYQSTCSAVSRGYLSALRTGWYTSVITIELSNIKEIKCNGTDTKVKLIKQELDKYKNAVTELQLLMQNTPAANNRARREAPQYMNYTINTTKNLNVSISKKRKRRFLGFLLGVGSAIASGIAVSKVLHLEGEVNKIKNALLSTNKAVVSLSNGVSVLTSKVLDLKNYINNQLLPIVNQQSCRISNIETVIEFQQKNSRLLEITREFSVNAGVTTPLSTYMLTNSELLSLINDMPITNDQKKLMSSNVQIVRQQSYSIMSIIKEEVLAYVVQLPIYGVIDTPCWKLHTSPLCTTNIKEGSNICLTRTDRGWYCDNAGSVSFFPQADTCKVQSNRVFCDTMNSLTLPSEVSLCNTDIFNSKYDCKIMTSKTDISSSVITSLGAIVSCYGKTKCTASNKNRGIIKTFSNGCDYVSNKGVDTVSVGNTLYYVNKLEGKNLYVKGEPIINYYDPLVFPSDEFDASISQVNEKINQSLAFIRRSDELLHNVNTGKSTTNIMITVIIIVIIVVLLSLIAIGLLLYCKAK

SEQ ID NO: 9605 - protein, 553 aa, Artificial Sequence
  derived and/or modified protein sequence (wt) from HRSV__AGL96787.1__F-del
MEVPILKTNAITTILTAVTLCFASSQNITEEFYQSTCSAVSKGYLSALRTGWYTSVITIELSNIKENKCNGTDAKVKLIKQELDKYKNAVTELQLLMQSTPAANSRARRELPRFMNYTLNNTKNTNVTLSKKRKRRFLGFLLGVGSAIASGIAVSKVLHLEGEVNKIKSALLSTNKAVVSLSNGVSVLTSKVLDLKNYIDKQLLPIVNKQSCSISNIETVIEFQQKNNRLLEITREFSVNAGVTTPVSTYMLTNSELLSLINDMPITNDQKKLMSSNVQIVRQQSYSIMSIIKEEVLAYVVQLPLYGVIDTPCWKLHTSPLCTTNTKEGSNICLTRTDRGWYCDNAGSVSFFPQAETCKVQSNRVFCDTMNSLTLPSEVNLCNIDIFNPKYDCKIMTSKTDVSSSVITSLGAIVSCYGKTKCTASNKNRGIIKTFSNGCDYVSNKGVDTVSVGNTLYYVNKQEGKSLYVKGEPIINFYDPLVFPSDEFDASISQVNEKINQSLAFIRKSDELLHNVNAGKSTANIMITTIIIVIIVILLALIAVGLLLYCKAR

SEQ ID NO: 9606 - protein, 553 aa, Artificial Sequence
  derived and/or modified protein sequence (wt) from HRSV__AGL96786.1__F-del
MELPILKTNAITTILAAVTLCFASSQNITEEFYQSTCSAVSKGYLSALRTGWYTSVITIELSNIKENKCNGTDAKVKLIKQELDKYKNAVTELQLLMQSTPAANSRARRELPRFMNYTLNNTKNTNVTLSKKRKRRFLGFLLGVGSAIASGIAVSKVLHLEGEVNKIKSALLSTNKAVVSLSNGVSVLTSKVLDLKNYIDKQLLPIVNKQSCSISNIETVIEFQQKNNRLLEITREFSVNAGVTTPVSTYMLTNSELLSLINDMPITNDQKKLMSSNVQIVRQQSYSIMSIIKEEVLAYVVQLPLYGVIDTPCWKLHTSPLCTTNTKEGSNICLTRTDRGWYCDNAGSVSFFPQAETCKVQSNRVFCDTMNSLTLPSEVNLCNIDIFNPKYDCKIMTSKTDVSSSVITSLGAIVSCYGKTKCTASNKNRGIIKTFSNGCDYVSNKGVDTVSVGNTLYYVNKQEGKSLYVKGEPIINFYDPLVFPSDEFDASISQVNEKINQSLAFIRKTDELLHNVNAGKSTTNIMITTIIIVIIVILLALIAVGLLLYCKAR

SEQ ID NO: 9607 - protein, 553 aa, Artificial Sequence
  derived and/or modified protein sequence (wt) from HRSV__AGL96784.1__F-del
MELPILKTNAITAILAAVSLCFASSQNITEEFYQSTCSAVSKGYLSALRTGWYTSVITIELSNIKENKCNGTDAKVKLIKQELDKYKNAVTELQLLMQSTPAANNRARRELPRFMNYTLNNTKNNNVTLSKKRKRRFLGFLLGVGSAIASGIAVSKVLHLEGEVNKIKSALLSTNKAVVSLSNGVSVLTSKVLDLKNYIDKQLLPIVNKQSCSISNIETVIEFQQKNNRLLEITREFSVNAGVTTPVSTYMLTNSELLSLINDMPITNDQKKLMSNNVQIVRQQSYSIMSIIKEEVLAYVVQLPLYGVIDTPCWKLHTSPLCTTNTKEGSNICLTRTDRGWYCDNAGSVSFFPQTETCKVQSNRVFCDTMNSLTLPSEVNLCNIDIFNPKYDCKIMTSKTDVSSSVITSLGAIVSCYGKTKCTASNKNRGIIKTFSNGCDYVSNKGVDTVSVGNTLYYVNKQEGKSLYVKGEPIINFYDPLVFPSDEFDASISQVNEKINQSLAFIRKSDELLHNVNVGKSTTNIMITTIIIVIIVILLLLIAVGLFLYCRAR

SEQ ID NO: 9608 - protein, 553 aa, Artificial Sequence
  derived and/or modified protein sequence (wt) from HRSV__AAS93662.1__F-del
MELLIHRSSAIFLTLSINALYLTSSQNITEEFYQSTCSAVSRGYFSALRTGWYTSVITIELSNIKETKCNGTDTKVKLIKQELDKYKNAVTELQLLMQNTPATNNRARREAPQYMNYTINTTKNLNVSISKKRKRRFLGFLLGVGSAIASGIAVSKVLHLEGEVNKIKNALLSTNKAVVSLSNGVSVLTSKVLDLKNYINNQLLPIVNQQSCRISNIETVIEFQQKNSRLLEITREFSVNAGVTTPLSTYMLTNSELLSLINDMPITNDQKKLMSSNVQIVRQQSYSIMSIIKEEVLAYVVQLPIYGVIDTQCWKLHTSPLCTTNIKEGSNICLTRTDRGWYCDNAGSVSFFPQADTCKVQSNRVFCDTMNSLTLPSEVSLCNTDIFNSKYDCKIMTSKTDISSSVITSLGAIVSCYGKTKCTASNKNRGIIKTFSNGCDYVSNKGVDTVSVGNTLYYVNKLEGKNLYVKGEPIINYYDPLVFPSDEFDASISQVNEKINQSLAFIRRSDELLHNVNTGKSTTNIMITAIIIVIIVVLLSLIAIGLLLYCKAK

SEQ ID NO: 9609 - protein, 553 aa, Artificial Sequence
  derived and/or modified protein sequence (wt) from HRSV__AAS93657.1__F-del
MELLIHRSSAILLTLAINALYLTSSQNITEEFYQSTCSAVSRGYFSALRTGWYTSVITIELSNIKETKCNGTDTKVKLIKQELDKYKNAVTELQLLMQNTPAANNRARREAPQYMNYTINTTKNLNVSISKKRKRRFLGFLLGVGSAIASGIAVSKVLHLEGEVNKIKNALLSTNKAVVSLSNGVSVLTSKVLDLKNYINNQLLPIVNQQSCRISNIETVIEFQQKNSRLLEITREFSVNAGVTTPLSTYMLTNSELLSLINDMPITNDQKKLMSSNVQIVRQQSYSIMSIIKEEVLAYVVQLPIYGVIDTHCWKLHTSPLCTTNIKEGSNICLTRTDRGWYCDNAGSVSFFPQADTCKVQSNRVFCDTMNSLTLPSEVSLCNTDIFNSKYDCKIMTSKTDISSSVITSLGAIVSCYGKTKCTASNKNRGIIKTFSNGCDYVSNKGVDTVSVGNTLYYVNKLEGKNLYVKGEPIINYYDPLVFPSDEFDASISQVNEKINQSLAFIRRSDELLHNVNTGKSTTNIMITAIIIVIIVVLLSLIAIGLLLYCKAK

SEQ ID NO: 9610 - protein, 553 aa, Artificial Sequence
  derived and/or modified protein sequence (wt) from HRSV__AAS93656.1__F-del
MELPILKTNAITTILAAAILCFTSSQNITEEFYQSTCSAVSKGYLSALRTGWYTSVITIELSNIKENKCNGTDAKVKLIKQELDKYKNAVTELQLLMQSTPAANNRARRELPRFMNYTLNNTKNTNVTLSKKRKRRFLGFLLGVGSAIASGIAVSKVLHLEGEVNKIKSALLSTNKAVVSLSNGVSVLTSKVLDLKNYIDKQLLPIVNKQSCSISNIETVIEFQQKNNRLLEITREFSVNAGVTTPVSTYMLTNSELLSLINDMPITNDQKKLMSNNVQIVRQQSYSIMSIIKEEVLAYVVQLPLYGVIDTPCWKLHTSPLCTTNTKEGSNICLTRTDRGWYCDNAGSVSFFPQAETCKVQSNRVFCDTMNSLTLPSEVNLCNIDIFNPKYDCKIMTSKTDVSSSVITSLGAIVSCYGKTKCTASNKNRGIIKTFSNGCDYVSNKGVDTVSVGNTLYYVNKQEGKSLYVKGEPIINFYDPLVFPSDEFDASISQVNEKINQSLAFIRKSDELLHNVNVGKSTTNIMITTIIIVIIVILLSLIAVGLLLYCRAR

SEQ ID NO: 9611 - protein, 553 aa, Artificial Sequence
  derived and/or modified protein sequence (wt) from HRSV__AAS93659.1__F-del
MELVIHRSSAIFLTLAINALYLTSSQNITEEFYQSTCSAVSRGYFSALRTGWYTSVITIELSNIKETKCNGTDTKVKLIKQELDKYKNAVTELQLLMQNTPAANNRARREAPQYMNYTINTTKNLNVSISKKRKRRFLGFLLGVGSAIASGIAVSKVLHLEGEVNKIKNALLSTNKAVVSLSNGVSVLTSKVLDLKNYINNQLLPIVNQQSCRISNIETVIEFQQKNSRLLEITREFSVNAGVTTPLSTYMLTNSELLSLINDMPITNDQKKLMSSNVQIVRQQSYSIMSVIKEEVLAYVVQLPIYGVIDTPCWKLHTSPLCTTNIKEGSNICLTRTDRGWYCDNAGSVSFFPQADTCKVQSNRVFCDTMNSLTLPSEVSLCNTDIFNSKYDCKIMTSKTDISSSVITSLGAIVSCYGKTKCTASNKNRGIIKTFSNGCDYVSNKGVDTVSVGNTLYYVNKLEGKNLYVKGEPIINYYDPLVFPSDEFDASISQVNEKINQSLAFIRRSDELLHNVNTGKSTTNIMITAIIIVIIVVLLSLIAIGLLLYCKAK

SEQ ID NO: 9612 - protein, 553 aa, Artificial Sequence
  derived and/or modified protein sequence (wt) from HRSV__AAS93660.1__F-del
MELLIHRSSAIFLTLAINALYLTSSQNITEEFYQSTCSVVSRGYFSALRTGWYTSVITIELSNIKETKCNGTDTKVKLIKQELDKYKNAVTELQLLMQNTPAANNRARREAPQYMNYTINTTKNLNVSISKKRKRRFLGFLLGVGSAIASGIAVSKVLHLEGEVNKIKNALLSTNKAVVSLSNGVSVLTSKVLDLKNYINNQLLPIVNQQSCRISNIETVIEFQQKNSRLLEITREFSVNAGVTTPLSTYMLTNSELLSLINDMPITNDQKKLMSSNVQIVRQQSYSIMSIIKEEVLAYVVQLPIYGVIDTPCWKLHTSPLCTTNIKEGSNICLTRTDRGWYCDNAGSVSFFPQADTCKVQSNRVFCDTMNSLTLPSEVSLCNTDIFNSKYDCKIMTSKTDISSSVITSLGAIVSCYGKTKCTASNKNRGIIKTFSNGCDYVSNKGVDTVSVGNTLYYVNKLEGKNLYVKGEPIINYYDPLVFPSDEFDASISQVNEKINQSLAFIRRSDELLHNVNTGKSTTNIMITAIIIVIIVVLLSLIAIGLLLYCKAK

SEQ ID NO: 9613 - protein, 553 aa, Artificial Sequence
  derived and/or modified protein sequence (wt) from HRSV__AAS93663.1__F-del
MELLIHRSSAIFLTFAINALYLTSSQNITEEFYQSTCSAVSRGYFSALRTGWYTSVITIELSNIKETKCNGTDTKVKLIKQELDKYKNAVTELQLLMQNTPAANNRARREAPQYMNYTINTTKNLNVSISKKRKRRFLGFLLGVGSAIASGIAVSKVLHLEGEVNKIKNALLSTNKAVVSLSNGVSVLTSKVLDLKNYINNQLLPIVNQQSCRISNIETVIEFQQKNSRLLEITREFSVNAGVTTPLSTYMLTNSELLSLINDMPITNDQKKLMSSNVQIVRQQSYSIMSIIKEEVLAYVVQLPIYGVIDTPCWKLHTSPLCTTNIKEGSNICLTRTDRGWYCDNAGSVSFFPQADTCKVQSNRVFCDTMNSLTLPSEVSLCNTDIFNSKYDCKIMTSKTDISSSVITSLGAIVSCYGKTKCTASNKNRGIIKTFSNGCDYVSNKGVDTVSVGNTLYYVNKLEGKNLYVKGEPIINYYDPLVFPSDEFDASISQVNEKINQSLAFIRRSDELLHNVNTGKSTTNIMITAIIIVIIVVLLSLIAIGLLLYCKAK

SEQ ID NO: 9614 - protein, 553 aa, Artificial Sequence
  derived and/or modified protein sequence (wt) from HRSV__AAS93664.1__F-del
MELLIHRSSAIFLTLAINALYLTSSQNITEEFYQSTCSAVSRGYFSALRTGWYTSVITIELSNIKETKCNGTDTKVKLIKQELDKYKNAVTELQLLMQNTPAANNRARREAPHYMNYTINTTKNLNVSISKKRKRRFLGFLLGVGSAIASGIAVSKVLHLEGEVNKIKNALLSTNKAVVSLSNGVSVLTSKVLDLKNYINNQLLPIVNQQSCRISNIETVIEFQQKNSRLLEITREFSVNAGVTTPLSTYMLTNSELLSLINDMPITNDQKKLMSSNVQIVRQQSYSIMSIIKEEVLAYVVQLPIYGVIDTPCWKLHTSPLCTTNIKEGSNICLTRTDRGWYCDNAGSVSFFPQADTCKVQSNRVFCDTMNSLTLPSEVSLCNTDIFNSKYDCKIMTSKTDISSSVITSLGAIVSCYGKTKCTASNKNRGIIKTFSNGCDYVSNKGVDTVSVGNTLYYVNKLEGKNLYVKGEPIINYYDPLVFPSDEFDASISQVNEKINQSLAFIRRSDELLHNVNTGKSTTNIMITAIIIVIIVVLLSLIAIGLLLYCKAK

SEQ ID NO: 9615 - protein, 553 aa, Artificial Sequence
  derived and/or modified protein sequence (wt) from HRSV__AAS93655.1__F-del
MELPILKTNAITTILAAATLCFASSQNITEEFYQSTCSAVSKGYLSALRTGWYTSVITIELSNIKENKCNGTDAKVKLIKQELDKYKNAVTELQLLMQSTPAANNRARRELPRFMNYTLNNTKNTNVTLSKKRKRRFLGFLLGVGSAIASGIAVSKVLHLEGEVNKIKSALLSTNKAVVSLSNGVSVLTSKVLDLKNYIDKQLLPIVNKQSCSISNIETVIEFQQKNNRLLEITREFSVNAGVTTPVSTYMLTNSELLSLINDMPITNDQKKLMSNNVQIVRQQSYSIMSIIKEEVLAYVVQLPLYGVIDTPCWKLHTSPLCTTNTKEGSNICLTRTDRGWYCENAGSVSFFPQAETCKVQSNRVFCDTMNSLTLPSEVNLCNIDIFNPKYDCKIMTSKTDVSSSVITSLGAIVSCYGKTKCTASNKNRGIIKTFSNGCDYVSNKGVDTVSVGNTLYYVNKQEGKSLYVKGEPIINFYDPLVFPSDEFDASISQVNEKINQSLAFIRKSDELLHNVNVGKSTTNIMITTIIIVIIVILLSLIAVGLLLYCKAR

SEQ ID NO: 9616 - protein, 553 aa, Artificial Sequence
  derived and/or modified protein sequence (wt) from HRSV__AHG54517.1__F-del
MELLIHRSSAIFLTLAINALYLTSSQNITEEFYQSTCSAVSKGYLSALRTGWYTSVITIELSNIKENKCNGTDAKVKLIKQELDKYKNAVTELQLLMQSTPAANSRARRELPRFMNYTLNNTKNTNVTLSKKRKRRFLGFLLGVGSAIASGIAVSKVLHLEGEVNKIKSALLSTNKAVVSLSNGVSVLTSKVLDLKNYIDKQLLPIVNKQSCSISNIETVIEFQQKNNRLLEITREFSVNAGVTTPVSTYMLTNSELLSLINDMPITNDQKKLMSSNVQIVRQQSYSIMSIIKEEVLAYVVQLPLYGVIDTPCWKLHTSPLCTTNTKEGSNICLTRTDRGWYCDNAGSVSFFPQAETCKVQSNRVFCDTMNSLTLPSEVNLCNIDIFNPKYDCKIMTSKTDVSSSVITSLGAIVSCYGKTKCTASNKNRGIIKTFSNGCDYVSNKGVDTVSVGNTLYYVNKQEGKSLYVKGEPIINFYDPLVFPSDEFDASISQVNEKINQSLAFIRKSDELLHNVNAGKSTTNIMITTIIIVIIVILLALIAVGLLLYCKAR

SEQ ID NO: 9617 - protein, 553 aa, Artificial Sequence
  derived and/or modified protein sequence (wt) from HRSV__ASF87348.1__F-del
MELPILKANAITTILAAVTLCFASSQNITEEFYQSTCSAVSKGYLSALRTGWYTSVITIELSNIKENKCNGTDAKVKLIKQELDKYKNAVTELQLLMQSTPAANSRARRELPRFMNYTLNNTKNTNVTLSKKRKRRFLGFLLGVGSAIASGIAVSKVLHLEGEVNKIKSALLSTNKAVVSLSNGVSVLTSKVLDLKNYIDKQLLPIVNKQSCRISNIETVIEFQQKNNRLLEITREFSVNAGVTTPVSTYMLTNSELLSLINDMPITNDQKKLMSNNVQIVRQQSYSIMSIIKEEVLAYVVQLPLYGVIDTPCWKLHTSPLCTTNTKEGSNICLTRTDRGWYCDNAGSVSFFPQAETCKVQSNRVFCDTMNSLTLPSEVNLCNIDIFNPKYDCKIMTSKTDVSSSVITSLGAIVSCYGKTKCTASNKNRGIIKTFSNGCDYVSNKGVDTVSVGNTLYYVNKQEGKSLYVKGEPIINFYDPLVFPSDEFDASISQVNEKINQSLAFIRKSDELLHNVNAGKSTTNIMITTIIIVIIVILLALIAVGLLLYCKAR

SEQ ID NO: 9618 - protein, 553 aa, Artificial Sequence
  derived and/or modified protein sequence (wt) from HRSV__ASF87341.1__F-del
MELPILKANAITTILAAVTLCFASSQNITEEFYQSTCSAVSKGYLSALRTGWYTSVITIELSNIKENKCNGTDAKVKLIKQELDKYKNAVTELQLLMQSTPAANNRARRELPRFMNYTLNNTKNTNVTLSKKRKRRFLGFLLGVGSAIASGIAVSKVLHLEGEVNKIKSALLSTNKAVVSLSNGVSVLTSKVLDLKNYIDKQLLPIVNKQSCSISNIETVIEFQQKKNRLLENTKEFSVYLGVTTPLGTFMLTNSELLSLINDMPITNDQKKLMSHNVQIVRQQSYSIMSIIKEEVLAYVVQLPLYGVIDTPCWKLHTSPLCTTNTKEGSNICLTRTDRGWYCDNAGSVSFFPQAETCKVQSNRVFCDTMNSLTLPSEVNLCNIDIFNPKYDCKIMTSKTDVSSSVITSLGAIVSCYGKTKCTASNKNRGIIKTFSNGCDYVSNKGVDTVSVGNTLYYVNKQEGKSLYVKGEPIINFYDPLVFPSDEFDASISQVNEKINQSLAFIRKSDELLHNVNAGKSTTNIMITTIIIVIIVILLALIAVGLLLYCKAR

SEQ ID NO: 9619 - protein, 553 aa, Artificial Sequence
  derived and/or modified protein sequence (wt) from HRSV__ASF87344.1__F-del
MELPILKANAITTILAAVTLCFASSQNITEEFYQSTCSAVSKGYLSALRTGWYTSVITIELSNIKENKCNGTDAKVKLIKQELDKYKNAVTELQLLMQSTPAANSRARRELPRFMNYTLNNTKKTNVTLSKKRKRRFLGFLLGVGSAIASGIAVSKVLHLEGEVNKIKSALLSTNKAVVSLSNGLSVLTSKGLNPKNYIEKQLLPIVNKQSCRISNIETVIEFQQKNNRLLEITREFSVNAGVTTPVSTYMLTNSELLSLINDMPITNDQKKLMSNNVQIVRQQSYSIMSIIKEEVLAYVVQLPLYGVIDTPCWKLHTSPLCTTNTKEGSNICLTRTDRGWYCDNAGSVSFFPQAETCKVQSNRVFGDTMNSLTLPSEVNLCNIDIFNPKYDCKIMTSKTDVSSSVITSLGAIVSCYGKTKCTASNKNRGIIKTFSNGCDYVSNKGVDTVSVGNTLYYVNKQEGKSLYVKGEPIINFYDPLVFPSDEFDASISQVNEKINQSLAFIRKSDELLHNVNAGKSTTNIMITTIIIVIIVILLALIAVGLLLYCKAR

SEQ ID NO: 9620 - protein, 553 aa, Artificial Sequence
  derived and/or modified protein sequence (wt) from HRSV__ASF87351.1__F-del
MELPILKANAITTILAAVTLCFASSQNITEEFYQSTCSAVSKGYLSALRTGWYTSVITIELSNIKENKCNGTDAKVKLIKQELDKYKNAVTELQLLMQSTPAANSRARRELPRFMNYTLNNAKNTNVTLSKKRKRRFLGFLLGVGSAIASGIAVSKVLHLEGEVNKIKSALLSTNKAVVSLSNGVSVLTSKVLDLKNYIDKQLLPIVNKQSCSISNIETVIEFQQKNNRLLEITREFSVNAGVTTPVSTYMLTNSELLSLINDMPITNDQKKLMSSNVQIVRQQSYSIMSIIKEEVLAYVVQLPLYGVIDTPCWKLHTSPLCTTNTKEGSNICLTRTDRGWYCDNAGSVSFFPQAETCKVQSNRVFCDTMNSLTLPSEVNLCNIDIFNPKYDCKIMTSKTDVSSSVITSLGAIVSCYGKTKCTASNKNRGIIKTFSNGCDYVSNKGVDTVSVGNTLYYVNKQEGKSLYVKGEPIINFYDPLVFPSDEFDASISQVNEKINQSLAFIRKSDELLHNVNAGKSTTNIMITTIIIVIIVILLALIAVGLLLYCKAR

SEQ ID NO: 9621 - protein, 553 aa, Artificial Sequence
  derived and/or modified protein sequence (wt) from HRSV__ASF87338.1__F-del
MELPILKANAITTILAAVTLCFASSQNITEEFYQSTCSAVSKGYLSALRTGWYTSVITIELSNIKENKCNGTDAKVKLIKQELDKYKNAVTELQLLMQSTPAANSRARRELPRFMNYTLNNTKNTNVTLSKKRKRRFLGFLLGVGSAIASGIAVSKVLHLEGEVNKIKSALLSTNKAVVSLSNGVSVLTSKVLDLKNYIDKQLLPIVNKQSCRISNIETVIEFQQKNNRLLEITREFSVNAGVTTPVSTYMLTNSELLSLINDMPITNDQKKLMSNNVQIVRQQSYSIMSIIKEEVLAYVVPFPLYGVIDTPCWKLHTSPLCTTNTKEGSNICLTRTDRGWYCDNAGSVSFFPQAETCKVQSNRVFCDTMNSLTLPSEVNLCNIDIFNPKYDCKIMTSKTDVSSSVITSLGAIVSCYGKTKCTASNKNRGIIKTFSNGCDYVSNKGVDTVSVGNTLYYVNKQEGKSLYVKGEPIINFYDPLVFPSDEFDASISQVNEKINQSLAFIRKSDELLHNVNAGKSTTNIMITTIIIVIIVILLALIAVGLLLYCKAR

SEQ ID NO: 9622 - protein, 553 aa, Artificial Sequence
  derived and/or modified protein sequence (wt) from HRSV__ASF87342.1__F-del
MELPILKANAITTILAAVTLCFASSQNITEEFYQSTCSAVSKGYLSALRTGWYTSVITIELSNIKENKCNGTDAKVKLIKQELDKYKNAVTELQLLMQSTPAANSRARRELPRFMNYTLNNTKNTNVTLSKKRKRRFLGFLLGVGSAIASGIAVSKVLHLEGEVNKIKSALLSTNKAVVSLSNGVSVLTSKVLDLKNYIDKQLLPIVNKQSCSISNIETVIEFQQKNNRLLEITREFSVMAGVTTPVATIMLTNSELLSLINDMPITNDQKKLMSSNVQIVRQQSYSIMSIIKEEVLAYVVQLPLYGVIDTPCWKLHTSPLCTTNTKEGSNICLTRTDRGWYCDNAGSVSFFPQAETCKVQSNRVFCDTMNSLTLPSEVNLCNIDIFNPKYDCKIMTSKTDVSSSVITSLGAIVSCYGKTKCTASNKNRGIIKTFSNGCDYVSNKGVDTVSVGNTLYYVNKQEGKSLYVKGEPIINFYDPLVFPSDEFDASISQVNEKINQSLAFIRKSDELLHNVNAGKSTTNIMITTIIIVIIVILLALIAVGLLLYCKAR

SEQ ID NO: 9623 - protein, 553 aa, Artificial Sequence
  derived and/or modified protein sequence (wt) from HRSV__ASF87352.1__F-del
MELPILKANAITTILAAVTLCFASSQNITEEFYQSTCSAVSKGYLSALRTGWYTSVITIELSNIKENKCNGTDAKVKLIKQELDKYKNAVTELQLLMQSTPAANSRARRELPRFMNYALNNTKNTNVTLSKKRKRRFLGFLLGVGSAIASGIAVSKVLHLEGEVNKIKSALLSTNKAVVSLSNGVSVLTSKVLDLKNYIDKQLLPIVNKQSCSISNIETVIEFQQKNNRLLEITREFSVNAGVTTPVSTYMLTNSELLSLIHDMPITNDQKKLMSHNVQIVRQQSYSIMSIIKEEVLAYVVQLPLYGVIDTPCWKLHTSPLCTTNTKEGSNICLTRTDRGWYCDNAGSVSFFPQAETCKVQSNRVFCDTMNSLTLPSEVNLCNIDIFNPKYDCKIMTSKTDVSSSVITSLGAIVSCYGKTKCTASNKNRGIIKTFSNGCDYVSNKGVDTVSVGNTLYYVNKQEGKSLYVKGEPIINFYDPLVFPSDEFDASISQVNEKINQSLAFIRKSDELLHNVNAGKSTTNIMITTIIIVIIVILLALIAVGLLLYCKAR

SEQ ID NO: 9624 - protein, 553 aa, Artificial Sequence
  derived and/or modified protein sequence (wt) from HRSV__ASF87337.1__F-del
MELPILKQNAITSILAAVTLCFASSQNITEEFYQSTCSAVSKGYLSALRTGWYTSVITIELSNIKENKCNGTDAKVKLIKQELDKYKNAVTELQLLMQSTPAANSRARRELPRFMNYTLNNTKNTNVTLSKKRKRRFLGFLLGVGSAIASGIAVSKVLHLEGEVNKIKSALLSTNKAVVSLSNGVSVLTSKVLDLKNYIDKQLLPIVNKQSCRISNIETVIEFQQKNNRLLEITREFSVNAGVTTPVSTYMLTNSELLSLINDMPITNDQKKLMSNNVQIVRQQSYSIMSIIKEEVLAYVVQLPLYGVIDTPCWKLHTSPLCTTNTKEGSNICLTRTDRGWYCDNAGSVSFFPQAETCKVQSNRVFWDTMNSLTLPSEVNLCNIDIFNPKYDCKIMTSKTDVSSSVITSLGAIVSCYGKTKCTASNKNRGIIKTFSNGCDYVSNKGVDTVSVGNTLYYVNKQEGKSLYVKGEPIINFYDPLVFPSDEFDASISQVNEKINQSLAFIRKSDELLHNVNAGKSTTNIMITTIIIVIIVILLALIAVGLLLYCKAR

SEQ ID NO: 9625 - protein, 553 aa, Artificial Sequence
  derived and/or modified protein sequence (wt) from HRSV__ASF87336.1__F-del
MELPILKANAITTILAAVTLCFASSQNITEEFYQSTCSAVSKGYLSALRTGWYTSVITIELSNIKENKCNGTDAKVKLIKQELDKYKNAVTELQLLMQSTPAANSRARRELPRFMNYTLNNTKNTNVTLSKKRKRRFLGFLLGVGSAIASGIAVSKVLHLEGEVNKIKSALLSTNKAVVSLSNGVSVLTSKVLDLKNYIDKQLLPIVNKQSCSISNIETVIEFQQKNNRLLEITREFSVNAGVTTPVSTYMLTNSELLSLINDMPITNDQKKLMSSNVQIVRQQSYSIMSIIKEEVLAYVVQLPLYGVIDTPCWKLHTSPLCTTNTKEGSNICLTRTDRGWYCDNAGSVSFFPQAETCKVQSNRVFCDTMNSLTLPSEVNLCNIDIFNPKYDCKIMTSKTDVSSSVITSLGAIVSCYGKTKCTASNKNRGIIKTFSNGCDYVSNKGVDTVSVGNTLYYVNKQEGKSLYVKGEPIINFYDPLVFPSDEFDASISQVNEKINQSLAFIRKSDELLHNVNAGKSTTNIMITTIIIVIIVILLALIAVGLLLYCKAR

SEQ ID NO: 9626 - protein, 553 aa, Artificial Sequence
  derived and/or modified protein sequence (wt) from HRSV__AEQ98756.1__F-del
MELPILKTNAITTILAAVTLCFASSQNITEEFYQSTCSAVSKGYLSALRTGWYTSVITIELSNIKENKCNGTDAKVKLIKQELDKYKNAVTELQLLMQSTPAANSRARRELPRFMNYTLNNTKNTNVTLSKKRKRRFLGFLLGVGSAIASGIAVSKVLHLEGEVNKIKSALLSTNKAVVSLSNGVSVLTSKVLDLKNYIDKQLLPIVNKQSCSISNIETVIEFQQKNNRLLEITREFSVNAGVTTPVSTYMLTNSELLSLINDMPITNDQKKLMSSNVQIVRQQSYSIMSIIKEEVLAYVVQLPLYGVIDTPCWKLHTSPLCTTNIKEGSNICLTRTDRGWYCDNAGSVSFFPQAETCKVQSNRVFCDTMNSLTLPSEVNLCNIDIFNPKYDCKIMTSKTDVSSSVITSLGAIVSCYGKTKCTASNKNRGIIKTFSNGCDYVSNKGVDTVSVGNTLYYVNKQEGKSLYVKGEPIINFYDPLVFPSDEFDASISQVNEKINQSLAFIRKSDELLHNVNAGKSTTNIMITTIIIVIIVILLALIAVGLLLYCKAR

SEQ ID NO: 9627 - protein, 553 aa, Artificial Sequence
  derived and/or modified protein sequence (wt) from HRSV__AEQ98757.1__F-del
MELPILKTNAITTILAAVTLCFASSQNITEEFYQSTCSAVSKGYLSALRTGWYTSVITIELSNIKENKCNGTDAKVKLIKQELDKYKNAVTELQLLMQSTPAANSRARRELPRFMNYTLNNTKNTNVTLSKKRKRRFLGFLLGVGSAIASGIAVSKVLHLEGEVNKIKSALLSTNKAVVSLSNGVSVLTSKVLDLKNYIDKQLLPIVNKQSCSISNIETVIEFQQKNNRLLEITREFSVNAGVTTPISTYMLTNSELLSLINDMPITNDQKKLMSSNVQIVRQQSYSIMSIIKEEVLAYVVQLPLYGVIDTPCWKLHTSPLCTTNTKEGSNICLTRTDRGWYCDNAGSVSFFPQAETCKVQSNRVFCDTMNSLTLPSEVNLCNIDIFNPKYDCKIMTSKTDVSSSVITSLGAIVSCYGKTKCTASNKNRGIIKTFSNGCDYVSNKGVDTVSVGNTLYYVNKQEGKSLYVKGEPIINFYDPLVFPSDEFDASISQVNEKINQSLAFIRKSDELLHNVNAGKSTTNIMITTIIIVIIVILLALIAVGLLLYCKAR

SEQ ID NO: 9628 - protein, 553 aa, Artificial Sequence
  derived and/or modified protein sequence (wt) from HRSV__AEQ98755.1__F-del
MELPILKTNAITTILAAVTLCFASSQNITEEFYQSTCSAVSKGYLSALRTGWYTSVIAIELSNIKENKCNGTDAKVKLIKQELDKYKNAVTELQLLMQSTPAANSRARRELPRFMNYTLNNTKNTNVTLSKKRKRRFLGFLLGVGSAIASGIAVSKVLHLEGEVNKIKSALLSTNKAVVSLSNGVSVLTSKVLDLKNYIDKQLLPIVNKQSCSISNIETVIEFQQKNNRLLEITREFSVNAGVTTPVSTYMLTNSELLSLINDMPITNDQKKLMSSNVQIVRQQSYSIMSIIKEEVLAYVVQLPLYGVIDTPCWKLHTSPLCTTNTKEGSNICLTRTDRGWYCDNAGSVSFFPQAETCKVQSNRVFCDTMNSLTLPSEVNLCNIDIFNPKYDCKIMTSKTDVSSSVITSLGAIVSCYGKTKCTASNKNRGIIKTFSNGCDYVSNKGVDTVSVGNTLYYVNKQEGKSLYVKGEPIINFYDPLVFPSDEFDASISQVNEKINQSLAFIRKSDELLHNVNAGKSTTNIMITTIIIVIIVILLALIAVGLLLYCKAR

SEQ ID NO: 9629 - protein, 553 aa, Artificial Sequence
  derived and/or modified protein sequence (wt) from HRSV__AEQ98752.1__F-del
MDLPILKTNAITAILAVVSLCFASSQNITEEFYQSTCSAVSKGYLSALRTGWYTSVITIELSNIKENKCNGTDAKVKLIKQELDKYKNAVTELQLLMQSTPAANNRARRELPRFMNYTLNNTKNNNITLSKKRKRRFLGFLLGVGSAIASGIAVSKVLHLEGEVNKIKSALLSTNKAVVSLSNGVSVLTSKVLDLKNYIDKQLLPIVNKQSCSISNIETVIEFQQKNNRLLEITREFSVNAGVTTPVSTYMLTNSELLSLINDMPITNDQKKLMSNNVQIVRQQSYSIMSIIKEEVLAYVVQLPLYGVIDTPCWKLHTSPLCTTNTKEGSNICLTRTDRGWYCDNAGSVSFFPQAETCKVQSNRVFCDTMNSLTLPSEVNLCNIDIFNPKYDCKIMTSKTDVSSSVITSLGAIVSCYGKTKCTASNKNRGIIKTFSNGCDYVSNKGVDTVSVGNTLYYVNKQEGKSLYVKGEPIINFYDPLVFPSDEFDASISQVNEKINQSLAFIRKSDELLHNVNVGKSTTNIMITTIIIVIIVILLLLIAVGLFLYCKAR

SEQ ID NO: 9630 - protein, 553 aa, Artificial Sequence
  derived and/or modified protein sequence (wt) from HRSV__AEQ98753.1__F-del
MELPILKTNAITTILAAVILCFASSQNITEEFYQSTCSAVSKGYLSALRTGWYTSVITIELSNIKENKCNGTDAKVKLIKQELDKYKNAVTELQLLMQSTPAANSRARRELPRFMNYTLNNTKNTNVTLSKKRKRRFLGFLLGVGSAIASGIAVSKVLHLEGEVNKIKSALLSTNKAVVSLSNGVSVLTSKVLDLKNYIDKQLLPIVNKQSCSISNIETVIEFQQKNNRLLEITREFSVNAGVTTPVSTYMLTNSELLSLINDMPITNDQKKLMSSNVQIVRQQSYSIMSIIKEEVLAYVVQLPLYGVIDTPCWKLHTSPLCTTNTKEGSNICLTRTDRGWYCDNAGSVSFFPQAETCKVQSNRVFCDTMNSLTLPSEVNLCNIDIFNPKYDCKIMTSKTDVSSSVITSLGAIVSCYGKTKCTASNKNRGIIKTFSNGCDYVSNKGVDTVSVGNTLYYVNKQEGKSLYVKGEPIINFYDPLVFPSDEFDASISQVNEKINQSLAFIRKSDELLHNVNAGKSTTNIMITTIIIVIIVILLALIAVGLLLYCKAR

SEQ ID NO: 9631 - protein, 553 aa, Artificial Sequence
  derived and/or modified protein sequence (wt) from HRSV__AEQ98747.1__F-del
MELPILKTNAITTILAAVTLCFASSQNITEEFYQSTCSAVSKGYLSALRTGWYTSVITIELSNIKENKCNGTDAKVKLIKQELDKYKNAVTELQLLMQSTPAANSRARRELPRFMNYTLNNTKNTNVTLSKKRKRRFLGFLLGVGSAIASGIAVSKVLHLEGEVNKIKSALLSTNKAVVSLSNGVSVLTSKVLDLKNYIDKQLLPIVNKQSCSISNIETVIEFQQKNNRLLEITREFSVNAGVTTPVSTYMLTNSELLSLINDMPITNDQKKLMSSNVQIVRQQSYSIMSIIKEEVLAYVVQLPLYGVIDTPCWKLHTSPLCTTNTKEGSNICLTRTDRGWYCDNAGSVSFFPQAETCKVQSNRVFCDTMNSLTLPSEVNLCNIDIFNPKYDCKIMTSKTDVSSSVITSLGAIVSCYGKTKCTASNKNRGIIKTFSNGCDYVSNKGVDTVSVGNTLYYVNKQEGKSLYVKGEPIINFYDPLVFPSDEFDASISQVNEKINQSLAFIRKSDELLHNVNAGKSTTNIMITTIIIVITVILLALIAVGLLLYCKAR

SEQ ID NO: 9632 - protein, 553 aa, Artificial Sequence
  derived and/or modified protein sequence (wt) from HRSV__ASF87325.1__F-del
MELPILKTNAITTILAAVTLCFASSQNITEEFYQSTCSAVSKGYLSALRTGWYTSVITIELSNIKENKCNGTDAKVKLIKQELDKYKNAVTELQLLMQSTPAANSRARKELQRFMNYTLNNTKNTNVTLSKKRKRRFLGFLLGVGSAIASGIAVSKVLHLEGEVNKIKSALLSTNKAVVSLSNGVSVLTSKVLDLKNYIDKQLLPIVNKQSCSISNIETVIEFQQKNNRLLEITREFSVNAGVTTPVSTYMLTNSELLSLINDMPITNDQKKLMSSNVQIVRQQSYSIMSIIKEEVLAYVVQLPLYGVIDTPCWKLHTSPLCTTNTKEGSNICLTRTDRGWYCDNAGSVSFFPQAETCKVQSNRVFCDTMNSLTLPSEVNLCNIDIFNPKYDCKIMTSKTDVSSSVITSLGAIVSCYGKTKCTASNKNRGIIKTFSNGCDYVSNKGVDTVSVGNTLYYVNKQEGKSLYVKGEPIINFYDPLVFPSDEFDASISQVNEKINQSLAFIRKSDELLHNVNAGKSTTNIMITTIIIVIIVILLALIAVGLLLYCKAR

SEQ ID NO: 9633 - protein, 553 aa, Artificial Sequence
  derived and/or modified protein sequence (wt) from HRSV__ASF87326.1__F-del
MELPILKTNAIATILAAVTLCFASSQNITEEFYQSTCSAVSKGYLSALRTGWYTSVITIELSNIKENKCNGTDAKVKLIKQELDKYKNAVTELQLLMQSTPAANSRARRELPRFMDYTLNNTKNTNVTLSKKRKRRFLGFLLGVGSAIASGIAVSKVLHLEGEVNKIKSALLSTNKAVVSLSNGVSVLTSKVLDLKNYIDKQLLPIVNKQSCSISNIETVIEFQQKNNRLLEITREFSVNAGVTTPVSTYMLTNSELLSLINDMPITNDQKKLMSSNVQIVRQQSYSIMSIIKEEVLAYVVQLPLYGVIDTPCWKLHTSPLCTTNTKEGSNICLTRTDRGWYCDNAGSVSFFPQAETCKVQSNRVFCDTMNSLTLPSEVNLCNIDIFNPKYDCKIMTSKTDVSSSVITSLGAIVSCYGKTKCTASNKNRGIIKTFSNGCDYVSNKGVDTVSVGNTLYYVNKQEGKSLYVKGEPIINFYDPLVFPSDEFDASISQVNEKINQSLAFIRKSDELLHNVNAGKSTTNIMITTIIIVIIVILLALIAVGLLLYCKAR

SEQ ID NO: 9634 - protein, 553 aa, Artificial Sequence
  derived and/or modified protein sequence (wt) from HRSV__5W23_A__F-del
MELLILKANAITTILTAVTFCFASGQNITEEFYQSTCSAVSKGYLSALRTGWYTSVITIELSNIKENKCNGTDAKVKLIKQELDKYKNAVTELQLLMQSTPATNNRARRELPRFMNYTLNNAKKTNVTLSKKRKRRFLGFLLGVGSAIASGVAVSKVLHLEGEVNKIKSALLSTNKAVVSLSNGVSVLTSKVLDLKNYIDKQLLPIVNKQSCSISNIETVIEFQQKNNRLLEITREFSVNAGVTTPVSTYMLTNSELLSLINDMPITNDQKKLMSNNVQIVRQQSYSIMSIIKEEVLAYVVQLPLYGVIDTPCWKLHTSPLCTTNTKEGSNICLTRTDRGWYCDNAGSVSFFPQAETCKVQSNRVFCDTMNSLTLPSEVNLCNVDIFNPKYDCKIMTSKTDVSSSVITSLGAIVSCYGKTKCTASNKNRGIIKTFSNGCDYVSNKGVDTVSVGNTLYYVNKQEGKSLYVKGEPIINFYDPLVFPSDEFDASISQVNEKINQSLAFIRKSDELLSAIGGYIPEAPRDGQAYVRKDGEWVLLSTFLGGLVPRGSH

SEQ ID NO: 9635 - protein, 553 aa, Artificial Sequence
  derived and/or modified protein sequence (wt) from HRSV__5EA3_F__F-del
MELLILKANAITTILTAVTFCFASGQNITEEFYQSTCSAVSKGYLSALRTGWYTSVITIELSNIKENKCNGTDAKVKLIKQELDKYKNAVTELQLLMQSTPATNNRARRELPRFMNYTLNNAKKTNVTLSKKRKRRFLGFLLGVGSAIASGVAVCKVLHLEGEVNKIKSALLSTNKAVVSLSNGVSVLTFKVLDLKNYIDKQLLPILNKQSCSISNIETVIEFQQKNNRLLEITREFSVNAGVTTPVSTYMLTNSELLSLINDMPITNDQKKLMSNNVQIVRQQSYSIMCIIKEEVLAYVVQLPLYGVIDTPCWKLHTSPLCTTNTKEGSNICLTRTDRGWYCDNAGSVSFFPQAETCKVQSNRVFCDTMNSLTLPSEVNLCNVDIFNPKYDCKIMTSKTDVSSSVITSLGAIVSCYGKTKCTASNKNRGIIKTFSNGCDYVSNKGVDTVSVGNTLYYVNKQEGKSLYVKGEPIINFYDPLVFPSDEFDASISQVNEKINQSLAFIRKSDELLSAIGGYIPEAPRDGQAYVRKDGEWVLLSTFLGGLVPRGSH

SEQ ID NO: 9636 - protein, 553 aa, Artificial Sequence
  derived and/or modified protein sequence (wt) from HRSV__5UDD_A__F-del
MELLIHRSSAIFLTLAINALYLTSSQNITEEFYQSTCSAVSRGYFSALRTGWYTSVITIELSNIKETKCNGTDTKVKLIKQELDKYKNAVTELQLLTQNTPAANNRARREAPQYMNYTINTTKNLNVSISKKRKRRFLGFLLGVGSAIASGIAVCKVLHLEGEVNKIKNALLSTNKAVVSLSNGVSVLTFKVLDLKSYINNQLLPILNQQSCRISNIETVIEFQQKNSRLLEITREFSVNAGVTTPLSTYMLTNSELLSLINDMPITNDQKKLMSSNVQIVRQQSYSIMCIIKEEVLAYVVQLPIYGVIDTPCWKLHTSPLCTTNIKEGSNICLTRTDRGWYCDNAGSVSFFPQADTCKVQSNRVFCDTMNSLTLPSEVSLCNTDIFNSKYDCKIMTSKTDISSSVITSLGAIVSCYGKTKCTASNKNRGIIKTFSNGCDYVSNKGVDTVSVGNTLYYVNKLEGKNLYVKGEPIINYYDPLVFPSDEFDASISQVNEKINQSLAFIRRSDELLSAIGGYIPEAPRDGQAYVRKDGEWVLLSTFLGGLVPRGSH

SEQ ID NO: 9637 - protein, 553 aa, Artificial Sequence
  derived and/or modified protein sequence (wt) from HRSV__5EA8_F__F-del
MELLILKANAITTILTAVTFCFASGQNITEEFYQSTCSAVSKGYLSALRTGWYTSVITIELSNIKENKCNGTDAKVKLIKQELDKYKNAVTELQLLMQSTPATNNRARRELPRFMNYTLNNAKKTNVTLSKKRKRRFLGFLLGVGSAIASGVAVCKVLHLEGEVNKIKSALLSTNKAVVSLSNGVSVLTFKVLDLKNYIDKQLLPILNKQSCSISNIETVIEFQQKNNRLLEITREFSVNAGVTTPVSTYMLTNSELLSLINDMPITNDQKKLMSNNVQIVRQQSYSIMCIIKEEVLAYVVQLPLYGVIDTPCWKLHTSPLCTTNTKEGSNICLTRTDRGWYCDNAGSVSFFPQAETCKVQSNRVFCDTMNSLTLPSEVNLCNVDIFNPKYDCKIMTSKTDVSSSVITSLGAIVSCYGKTKCTASNKNRGIIKTFSNGCDYVSNKGVDTVSVGNTLYYVNKQEGKSLYVKGEPIINFYDPLVFPSDEFYASISQVNEKINQSLAFIRKSDELLSAIGGYIPEAPRDGQAYVRKDGEWVLLSTFLGGLVPRGSH

SEQ ID NO: 9638 - protein, 553 aa, Artificial Sequence
  derived and/or modified protein sequence (wt) from HRSV__AHG54458.1__F-del
MEFPILKTNAITTILAAVTLCFASSQNITEEFYQSTCSAVSKGYLSALRTGWYTSVITIELSNIKENKCNGTDAKVKLIKQELDKYKNAVTELQLLMQSTPAANSRARRELPRFMNYTLNNTKNTNVTLSKKRKRRFLGFLLGVGSAIASGIAVSKVLHLEGEVNKIKSALLSTNKAVVSLSNGVSVLTSKVLDLKNYIDKQLLPIVNKQSCSISNIETVIEFQQKNNRLLEITREFSVNAGVTTPVSTYMLTNSELLSLINDMPITNDQKKLMSSNVQIVRQQSYSIMSIIKEEVLAYVVQLPLYGVIDTPCWKLHTSPLCTTNTKEGSNICLTRTDRGWYCDNAGSVSFFPQAETCKVQSNRVFCDTMNSLTLPSEVNLCNIDIFNPKYDCKIMTSKTDVSSSVITSLGAIVSCYGKTKCTASNKNRGIIKTFSNGCDYVSNKGVDTVSVGNTLYYVNKQEGKSLYVKGEPIINFYDPLVFPSDEFDASISQVNEKINQSLAFIRQSDELLHNVNAGKSTTNIMITTIIIVIIVILLALIAVGLLLYCKAR

SEQ ID NO: 9639 - protein, 553 aa, Artificial Sequence
  derived and/or modified protein sequence (wt) from HRSV__AEN74947.1__F-del
MELPILKTNAITTILAAVTLCFASSQNITEEFYQSTCSAVSKGYLSALRTGWYTSVITIELSNIKENKCNGTDAKVKLIKQELDKYKNAVTELQLLMQSTPAANSRARRELPRFMNYTLNNTKNTNVTLSKKRKRRFLGFLLGVGSAIASGIAVSKVLHLEGEVNKIKSALLSTNKAVVSLSNGVSVLTSKVLDLKNYIDKQLLPIVNKQSCSISNIETVIEFQQKNNRLLEITREFSVNAGVTTPVSTYMLTNSELLSLINDMPITNDQKKLMSSNAQIVRQQSYSIMSIIKEEVLAYVVQLPIYGVIDTPCWKLHTSPLCTTNIKEGSNICLTRTDRGWYCDNAGSVSFFPQADTCKVQSNRVFCDTMNSLTLPSEVSLCNTDIFNSKYDCKIMTSKTDISSSVITSLGAIVSCYGKTKCTASNKNRGIIKTFSNGCDYVSNKGVDTVSVGNTLYYVNKLEGKNLYVKGEPIINYYNPLVFPSDEFDASISQVNEKINQSLAFIRRSDELLHNVNTGKSTTNIMITAIIIVIIVVLLSLIAIGLLLYCKAK

SEQ ID NO: 9640 - protein, 553 aa, Artificial Sequence
  derived and/or modified protein sequence (wt) from HRSV__AHG54485.1__F-del
MDLLIHRSSAIFLTLAINALYLTSSQNITEEFYQSTCSAVSRGYLSALRTGWYTSVITIELSNIKETKCNGTDTKVKLIKQELDKYKNAVTELQLLMQNTPAANNRARREAPQYMNYTINTTKNLNVSISKKRKRRFLGFLLGVGSAIASGIAVSKVLHLEGEVNKIKNALLSTNKAVVSLSNGVSVLTSKVLDLKNYINNQLLPIVNQQSCRISNIETVIEFQQKNSRLLEITREFSVNAGVTTPLSTYMLTNSELLSLINDMPITNDQKKLMSSNVQIVRQQSYSIMSIIKEEVLAYVVQLPIYGVIDTPCWKLHTSPLCTTNIKEGSNICLTRTDRGWYCDNAGSVSFFPQADTCKVQSNRVFCDTMNSLTLPSEVSLCNTDIFNSKYDCKIMTSKTDISSSVITSLGAIVSCYGKTKCTASNKNRGIIKTFSNGCDYVSNKGVDTVSVGNTLYYVNKLEGKNLYVKGEPIINYYDPLVFPSDEFDASISQVNEKINQSLAFIRRSDELLHNVNTGKSTTNIMITAIIIVIIVVLLSLIAIGLLLYCKAK

SEQ ID NO: 9641 - protein, 553 aa, Artificial Sequence
  derived and/or modified protein sequence (wt) from HRSV__AHG54477.1__F-del
MELPILKTNAITTILAAITLCFASSQNITEEFYQSTCSAVSKGYLSALRTGWYTSVITIELSNIKENKCNGTDAKVKLIKQELNKYKNAVTELQLLMQSTPAANSRARRELPRFMNYTLNNTKNTNVTLSKKRKRRFLGFLLGVGSAIASGIAVSKVLHLEGEVNKIKSALLSTNKAVVSLSNGVSVLTSKVLDLKNYIDKQLLPIVNKQSCSISNIETVIEFQQKNNRLLEITREFSVNAGVTTPVSTYMLTNSELLSLINDMPITNDQKKLMSSNVQIVRQQSYSIMSIIKEEVLAYVVQLPLYGVIDTPCWKLHTSPLCTTNTKEGSNICLTRTDRGWYCDNAGSVSFFPQAETCKVQSNRVFCDTMNSLTLPSEVNLCNIDIFNPKYDCKIMTSKTDVSSSVITSLGAIVSCYGKTKCTASNKNRGIIKTFSNGCDYVSNKGVDTVSVGNTLYYVNKQEGKSLYVKGEPIINFYDPLVFPSDEFDASISQVNEKINQSLAFIRKSDELLHNVNAGKSTTNIMITTIIIVIIVILLALIAVGLLLYCKAR

SEQ ID NO: 9642 - protein, 553 aa, Artificial Sequence
  derived and/or modified protein sequence (wt) from HRSV__AHG54451.1__F-del
MELPILKTNAITTILAAVTLCFASSQNITEEFYQSTCSAVSKGYLSALRTGWYTSVITIELSNIKENKCNGTDAKVKLIKQELDKYKNAVTELQLLMQSTPAANSRARRELPRFMNYTLNNTKNTNVTLSKKRKRRFLGFLLGVGSAIASGIAVSKVLHLEGEVNKIKSALLSTNKAVVSLSNGVSVLTSKVLDLKNYIDKQLLPIVNKQSCSISNIETVIEFQQKNNRLLEITREFSVNAGVTTPVSTYMLTNSELLSLINDMPITNDQKKLMSSNVQIVRQQSYSIMSIIKEEVLAYVVQLPLYGVIDTPCWKLHTSPLCTTNTKEGSNICLTRTDRGWYCDNAGSVSFFPQAETCKVQSNRVFCDTMNSLTLPSEVNLCNIDIFNPKYDCKIMTSKTDVSSSVITSLGAIVSCYGKTKCTASNKNRGIIKTFSNGCDYVSNKGVDTVSVGNTLYYVNKQEGKSLYVKGEPIINFYDPLVFPSDEFDASISQVNEKINQSLAFIRKSDELLHNVNAGKSTTNIMITTIIIVIIVILLALITVGLLLYCKAR

SEQ ID NO: 9643 - protein, 553 aa, Artificial Sequence
  derived and/or modified protein sequence (wt) from HRSV__AHG54463.1__F-del
MELPILKTNAITTILAAVTLCFASSQNITEEFYQSTCSAVSKGYLSALRTGWYTSVITIELSNIKENKCNGTDAKVKLIKQELDKYKNAVTELQLLMQSTPAANSRARRELPRFMNYTLNNTKNTNVTLSKKRKRRFLGFLLGVGSAIASGIAVSKVLHLEGEVNKIKSALLSTNKAVVSLSNGVSVLTSKVLDLKNYIDKQLLPIVNKQSCSISNIETVIEFQQKNNRLLEITREFSVNAGVTTPVSTYMLTNSELLSLINDMPITNDQKKLMSSNVQIVRQQSYSIMSIIKEEVLAYVVQLPLYGVIDTPCWKLHTSPLCTTNTKEGSNICLTRTDRGWYCDNAGSVSFFPQAETCKVQSNRVFCDTMNSLTLPSEVNLCNIDIFNPNYDCKIMTSKTDVSSSVITSLGAIVSCYGKTKCTASNKNRGIIKTFSNGCDYVSNKGVDTVSVGNTLYYVNKQEGKSLYVKGEPIINFYDPLVFPSDEFDASISQVNEKINQSLAFIRKSDELLHNVNAGKSTTNIMITTIIIVIIVILLALITVGLLLYCKAR

SEQ ID NO: 9644 - protein, 553 aa, Artificial Sequence
  derived and/or modified protein sequence (wt) from HRSV__AHG54445.1__F-del
MELPILKTNAITTILAAVTLCFASSQNITGEFYQSTCSAVSKGYLSALRTGWYTSVITIELSNIKENKCNGTDAKVKLIKQELDKYKNAVTELQLLMQSTPAANSRARRELPRFMNYTLNNTKNTNVTLSKKRKRRFLGFLLGVGSAIASGIAVSKVLHLEGEVNKIKSALLSTNKAVVSLSNGVSVLTSKVLDLKNYIDKQLLPIVNKQSCSISNIETVIEFQQKNNRLLEITREFSVNAGVTTPVSTYMLTNSELLSLINDMPITNDQKKLMSSNVQIVRQQSYSIMSIIKEEVLAYVVQLPLYGVIDTPCWKLHTSPLCTTNTKEGSNICLTRTDRGWYCDNAGSVSFFPQAETCKVQSNRVFCDTMNSLTLPSEVNLCNIDIFNPKYDCKIMTSKTDVSSSVITSLGAIVSCYGKTKCTASNKNRGIIKTFSNGCDYVSNKGVDTVSVGNTLYYVNKQEGKSLYVKGEPIINFYDPLVFPSDEFDASISQVNEKINQSLAFIRKSDELLHNVNAGKSTTNIMITTIIIVIIVILLALIAVGLLLYCKAR

SEQ ID NO: 9645 - protein, 553 aa, Artificial Sequence
  derived and/or modified protein sequence (wt) from HRSV__AEO12131.1__F-del
MELPILKTNAITTILAAVTLCFTSSQNITEEFYQSTCSAVSKGYLSALRTGWYTSVITIELSNIKENKCNGTDAKVKLIKQELDKYKNAVTELQLLMQSTPAANSRARRELPRFMNYTLNNTKNTNVTLSKKRKRRFLGFLLGVGSAIASGIAVSKVLHLEGEVNKIKSALLSTNKAVVSLSNGVSVLTSKVLDLKNYIDKQLLPIVNKQSCSISNIETVIEFQQKNNRLLEITREFSVNAGVTTPVSTYMLTNSELLSLINDMPITNDQKKLMSSNVQTVRQQSYSIMSIIKEEVLAYVVQLPLYGVIDTPCWKLHTSPLCTTNTKEGSNICLTRTDRGWYCDNAGSVSFFPQAETCKVQSNRVFCDTMNSLTLPSEVNLCNIDIFNPKYDCKIMTSKTDVSSSVITSLGAIVSCYGKTKCTASNKNRGIIKTFSNGCDYVSNKGVDTVSVGNTLYYVNKQEGKSLYVKGEPIINFYDPLVFPSDEFDASISQVNEKIDQSLAFIRKSDELLHNVNAGKSTTNIMITTIIIVIIVILLALIAVGLLLYCKAR

SEQ ID NO: 9646 - protein, 553 aa, Artificial Sequence
  derived and/or modified protein sequence (wt) from HRSV__AEN74945.1__F-del
MELLIHRSSAIFLTLAINALYLTSSQNITEEFYQSTCSAVSRGYFSALRTGWYTSVITIELSNIKETKCNGTDTKVKLIKQELDKYKNAVTELQLLMQNTPAANNRARREAPQYMNYTINTTKNLNVSISKKRKRRFLGFLLGVGSAIASGIAVSKVLHLEGEVNKIKNALLSTNKAVVSLSNGVSVLTSKVLDLKNYINNQLLPIVNQQSCRISTIETVIEFQQKNSRLLEINREFSVNAGVTTPLSTYMLTNSELLSLINDMPITNDQKKLMSSNVQIVRQQSYSIMSIIKEEVLAYVVRLPIYGVIDTPCWKLHTSPLCTTNIKEGSNICLTRTDRGWYCDNAGSVSFFPQADTCKVQSNRVFCDTMNSLTLPSEVSLCNTDIFNSKYDCKIMTSKTDISSSVITSLGAIVSCYGKTKCTASNKNRGIIKTFSNGCDYVSNKGVDTVSVGNTLYYVNKLEGKNLYVKGEPIINYYDPLVFPSDEFDASISQVNEKINQSLAFIRRSDELLHNVNTGKSTTNIMITAIIIVIIVVLLSLIAIGLLLYCKAK

SEQ ID NO: 9647 - protein, 553 aa, Artificial Sequence
  derived and/or modified protein sequence (wt) from HRSV__AEN74944.1__F-del
MELLIHRSSAIFLTLAINALYLTSSQNITEEFYQSTCSAVSRGYFSALRTGWYTSVITIELSNIKETKCNGTDTKVKLIKQELDKYKNAVTELQLLMQNTPAANNRARREAPQYMNYTINTTKNLNVSISKKRKRRFLGFLLGVGSAIASGMAVSKVLHLEGEVNKIKNALLSTNKAVVSLSNGVSVLTSKVLDLKNYINNQLLPIVNQQSCRISNIETVIEFQQKNSRLLEITRGFSVNAGVTTPLSTYMLTNSELLSLINDMPITNDQKKLMSSNVQIVRQQSYSIMSIIKEEVLAYVVQLPIYGVIDTPCWKLHTSPLCTTNIKEGSNICLTRTDRGWYCDNAGSVSFFPQADTCKVQSNRVFCDTMNSLTLPSEVSLCNTDIFNSKYDCKIMTSKTDISSSVITSLGAIVSCYGKTKCTASNKNRGIIKTFSNGCDYVSNKGVDTVSVGNTLCYVNKLEGKNLYVKGEPIINYYDPLVFPSDEFDASISQVNEKINQSLAFIRRSDELLHNVNTGKSTTNIMITAIIIVIIVVLLSLIAIGLLLYCKAK

SEQ ID NO: 9648 - protein, 553 aa, Artificial Sequence
  derived and/or modified protein sequence (wt) from HRSV__ASF87335.1__F-del
MELPILKTNAITTILAAVTLCFASSQNITEEFYQSTCSAVSKGYLSALRTGWYTSVITIELSNIKENKCNGTDAKVKLIKQELDKYKNAVTELQLLMQSTPAANSRARRELQRFTNYTLNNTKNTNVTLSKKRKRRFLGFLLGVGSAIASGIAVSKVLHLEGEVNKIKSALLSTNKAIVSLSNGVSVLTSKVLDLKNYIDKQLLPIVNKQSCSISNIETVIEFQQKNNRLLEITREFSVNAGVTTPVSTYMLTNSELLSLINDMPITNDQKKLMSSNVQIVRQQSYSIMSIIKEEVLAYVVQLPLYGVIDTPCWKLHTSPLCTTNTKEGSNICLTRTDRGWYCDNAGSVSFFPQAETCKVQSNRVFCDTMNSLTLPSEVNLCNIDIFNPKYDCKIMTSKTDVSSSVITSLGAIVSCYGKTKCTASNKNRGIIKTFSNGCDYVSNKGVDTVSVGNTLYYVNKQEGKSLYVKGEPIINFYDPLVFPSDEFDASISQVNEKINQSLAFIRKSDELLHNVNAGKSTTNIMITTIIIVIIAILSALIAVGLLLYCKAR

SEQ ID NO: 9649 - protein, 553 aa, Artificial Sequence
  derived and/or modified protein sequence (wt) from HRSV__AHG54515.1__F-del
MELLIHRSSAIFLTLAINALYLTSSQNITEEFYQSTCSAVSRGYLSALRTGWYTSVITIELSNIKENKCNGTDAKVKLIKQELDKYKNAVTELQLLMQSTPAANSRARRELPRFMNYTLNNTKNTNVTLSKKRKRRFLGFLLGVGSAIASGIAVSKVLHLEGEVNKIKSALLSTNKAVVSLSNGVSVLTSKVLDLKNYIDKQLLPIVNKQSCSISNIETVIEFQQKNNRLLEITREFSVNAGVTTPVSTYMLTNSELLSLINDMPITNDQKKLMSSNVQIVRQQSYSIMSIIKEEVLAYVVQLPLYGVIDTPCWKLHTSPLCTTNTKEGSNICLTRTDRGWYCDNAGSVSFFPQAETCKVQSNRVFCDTMNSLTLPSEVNLCNIDIFNPKYDCKIMTSKTDVSSSVITSLGAIVSCYGKTKCTASNKNRGIIKTFSNGCDYVSNKGVDTVSVGNTLYYVNKQEGKSLYVKGEPIINFYDPLVFPSDEFDASISQVNEKINQSLAFIRKSDELLHNVNAGKSTTNIMITTIIIVIIVILLALIAVGLLLYCKAR

SEQ ID NO: 9650 - protein, 553 aa, Artificial Sequence
  derived and/or modified protein sequence (wt) from HRSV__AHA61605.1__F-del
MELLILKTNAITTILAAVTLCFASSQNITEEFYQSTCSAVSKGYLSALRTGWYTSVITIELSNIKENKCNGTDAKVKLIKQELDKYKNAVTELQLLMQSTPAANSRARRELPRFMNYTLNNTKNTNVTLSKKRKRRFLGFLLGVGSAIASGIAVSKVLHLEGEVNKIKSALLSTNKAVVSLSNGVSVLTSKVLDLKNYIDKQLLPIVNKQSCSISNIETVIEFQQKNNRLLEITREFSVNAGVTTPVSTYMLTNSELLSLINDMPITNDQKKLMSSNVQIVRQQSYSIMSIIKEEVLAYVVQLPLYGVIDTPCWKLHTSPLCTTNTKEGSNICLTRTDRGWYCDNAGSVSFFPQAETCKVQSNRVFCDTMNSLTLPSEVNLCNVDIFNPKYDCKIMTSKTDVSSSVITSLGAIVSCYGKTKCTASNKNRGIIKTFSNGCDYVSNKGVDTVSVGNTLYYVNKQEGKSLYVKGEPIINFYDPLVFPSDEFDASISQVNEKINQSLAFIRKSDELLHHVNAGKSTTNIMITTIIIVIIVILLSLIAVGLLLYCKAR

SEQ ID NO: 9651 - protein, 553 aa, Artificial Sequence
  derived and/or modified protein sequence (wt) from HRSV__AHV81660.1__F-del
MELLIHRSSAIFLTLAINALYLTSSQNITEEFYQSTCSAVSRGYLSALRTGWYTSVITIELSNIKETKCNGTDTKVKLIKQELDKYKNAVTELQLLMQNTPAVNNRARREAPQYMNYTINTTKNLNVSISKKRKRRFLSFLLGVGSAIASGIAVSKVLHLEGEVNKIKNALLSTNKAVVSLSNGVSVLTSKVLDLKNYINNQLLPIVNQQSCRISNIETVIEFQQKNSRLLEITREFSVNAGVTTPLSTYMLTNSELLSLINDMPITNDQKKLMSSNVQIVRQQSYSIMSIIKEEVLAYVVQLPIYGVIDTPCWKLHTSPLCTTNIKEGSNICLTRTDRGWYCDNAGSVSFFPQADTCKVQSNRVFCDTMNSLTLPSEVSLCNTDIFNSKYDCKIMTSKTDISSSVITSLGAIVSCYGKTKCTASNKNRGIIKTFSNGCDYVSNKGVDTVSVGNTLYYVNKLEGKNLYVKGEPIINYYDPLVFPSDEFDASISQVNEKINQSLAFIRRSDELLHNVNTGKSTTNIMITAIIIVIIVVLLSLIAIGLLLYCKAR

SEQ ID NO: 9652 - protein, 553 aa, Artificial Sequence
  derived and/or modified protein sequence (wt) from HRSV__AHG54441.1__F-del
MELLIHRSSAIFLTLAINALYLTSSQNITEEFYQSTCSAVSRGYLSALRTGWYTSVITIELSNIKETKCNGTDTKVKLIKQELDKYKNAVTELQLLMQNTPAANNRARREAPQYMNYTINTTKNLNVSISKKRKRRFLGFLLGVGSAIASGIAVSKVLHLEGEVNKIKNALLSTNKAVVSLSNGVSVLTSKVLDLKNYINNQLLPIVNQQSCRISNIETVIEFQQKNSRLLEITREFSVNAGVTTPLSTYMLTNSELLSLINDMPITNDQKKLMSSNVQIVRQQSYSIMSIIKEEVLAYVVQLPIYGVIDTPCWKLHTSPLCTTNIKEGSNICLTRTDRGWYCDNAGSISFFPQADTCKVQSNRVFCDTMNSLTLPSEVSLCNTDIFNSKYDCKIMTSKTDISSSVITSLGAIVSCYGKTKCTASNKNRGIIKTFSNGCDYVSNKGVDTVSVGNTLYYVNKLEGKNLYVKGEPIINYYDPLVFPSDEFDASISQVNEKINQSLAFIRRSDELLHNVNTGKSTTNIMITAIIIVIIVVLLSLIAIGLLLYCKAQ

SEQ ID NO: 9653 - protein, 553 aa, Artificial Sequence
  derived and/or modified protein sequence (wt) from HRSV(Memphis-37)__AIY60640.1__F-del
MELPILKTNAITTILAAVTLCFASSQNITEEFYQSTCSAVSKGYLSALRTGWYTSVITIELSNIKENKCNGTDAKVKLIKQELDKYKNAVTELQLLMQSTPAANNRARRELPRFMNYTLNNTKNNNVTLSKKRKRRFLGFLLGVGSAIASGIAVSKVLHLEGEVNKIKNALLSTNKAVVSLSNGVSVLTSKVLDLKNYIDKQLLPIVNKQSCSISNIETVIEFQQKNNRLLEITREFSVNAGVTTPVSTYMLTNSELLSLINDMPITNDQKKLMSNNVQIVRQQSYSIMSIIKEEVLAYVVQLPLYGVIDTPCWKLHTSPLCTTNTKEGSNICLTRTDRGWYCDNAGSVSFFPQAETCKVQSNRVFCDTMNSLTLPSEVNLCNIDIFNPKYDCKIMTSKTDVSSSVITSLGAIVSCYGKTKCTASNKNRGIIKTFSNGCDYVSNKGVDTVSVGNTLYYVNKQEGKSLYVKGEPIINFYDPLVFPSDEFDASISQVNEKINQSLAFIRKSDELLHNVNVGKSTTNIMITTIIIVIIVILLLLIAVGLFLYCKAR

SEQ ID NO: 9654 - protein, 553 aa, Artificial Sequence
  derived and/or modified protein sequence (wt) from HRSV__ABQ42594.1__F-del
MELPILKANAITTILAAVTFCFASSQNITEEFYQSTCSAVSKGYLSALRTGWYTSVITIELSNIKENKCNGTDAKVKLMKQELDKYKNAVTELQLLMQSTPAANNRARRELPRFMNYTLNNTKKTNVTLSKKRKRRFLGFLLGVGSAIASGIAVSKVLHLEGEVNKIKSALLSTNKAVVSLSNGVSVLTSKVLDLKNYIDKQLLPIVNKQSCRISNIETVIEFQQKNNRLLEITREFSVNVGVTTPVSTYMLTNSELLSLINDMPITNDQKKLMSNNVQIVRQQSYSIMSIIKEEVLAYVVQLPLYGVIDTPCWKLHTSPLCTTNTKEGSNICLTRTDRGWYCDNAGSVSFFPQAETCKVQSNRVFCDTMNSLTLPSEVNLCNVDIFNPKYDCKIMTSKTDVSSSVITSLGAIVSCYGKTKCTASNKNRGIIKTFSNGCDYVSNKGVDTVSVGNTLYYVNKQEGKSLYVKGEPIINFYDPLVFPSDEFDASISQVNEKINQSLAFIRKSDELLHNVNAGKSTTNIMITTIIIVIIVILLSLIAVGLLLYCKAR

SEQ ID NO: 9655 - protein, 553 aa, Artificial Sequence
  derived and/or modified protein sequence (wt) from HRSV__ACO83297.1__F-del
MELPILKANAITTILAAVTFCFASSQNITEEFYQSTCSAVSKGYLSALRTGWYTSVITIELSNIKKNKCNGTDAKVKLMKQELDKYKNAVTELQLLMQSTPAANNRARRELPRFMNYTLNNTKKTNVTLSKKRKRRFLGFLLGVGSAIASGIAVSKVLHLEGEVNKIKSALLSTNKAVVSLSNGVSVLTSRVLDLKNYIDKQLLPIVNKQSCRISNIETVIEFQQKNNRLLEITREFSVNAGVTTPVSTYMLTNSELLSLINDMPITNDQKKLMSNNVQIVRQQSYSIMSIIKEEVLAYVVQLPLYGVIDTPCWKLHTSPLCTTNTKEGSNICLTRTDRGWYCDNAGSVSFFPQAEKCKVQSNRVFCDTMYSLTLPSEVNLCNVDIFNPKYDCKIMTSKTDVSSSVITSLGAIVSCYGKTKCTASNKNRGIIKTFSNGCDYVSNKGVDTVSVGNTLYYVNKQEGKSLYVKGEPIINFYDPLVFPSDEFDASISQVNEKINQSLAFIRKSDELLHNVNAGKSTTNIMITTIIIVIIVILLSLIAVGLLLYCKAR

SEQ ID NO: 9656 - protein, 553 aa, Artificial Sequence
  derived and/or modified protein sequence (wt) from HRSV__ACO83301.1__F-del
MELLILKANAITTILTAVTFCFASGQNITEEFYQSTCSAVSKGYLSALRTGWYTSVITIELSNIKKNKCNGTDAKIKLIKQELDKYKNAVTELQLLMQSTPATNNRARRELPRFMNYTLNNAKKTNVTLSKKRKRRFLGFLLGVGSAIASGVAVSKVLHLEGEVNKIKSALLSTNKAVVSLSNGVSVLTSKVLDLKNYIDKQLLPIVNKQSCSISNIETVIEFQQKNNRLLEITREFSVNAGVTTPVSTYMLTNSELLSLINDMPITNDQKKLMSNNVQIVRQQSYSIMSIIKEEVLAYVVQLPLYGVIDTPCWKLHTSPLCTTNTKEGSNICLTRTDRGWYCDNAGSVSFFPQAETCKVQSNRVFCDTMNSLTLPSEVNLCNVDIFNPKYDCKIMTSKTDVSSSVITSLGAIVSCYGKTKCTASNKNRGIIKTFSNGCDYVSNKGVDTVSVGNTLYYVNKQEGKSLYVKGEPIINFYDPLVFPSDEFDASISQVNEKINQSLAFIRKSDELLHNVNAVKSTTNIMITTIIIVIIVILLSLIAVGLLLYCKAR

SEQ ID NO: 9657 - protein, 553 aa, Artificial Sequence; identical to SEQ ID NO: 9152
  derived and/or modified protein sequence (wt) from HRSV__ADZ95775.1__F-del

SEQ ID NO: 9658 - protein, 553 aa, Artificial Sequence; identical to SEQ ID NO: 9150
  derived and/or modified protein sequence (wt) from HRSV__ADZ95779.1__F-del

SEQ ID NO: 9659 - protein, 553 aa, Artificial Sequence
  derived and/or modified protein sequence (wt) from HRSV__AEQ63597.1__F-del
MELLIHRSSAIFLTLAINALYLTSSQNITEEFYQSTCSAVSRGYLSALRTGWYTSVITIELSNIKETKCNGTDTKVKLIKQELDKYKNAVTELQLLMQNTPAVNNRARREAPQYMNYTINTTKNLNVSISKKRKRRFLGFLLGVGSAIASGIAVSKVLHLEGEVNKIKNALLSTNKAVVSLSNGVSVLTSKVLDLKNYINNQLLPIVNQQSCRISNIETVIEFQQKNSRLLEITREFSVNAGVTTPLSTYMLTNSELLSLINDMPITNDQKKLMSSNVQIVRQQSYSIMSIIKEEVLAYVVQLPIYGVIDTPCWKLHTSPLCTTNIKEGSNICLTRTDRGWYCDNAGSVSFFPQADTCKIQSNRVFCDTMNSLTLPSEVSLCNTDIFNSKYDCKIMTSKTDISSSVITSLGAIVSCYGKTKCTASNKNRGIIKTFSNGCDYVSNKGVDTVSVGNTLYYVNKLEGKNLYVKGEPIINYYDPLVFPSDEFDASISQVNEKINQSLAFIRRSDELLHNVNTGKSTTNIMITAIIIVIIVVLLSLIAIGLLLYCKAK

SEQ ID NO: 9660 - protein, 553 aa, Artificial Sequence
  derived and/or modified protein sequence (wt) from HRSV__AEQ63608.1__F-del
MELLIHRSSAIFLTLAINALYLTSSQNITEEFYQSTCSAVSRGYLSALRTGWYTSVITIELSNIKETKCNGTDTKVKLIKQELDKYKNAVTELQLLMQNTPTANNRARREAPQYMNYTINTTKNLNVSISKKRKRRFLGFLLGVGSAIASGIAVSKVLHLEGEVNKIKNALLSTNKAVVSLSNGVSVLTSKVLDLKNYINNQLLPIVNQQSCRISNIETVIEFQQKNSRLLEITREFSVNAGVTTPLSTYMLTNSELLSLINDMPITNDQKKLMSSNVQIVRQQSYSIMSIIKEEVLAYVVQLPIYGVIDTPCWKLHTSPLCTTNIKEGSNICLTRTDRGWYCDNAGSVSFFPQADTCKVQSNRVFCDTMNSLTLPSEVSLCNTDIFNSKYDCKIMTSKTDISSSVITSLGAIVSCYGKTKCTASNKNRGIIKTFSNGCDYVSNKGVDTVSVGNTLYYVNKLEGKNLYVKGEPIINYYDPLVFPSDEFDASISQVNEKINQSLAFIRRSDELLHNVNTGKSTTNIMITAIIIVIIVVLLSLIAIGLLLYCKAK

SEQ ID NO: 9661 - protein, 553 aa, Artificial Sequence
  derived and/or modified protein sequence (wt) from HRSV__AEQ63630.1__F-del
MELLIHRSSAIFLTLAINALYLTSSQNITEEFYQSTCSAVSRGYLSALRTGWYTSVITIELSNIKETKCNGTDTKVKLIKQELDKYKNAVTELQLLMQNTPAVNNRARREAPQYMNYTINTTKNLNVSISKKRKRRFLGFLLGVGSAIASGIAVSKVLHLEGEVNKIKNALLSTNKAVVSLSNGVSVLTSKVLDLKNYINNQLLPIVNQQSCRISNIETVIEFQQKNSRLLEITREFSVNARVTTPLSTYMLTNSELLSLINDMPITNDQKKLMSSNVQIVRQQSYSIMSIIKEEVLAYVVQLPIYGVIDTPCWKLHTSPLCTTNIKEGSNICLTRTDRGWYCDNAGSVSFFPQADTCKVQSNRVFCDTMNSLTLPSEVSLCNTDIFNSKYDCKIMTSKTDISSSVITSLGAIVSCYGKTKCTASNKNRGIIKTFSNGCDYVSNKGVDTVSVGNTLYYVNKLEGKNLYVKGEPIINYYDPLVFPSDEFDASISQVNEKINQSLAFIRRSDELLHNVNTGKSTTNIMITAIIIVIIVVLLSLIAIGLLLYCKAK

SEQ ID NO: 9662 - protein, 553 aa, Artificial Sequence
  derived and/or modified protein sequence (wt) from HRSV__AHE57683.1__F-del
MDLPILKTNAITAILAAVLLCFASSQNITEEFYQSTCSAVSKGYLSALRTGWYTSVITIELSNIKENKCNGTDAKVKLIKQELDKYKNAVTELQLLMQSTPAANNRARRELPRFMNYTLNNTKNNNVTLSKKRKRRFLGFLLGVGSAIASGIAVSKVLHLEGEVNKIKSALLSTNKAVVSLSNGVSVLTSKVLDLKNYIDKQLLPIVNKQSCSISNIETVIEFQQKNNRLLEITREFSVNAGVTTPVSTYMLTNSELLSLINDMPITNDQKKLMSNNVQIVRQQSYSIMSIIKEEVLAYVVQLPLYGVIDTPCWKLHTSPLCTTNTKEGSNICLTRTDRGWYCDNAGSVSFFPQAETCKVQSNRVFCDTMNSLTLPSEVNLCNIDIFNPKYDCKIMTSKTDVSSSVITSLGAIVSCYGKTKCTASNKNRGIIKTFSNGCDYVSNKGVDTVSVGNTLYYVNKQEGKSLYVKGEPIINFYDPLVFPSDEFDASISQVNEKINQSLAFIRKSDELLHNVNVGKSTTNIMITTIIIVIIVILLLLIAVGLFLYCKAR

SEQ ID NO: 9663 - protein, 553 aa, Artificial Sequence
  derived and/or modified protein sequence (wt) from HRSV__AHE57894.1__F-del
MDLPILKTNAITAILAAVLLCFASSQNITEEFYQSTCSAVSKGYLSALRTGWYTSVITIELSNIKENKCNGTDAKVKLIKQELDKYKNAVTELQLLMQSTPAANNRARRELPRFMNYTLNNTKNNNVTLSKKRKRRFLGFLLGVGSAIASGIAVSKVLHLEGEVNKIKSALLSTNKAVVSLSNGVSVLTSKVLDLKNYIDKQLLPIVNKQSCSISNIETVIEFQQKNNRLLEITREFSVNAGVTTPVSTYMLTNSELLSLINDMPITIDQKKLMSNNVQIVRQQSYSIMSIIKEEVLAYVVQLPLYGVIDTPCWKLHTSPLCTTNTKEGSNICLTRTDRGWYCDNAGSVSFFPQAETCKVQSNRVFCDTMNSLTLPSEVNLCNIDIFNPKYDCKIMTSKTDVSSSVITSLGAIVSCYGKTKCTASNKNRGIIKTFSNGCDYVSNKGVDTVSVGNTLYYVNKQEGKSLYVKGEPIINFYDPLVFPSDEFDASISQVNEKINQSLAFIRKSDELLHNVNVGKSTTNIMITTIIIVIIVILLLLIAVGLFLYCKAR

SEQ ID NO: 9664 - protein, 553 aa, Artificial Sequence
  derived and/or modified protein sequence (wt) from HRSV__AHW80511.1__F-del
MELPILKTNAITTILAAVTLCFASSQNITEEFYQSTCSAVSKGYLSALRTGWYTSVITIELSTIKENKCNGTDAKVKLIKQELDKYKNAVTELQLLMQSTPAANNRARRELPRFMNYTLNNAKNTNVTLSKKRKRRFLGFLLGVGSAIASGIAVSKVLHLEGEVNKIKSALLSTNKAVVSLSNGVSVLTSKVLDLKNYIDKQLLPIVNKQSCSISNIETVIEFQQKNNRLLEITREFSVNAGVTTPVSTYMLTNSELLSLINDMPITNDQKKLMSNNVQIVRQQSYSIMSIIKEEVLAYVVQLPLYGVIDTPCWKLHTSPLCTTNTKEGSNICLTRTDRGWYCDNAGSVSFFPQAETCKVQSNRVFCDTMNSLTLPSEVNLCNIDIFNPKYDCKIMTSKTDVSSSVITSLGAIVSCYGKTKCTASNKNRGIIKTFSNGCDYVSNKGVDTVSVGNTLYYVNKQEGKSLYVKGEPIINFYDPLVFPSDEFDASISQVNEKINQSLAFIRKSDELLHNVNAGKSTTKIMITTIIIVIIVILLSLIAVGLLLYCKAR

SEQ ID NO: 9665 - protein, 553 aa, Artificial Sequence
  derived and/or modified protein sequence (wt) from HRSV__AHW80560.1__F-del
MELPILKTNAITTILAAVTLCFASSQNITEEFYQSTCSAVSKGYLSALRTGWYTSVITIELSNIKENKCNGTDAKVKLIKQELDKYKNAVTELQLLMQSTPASNNRARRELPRFMNYTLNNTKNNNVTLSKKRKRRFLGFLLGVGSAIASGIAVSKVLHLEGEVNKIKSALLSTNKAVVSLSNGVSVLTSKVLDLKNYIDKQLLPIVNKQSCSISNIETVIEFQQKNNRLLEITREFSVNAGVTTPVSTYMLTNSELLSLINDMPITNDQKKLMSNNVQIVRQQSYSIMSIIKEEVLAYVVQLPLYGVIDTPCWKLHTSPLCTTNTKEGSNICLTRTDRGWYCDNAGSVSFFPQAETCKVQSNRVFCDTMNSLTLPSEVNLCNIDIFNPKYDCKIMTSKTDVSSSVITSLGAIVSCYGKTKCTASNKNRGIIKTFSNGCDYVSNKGVDTVSVGNTLYYVNKQEGKSLYVKGEPIINFYDPLVFPSDEFDASISQVNEKINQSLAFIRKSDELLHNVNVGKSTTNIMITTIIIVIIVILLLLIAVGLFLYCKAR

SEQ ID NO: 9666 - protein, 553 aa, Artificial Sequence
  derived and/or modified protein sequence (wt) from HRSV__AHW80660.1__F-del
MDLPILKTNAITAILAAVSLCLASSQNITEEFYQSTCSAVSKGYLSALRTGWYTSVITIELSNIKENKCNGTDAKVKLIKQELDKYKNAVTELQLLMQSTPAANNRARRELPRFMNYTLNNTKNNNVTLSKKRKRRFLGFLLGVGSAIASGIAVSKVLHLEGEVNKIKSALLSTNKAVVSLSNGVSVLTSKVLDLKNYIDKQLLPIVNKQSCSISNIETVIEFQQKNNRLLEITREFSVNAGVTTPVSTYMLTNSELLSLINDMPITNDQKKLMSNNVQIVRQQSYSIMSIIKEEVLAYVVQLPLYGVIDTPCWKLHTSPLCTTNTKEGSNICLTRTDRGWYCDNAGSVSFFPQAETCKVQSNRVFCDTMNSLTLPSEVNLCNIDIFNPKYDCKIMTSKTDVSSSVITSLGAIVSCYGKTKCTASNKNRGIIKTFSNGCDYVSNKGVDTVSVGNTLYYVNKQEGKSLYVKGEPIINFYDPLVFPSDEFDASISQVNEKINQSLAFIRKSDELLHNVNVGKSTTNIMITTIIIVIIVILLLLIAVGLFLYCKAR

SEQ ID NO: 9667 - protein, 553 aa, Artificial Sequence; identical to SEQ ID NO: 9665
  derived and/or modified protein sequence (wt) from HRSV__AHW80670.1__F-del

SEQ ID NO: 9668 - protein, 553 aa, Artificial Sequence
  derived and/or modified protein sequence (wt) from HRSV__AHW80760.1__F-del
MELPILKTNAITTILAAVTLCFASSQNITEEFYQSTCSAVSKGYLSALRTGWYTSVITIELSNIKENKCNGTDAKVKLIKQELDKYKNAVTELQLLMQSTPASNNRARRELPRFMNYTLNNTKNNNVTLSKKRKRRFLGFLLGVGSAIASGIAVSKVLHLEGEVNKIKSALLSTNKAVVSLSNGVSVLTSKVLDLKNYIDKQLLPIVNKQSCSISNIETVIEFQQKNNRLLEITREFSVNAGVTTPVSTYMLTNSELLSLINDMPITNDQKKLMSNNVQIVRQQSYSIMSIIKEEVLAYVVQLPLYGVIDTPCWKLHTSPLCTTNTKEGSNICITRTDRGWYCDNAGSVSFFPQAETCKVQSNRVFCDTMNSLTLPSEVNLCNIDIFNPKYDCKIMTSKTDVSSSVITSLGAIVSCYGKTKCTASNKNRGIIKTFSNGCDYVSNKGVDTVSVGNTLYYVNKQEGKSLYVKGEPIINFYDPLVFPSDEFDASISQVNEKINQSLAFIRKSDELLHNVNVGKSTTNIMITTIIIVIIVILLLLIAVGLFLYCKAR

SEQ ID NO: 9669 - protein, 553 aa, Artificial Sequence
  derived and/or modified protein sequence (wt) from HRSV__AHW80800.1__F-del
MDLPILKTNAITTILAAVTLCIASSQNITEEFYQSTCSAVSKGYLSALRTGWYTSVITIELSNIKENKCNGTDAKVKLIKQELDKYKNAVTELQLLMQSTPAANNRARRELPRFMNYTLNNTKNNNVTLSKKRKRRFLGFLLGVGSAIASGIAVSKVLHLEGEVNKIKSALLSTNKAVVSLSNGVSVLTSKVLDLKNYIDKQLLPIVNKQSCSISNIETVIEFQQKNNRLLEITREFSVNAGVTTPVSTYMLTNSELLSLINDMPITNDQKKLMSNNVQIVRQQSYSIMSIIKEEVLAYVVQLPLYGVIDTPCWKLHTSPLCTTNTKEGSNICLTRTDRGWYCDNAGSVSFFPQAETCKVQSNRVFCDTMNSLTLPSEVNLCNIDIFNPKYDCKIMTSKTDVSSSVITSLGAIVSCYGKTKCTASNKNRGIIKTFSNGCDYVSNKGVDTVSVGNTLYYVNKQEGKSLYVKGEPIINFYDPLVFPSDEFDASISQVNEKINQSLAFIRKSDELLHNVNVGKSTTNIMITTIIIVIIVILLLLIAVGLFLYCKAR

SEQ ID NO: 9670 - protein, 553 aa, Artificial Sequence
  derived and/or modified protein sequence (wt) from HRSV__AHW80860.1__F-del
MELPILKTNAITTILAAVTLCFASSQNITEEFYQSTCSAVSKGYLSALRTGWYTSVITIELSNIKENKCNGTDAKVKLIKQELDKYKNAVTELQLLMQSTPAANNRARRELPRLMNYTLNNTKNNNVTLSKKRKRRFLGFLLGVGSAIASGIAVSKVLHLEGEVNKIKSALLSTNKAVVSLSNGVSVLTSKVLDLKNYIDKQLLPIVNKQSCSISNIETVIEFQQKNNRLLEITREFSVNAGVTTPVSTYMLTNSELLSLINDMPITNDQKKLMSNNVQIVRQQSYSIMSIIKEEVLAYVVQLPLYGVIDTPCWKLHTSPLCTTNTKEGSNICLTRTDRGWYCDNAGSVSFFPQAETCKVQSNRVFCDTMNSLTLPSEVNLCNIDIFNPKYDCKIMTSKTDVSSSVITSLGAIVSCYGKTKCTASNKNRGIIKTFSNGCDYVSNKGVDTVSVGNTLYYVNKQEGKSLYVKGEPIINFYDPLVFPSDEFDASISQVNEKINQSLAFIRKSDELLHNVNVGKSTTNIMITTIIIVIIVILLLLIAVGLFLYCKAR

SEQ ID NO: 9671 - protein, 553 aa, Artificial Sequence
  derived and/or modified protein sequence (wt) from HRSV__AHW80990.1__F-del
MELPILKTNAITTILAAVTLCFASSQNITEEFYQSTCSAVSKGYLSALRTGWYTSVITIELSNIKENKCNGTDAKVKLIKQELDKYKNAVTELQLLMQSTPAANNRARRELPRFMNYTLNNTKNTNVTLSKKRKRRFLGFLLGVGSAIASGIAVSKVLHLEGEVNKLKSALLSTNKAVVSLSNGVSVLTSKVLDLKNYIDKQLLPIVNKQSCSISNIETVIEFQQKNNRLLEITREFSVNAGVTTPVSTYMLTNSELLSLINDMPITNDQKKLMSNNVQIVRQQSYSIMSIIKEEVLAYVVQLPLYGVIDTPCWKLHTSPLCTTNTKEGSNICLTRTDRGWYCDNAGSVSFFPQAETCKVQSNRVFCDTMNSLTLPSEVNLCNIDIFNPKYDCKIMTSKTDVSSSVITSLGAIVSCYGKTKCTASNKNRGIIKTFSNGCDYVSNKGVDTVSVGNTLYYVNKQEGKSLYVKGEPIINFYDPLVFPSDEFDASISQVNEKINQSLAFIRKSDELLHNVNVGKSTTNIMITTIIIVIIVILLLLIAVGLFLYCKAR

SEQ ID NO: 9672 - protein, 553 aa, Artificial Sequence
  derived and/or modified protein sequence (wt) from HRSV__AHW81370.1__F-del
MELPILKTNAITTILAAVALCFASSQNITEEFYQSTCSAVSKGYLSALRTGWYTSVITIELSNIKENKCNGTDAKVKLIKQELDKYKNAVTELQLLMQSTPASNNRARRELPRFMNYTLNNTKNNNVTLSKKRKRRFLGFLLGVGSAIASGIAVSKVLHLEGEVNKIKSALLSTNKAVVSLSNGVSVLTSKVLDLKNYIDKQLLPIVNKQSCSISNIETVIEFQQKNNRLLEITREFSVNAGVTTPVSTYMLTNSELLSLINDMPITNDQKKLMSNNVQIVRQQSYSIMSIIKEEVLAYVVQLPLYGVIDTPCWKLHTSPLCTTNTKEGSNICLTRTDRGWYCDNAGSVSFFPQAETCKVQSNRVFCDTMNSLTLPSEVNLCNIDIFNPKYDCKIMTSKTDVSSSVITSLGAIVSCYGKTKCTASNKNRGIIKTFSNGCDYVSNKGVDTVSVGNTLYYVNKQEGKSLYVKGEPIINFYDPLVFPSDEFDASISQVNEKINQSLAFIRKSDELLHNVNVGKSTTNIMITTIIIVIIVILLLLIAVGLFLYCKAR

SEQ ID NO: 9673 - protein, 553 aa, Artificial Sequence
  derived and/or modified protein sequence (wt) from HRSV__AHX22013.1__F-del
MELPILKTNAITTILAAVTLCFASSQNITEEFYQSTCSAVSKGYLSALRTGWYTSVITIELSNIKENKCNGTDAKVKLIKQELDKYKNAVTELQLLMQSTPAANNRARRELPRFMNYTLNNTKNNNVTLSKKRKRRFIGFLLGVGSAIASGIAVSKVLHLEGEVNKIKNALLSTNKAVVSLSNGVSVLTSKVLDLKNYIDKQLLPIVNKQSCSISNIETVIEFQQKNNRLLEITREFSVNAGVTTPVSTYMLTNSELLSLINDMPITNDQKKLMSNNVQIVRQQSYSIMSIIKEEVLAYVVQLPLYGVIDTPCWKLHTSPLCTTNTKEGSNICLTRTDRGWYCDNAGSVSFFPQAETCKVQSNRVFCDTMNSLTLPSEVNLCNIDIFNPKYDCKIMTSKTDVSSSVITSLGAIVSCYGKTKCTASNKNRGIIKTFSNGCDYVSNKGVDTVSVGNTLYYVNKQEGKSLYVKGEPIINFYDPLVFPSDEFDASISQVNEKINQSLAFIRKSDELLHNVNVGKSTTNIMITTIIIVIIVILLLLIAVGLFLYCKAR

SEQ ID NO: 9674 - protein, 553 aa, Artificial Sequence
  derived and/or modified protein sequence (wt) from HRSV__AIA62675.1__F-del
MELPILKANAITTILAAVTLCFASSQNITEEFYQSTCSAVSKGYLSALRTGWYTSVITIELSNIKENKCNGTDAKVKLIKQELDKYKNAVTELQLLMQSTPAANNRARRELPRFMNYTLNNTKNNNVTLSKKRKRRFLGFFLGVGSAIASGIAVSKVLHLEGEVNKIKNALLSTNKAVVSLSNGVSVLTSKVLDLKNYIDKQLLPIVNKQSCSISNIETVIEFQQKNNRLLEITREFSVNAGVTTPVSTYMLTNSELLSLINDMPITNDQKKLMSNNVQIVRQQSYSIMSIIKEEVLAYVVQLPLYGVIDTPCWKLHTSPLCTTNTKEGSNICLTRTDRGWYCDNAGSVSFFPQAETCKVQSNRVFCDTMNSLTLPSEVNLCNIDIFNPKYDCKIMTSKTDVSSSVITSLGAIVSCYGKTKCTASNKNRGIIKTFSNGCDYVSNKGVDTVSVGNTLYYVNKQEGKSLYVKGEPIINFYDPLVFPSDEFDASISQVNEKINQSLAFIRKSDELLHNVNVGKSTTNIMITTIIIVIIVILLLLIAVGLFLYCKAR

SEQ ID NO: 9675 - protein, 553 aa, Artificial Sequence
  derived and/or modified protein sequence (wt) from HRSV__AIA62685.1__F-del
MELPILKTNAITTILAAVTLCFASSQNITEEFYQSTCSAVSKGYLSALRTGWYTSVITIELSNIKENKCNGTDAKVKLIKQELDKYKNAVTELQLLMQSTPAANNRARRELPRFMNYTLNNTKNNNVTLSKKRKRRFLGFFLGVGSAIASGIAVSKVLHLEGEVNKIKNALLSTNKAVVSLSNGVSVLTSKVLDLKNYIDKQLLPIVNKQSCSISNIETVIEFQQKNNRLLEITREFSVNAGVTTPVSTYMLTNSELLSLINDMPITNDQKKLMSNNVQIVRQQSYSIMSIIKEEVLAYVVQLPLYGVIDTPCWKLHTSPLCTTNTKEGSNICLTRTDRGWYCDNAGSVSFFPQAETCKVQSNRVFCDTMNSLTLPSEVNLCNIDIFNPKYDCKIMTSKTDVSSSVITSLGAIVSCYGKTKCTASNKNRGIIKTFSNGCDYVSNKGVDTVSVGNTLYYVNKQEGKSLYVKGEPIINFYDPLVFPSDEFDASISQVNEKINQSLAFIRKSDELLHNVNVGKSTTNIMITTIIIVIIVILLLLIAVGLFLYCKAR

SEQ ID NO: 9676 - protein, 553 aa, Artificial Sequence
  derived and/or modified protein sequence (wt) from HRSV__AIA63044.1__F-del
MELPILKTNAITTILAAVTLCFASSQNITEEFYQSTCSAVSKGYLSALRTGWYTSVITIELSNIKENKCNGTDAKVKLIKQELDKYKNAVTELQLLMQSTPAANNRARRELPRFMNYTLNNTKNNNVTLSKKRKRRFLGFLLGVGSAIASGIAVSKVLHLEGEVNKIKNALLSTNKAVVSLSNGVSVLTSKVLDLKNYIDKQLLPIVNKQSCSISNIETVIEFQQKNNRLLEITREFSVNAGVTTPVSTYMLTNSELLSLINDMPITNDQKKLMSNNVQIVRQQSYSIMSIIKEEVLAYVVQLPLYGVIDTPCWKLHTSPLCTTNTKEGSNICLTRTDRGWYCDNAGSVSFFPQAETCKVQSNRVFCDTMNSLTLPSEVNLCNIDIFNPKYDCKIMTSKTDVSSSVITSLGAIVSCYGKTKCTASNKNRGIIKTFSNGCDYVSNKGVDTVSVGNTLYYVNKQEGKSPYVKGEPIINFYDPLVFPSDEFDASISQVNEKINQSLAFIRKSDELLHNVNVGKSTTNIMITTIIIVIIVILLLLIAVGLFLYCKAR

SEQ ID NO: 9677 - protein, 553 aa, Artificial Sequence
  derived and/or modified protein sequence (wt) from HRSV__AIA63234.1__F-del
MELPILKTNAITTILAAVTLCFASSQNITEEFYQSTCSAVSKGYLSALRTGWYTSVITIELSNIKENKCNGTDAKVKLIKQELDKYKNAVTELQLLMQSTPAANNRARRELPRFMNYTLNNTKNNNVTLSKKRKRRFLGFLLGVGSAIASGIAVSKVLHLEGEVNKIKNALLSTNKAVVSLSNGVSVLTSKVLDLKNYIDKQLLPIVNKQSCSISNIETVIEFQQKNNRLLEITREFSVNAGVTTPVSTYMLTNSELLSLINDMPITNDQKKLMSNNVQIVRQQSYSIMSIIKEEVLAYVVQLPLYGVIDTPCWKLHTSPLCTTNTKEGSNICLTRTDRGWYCDNAGSVSFFPQAETCKVQSNRVFCDTMNSLTLPSEVNLCNIDIFNPKYDCKIMTSKTDVSSSVITSLGAIVSCYGKTKCTASNKNRGIIKTFFNGCDYVSNKGVDTVSVGNTLYYVNKQEGKSLYVKGEPIINFYDPLVFPSDEFDASISQVNEKINQSLAFIRKSDELLHNVNVGKSTTNIMITTIIIVIIVILLLLIAVGLFLYCKAR

SEQ ID NO: 9678 - protein, 553 aa, Artificial Sequence
  derived and/or modified protein sequence (wt) from HRSV__AIA63364.1__F-del
MELPILKTNAITTILAAVTLCFASSQNITEEFYQSTCSAVSKGYLSALRTGWYTSVITIELSNIKENKCNGTDAKVKLIKQELDKYKNAVTELQLLMQSTPAANNRARRELPRFMNYTLNNTKNNNVTLSKKRKRRFLGFLLGVGSAIASGIAVSKVLHLEGEVNKIKNALLSTNKAVVSLSNGVSVLTSKVLDLKNYIDKQLLPIVNKQSCSISNIETVIEFQQKNNRLLEITREFSVNAGVTTPVSTYMLTNSELLSLINDMPITNDQKKLMSNNVQIVRQQSYSIMSIIKEEVLAYVVQLPLYGVIDTPCWKLHTSPLCTTNTKEGSNICLTRTDRGWYCDNAGSVSFFPQAETCKVQSNRVFCDTMNSLTLPSEVNLCNIDIFNPKYDCKIMTSITDVSSSVITSLGAIVSCYGKTKCTASNKNRGIIKTFSNGCDYVSNKGVDTVSVGNTLYYVNKQEGKSLYVKGEPIINFYDPLVFPSDEFDASISQVNEKINQSLAFIRKSDELLHNVNVGKSTTNIMITTIIIVIIVILLLLIAVGLFLYCKAR

SEQ ID NO: 9679 - protein, 553 aa, Artificial Sequence; identical to SEQ ID NO: 9653
  derived and/or modified protein sequence (wt) from HRSV__AIA63604.1__F-del

SEQ ID NO: 9680 - protein, 553 aa, Artificial Sequence
  derived and/or modified protein sequence (wt) from HRSV__AUH26189.1__F-del
MDLPILKTNAITAILAAVLLCFASSQNITEEFYQSTCSAVSKGYLSALRTGWYTSVITIELSNIKENKCNGTDAKVKLIKQELDKYKNAVTELQLLMQSTPAANNRARRELPRFMNYTLNNTKNNNVTLSKKRKRRFLGFLLGVGSAIASGIAVSKVLHLEGEVNKIKSALLSTNKAVVSLSNGVSVLTSKVLDLKNYIDKRLLPIVNKQSCSISNIETVIEFQQKNNRLLEITREFSVNAGVTTPVSTYMLTNSELLSLINDMPITNDQKKLMSNNVQIVRQQSYSIMSIIKEEVLAYVVQLPLYGVIDTPCWKLHTSPLCTTNTKEGSNICLTRTDRGWYCDNAGSVSFFPQAETCKVQSNRVFCDTMNSLTLPSEVNLCNIDIFNPKYDCKIMTSKTDVSSSVITSLGAIVSCYGKTKCTASNKNRGIIKTFSNGCDYVSNKGVDTVSVGNTLYYVNKQEGKSLYVKGEPIINFYDPLVFPSDEFDASISQVNEKINQSLAFIRKSDELLHNVNVGKSTTNIMITTIIIVIIVILLLLIAVGLFLYCKAR

SEQ ID NO: 9681 - protein, 553 aa, Artificial Sequence
  derived and/or modified protein sequence (wt) from HRSV__NP_044596.1__F-del
MELPILKTNAITAILAAVTLCFASSQNITEEFYQTTCSAVSKGYLSALRTGWYTSVITIELSNIKENKCNGTDAKVKLIKQELDKYKSAVTELQLLMQSTPATNNRARRELPRFMNYTLNNTKNTNVTLSKKRKRRFLGFLLGVGSAIASGIAVSKVLHLEGEVNKIKSALLSTNKAVVSLSNGVSVLTSKVLDLKNYIDKQLLPIVNKQSCSISNIETVIEFQQKNNRLLEITREFSVNAGVTTPVSTYMLTNSELLSLINDMPITNDQKKLMSNNVQIVRQQSYSIMSIIKEEVLAYVVQLPLYGVIDTPCWKLHTSPLCTTNTKEGSNICLTRTDRGWYCDNAGSVSFFPLAETCKVQSNRVFCDTMNSLTLPSEVNLCNIDIFNPKYDCKIMTSKTDVSSSVITSLGAIVSCYGKTKCTASNKNRGIIKTFSNGCDYVSNKGVDTVSVGNTLYYVNKQEGKSLYVKGEPIINFYDPLVFPSDEFDASISQVNEKINQSLAFIRKSDELLHNVNAGKSTINIMITTIIIVIIVILLSLIAVGLLLYCKAR

SEQ ID NO: 9682 - protein, 553 aa, Artificial Sequence
  derived and/or modified protein sequence (wt) from HRSV__1701388A__F-del
MELPILKTNTITTILAAVTLCFASSQNITEEFYQSTCSAVSKGYLSALRTGWYTSVITIELSNIKENKCNGTDAKVKLIKQELDKYKNAVTELQLLMQSTPAANNRARRELPRFMNYTLNNTKNTNVTLSKKRKRRFLGFLLGVGSAIASGIAVSKVLHLEGEVNKIKSALLSTNKAVVSLSNGVSVLTSKVLDLKNYIDKQLLPIVNKQSCSISNIETVIEFQQKNNRLLEITREFSVNAGVTTPVSTYMLTNSELLSLINDMPITNDQKKLMSNNVQIVRQQSYSIMSIIKEEVLAYVVQLPLYGVIDTPCWKLHTSPLCTTNTKEGSNICLTRTDRGWYCDNAGSVSFFPQAETCKVQSNRVFCDTMNSLTLPSEVNLCNIDIFNPKYDCKIMTSKTDVSSSVITSLGAIVSCYGKTKCTASNKNRGIIKTFSNGCDYVSNKGVDTVSVGNTLYYVNKQEGKSLYVKGEPIINFYDPLVFPSDEFDASISQVNEKINQSLAFIRKSDELLHNVNAVKSTTNIMITTIIIVIIVILLSLIAVGLLLYCKAR

SEQ ID NO: 9683 - protein, 553 aa, Artificial Sequence
  derived and/or modified protein sequence (wt) from HRSV__WP_079890144.1__F-del
MELLILKANAITTILTAVTFCFASGQNITEEFYQSTCSAVSKGYLSALRTGWYTSVITIELSNIKKIKCNGTDAKVKLIKQELDKYKNAVTELQLLMQSTPATNNRARRELPRFMNYTLNNAKKTNVTLSKKRKRRFLGFLLGVGSAIASGVAVSKVLHLEGEVNKIKSALLSTNKAVVSLSNGVSVLTSKVLDLKNYIDKQLLPIVNKQSCSISNIETVIEFQQKNNRLLEITREFSVNVGVTTPVSTYMLTNSELLSLINDMPITNDQKKLMSNNVQIVRQQSYSIMSIIKEEVLAYVVQLPLYGVIDTPCWKLHTSPLCTTNTKEGSNICLTRTDRGWYCDNAGSVSFFPQAETCKVQSNRVFCDTMNSLTLPSEVNLCNVDIFNPKYDCKIMTSKTDVSSSVITSLGAIVSCYGKTKCTASNKNRGIIKTFSNGCDYVSNKGVDTVSVGNTLYYVNKQEGKSLYVKGEPIINFYDPLVFPSDEFDASISQVNEKINQSLAFIRKSDELLHNVNAGKSTTNIMITTIIIVIIVILLSLIAVGLLLYCKAR

SEQ ID NO: 9684 - protein, 256 aa, Artificial Sequence
  derived and/or modified protein sequence (wt) from HRSV(A2)__P0DOE7.1__M
METYVNKLHEGSTYTAAVQYNVLEKDDDPASLTIWVPMFQSSMPADLLIKELANVNILVKQISTPKGPSLRVMINSRSAVLAQMPSKFTICANVSLDERSKLAYDVTTPCEIKACSLTCLKSKNMLTTVKDLTMKTLNPTHDIIALCEFENIVTSKKVIIPTYLRSISVRNKDLNTLENITTTEFKNAITNAKIIPYSGLLLVITVTDNKGAFKYIKPQSQFIVDLGAYLEKESIYYVTTNWKHTATRFAIKPMED

SEQ ID NO: 9685 - RNA, 771 nt, Artificial Sequence
  derived and/or modified CDS sequence (wt) from HRSV(A2)__P0DOE7.1__M
auggaaacauacgugaacaagcuucacgaaggcuccacauacacagcugcuguucaauacaaugucuuagaaaaagacgaugacccugcaucacuuacaauaugggugcccauguuccaaucaucuaugccagcagauuuacuuauaaaagaacuagcuaaugucaacauacuagugaaacaaauauccacacccaagggaccuucacuaagagucaugauaaacucaagaagugcagugcuagcacaaaugcccagcaaauuuaccauaugcgcuaauguguccuuggaugaaagaagcaaacuagcauaugauguaaccacacccugugaaaucaaggcauguagucuaacaugccuaaaaucaaaaaauauguugacuacaguuaaagaucucacuaugaagacacucaacccuacacaugauauuauugcuuuaugugaauuugaaaacauaguaacaucaaaaaaagucauaauaccaacauaccuaagauccaucagugucagaaauaaagaucugaacacacuugaaaauauaacaaccacugaauucaaaaaugcuaucacaaaugcaaaaaucaucccuuacucaggauuacuauuagucaucacagugacugacaacaaaggagcauucaaauacauaaagccacaaagucaauucauaguagaucuuggagcuuaccuagaaaaagaaaguauauauuauguuaccacaaauuggaagcacacagcuacacgauuugcaaucaaacccauggaagauuaa

SEQ ID NO: 9686 - RNA, 771 nt, Artificial Sequence
  derived and/or modified CDS sequence (opt1) from HRSV(A2)__P0DOE7.1__M
auggagaccuacgugaacaagcugcacgagggcagcaccuacacggccgccguccaguacaacgugcucgagaaggacgacgaccccgcgucccugaccaucugggugccgauguuccagagcuccaugcccgccgaccugcucaucaaggagcuggccaacgucaacauccuggugaagcagaucagcacccccaaggggcccucccuccgcgugaugaucaacagccgguccgccguccuggcccagaugccgagcaaguucaccaucugcgcgaacgugucccuggacgagcgcagcaagcucgccuacgacgugacgacccccugcgagaucaaggccugcucccugaccugccucaagagcaagaacaugcugaccacggucaaggaccugaccaugaagacccugaaccccacccacgacaucaucgcccucugcgaguucgagaacaucgugacguccaagaaggugaucauccccaccuaccugcggagcaucuccguccgcaacaaggaccugaacacccucgagaacaucaccacgaccgaguucaagaacgcgaucaccaacgccaagaucaucccguacagcggccugcugcucgugaucaccgugacggacaacaagggggccuucaaguacaucaagccccagucccaguucaucgucgaccugggcgccuaccuggagaaggagagcaucuacuacgugaccaccaacuggaagcacaccgccacgcgguucgcgaucaagcccauggaggacuga

SEQ ID NO: 9687 - RNA, 771 nt, Artificial Sequence
  derived and/or modified CDS sequence (opt2) from HRSV(A2)__P0DOE7.1__M
auggagaccuacgucaacaagcuccacgagggcuccaccuacaccgccgccguccaguacaacguccucgagaaggacgacgaccccgccucccucaccaucuggguccccauguuccaguccuccaugcccgccgaccuccucaucaaggagcucgccaacgucaacauccucgucaagcagaucuccacccccaagggccccucccuccgcgucaugaucaacucccgcuccgccguccucgcccagaugcccuccaaguucaccaucugcgccaacgucucccucgacgagcgcuccaagcucgccuacgacgucaccacccccugcgagaucaaggccugcucccucaccugccucaaguccaagaacaugcucaccaccgucaaggaccucaccaugaagacccucaaccccacccacgacaucaucgcccucugcgaguucgagaacaucgucaccuccaagaaggucaucauccccaccuaccuccgcuccaucuccguccgcaacaaggaccucaacacccucgagaacaucaccaccaccgaguucaagaacgccaucaccaacgccaagaucauccccuacuccggccuccuccucgucaucaccgucaccgacaacaagggcgccuucaaguacaucaagccccagucccaguucaucgucgaccucggcgccuaccucgagaaggaguccaucuacuacgucaccaccaacuggaagcacaccgccacccgcuucgccaucaagcccauggaggacuga

SEQ ID NO: 9688 - RNA, 771 nt, Artificial Sequence
  derived and/or modified CDS sequence (opt3) from HRSV(A2)__P0DOE7.1__M
auggagaccuacgugaacaagcugcacgaaggcagcacauauacugccgcuguccaguacaauguucucgagaaagacgaugaccccgcaucccuuacgaucugggugccuauguuccaaucuucaaugccagccgaucuguugauuaaggaauuagcgaacguaaauauacuggugaaacagaucaguaccccgaaggggcccagccuaagagucaugauuaacuccaggucugcugugcucgcccagaugccuucgaaauuuacaaucugcgcaaauguuucacuggacgagcggagcaaacuugccuaugaugugacuaccccaugugaaauuaaggcuugcagucugacauguuugaaguccaagaacaugcucaccacugucaaagaccugacaaugaagacccugaaucccacgcaugauaucauagcacucugcgaguucgagaacaucgugacuucuaaaaagguaauuaucccuaccuacuuacgcagcauuuccguucgaaauaaggaccugaacacacuugaaaauaucacuaccacagaguuuaaaaacgccauaaccaaugcuaagauuaucccauauucaggauugcugcuagugauuacggucacugauaacaaaggugccuucaaguacaucaaaccccagagucaauuuaucguggaccucggcgcguaucuggaaaaggagagcauuuacuacgugacaaccaauuggaaacacacugcaacacguuucgccauaaagccuauggaggauuga

SEQ ID NO: 9689 - RNA, 771 nt, Artificial Sequence
  derived and/or modified CDS sequence (opt4) from HRSV(A2)__P0DOE7.1__M
auggagaccuacgugaacaagcugcacgagggcagcaccuacaccgccgccgugcaguacaacgugcuggagaaggacgacgaccccgccagccugaccaucugggugcccauguuccagagcagcaugcccgccgaccugcugaucaaggagcuggccaacgugaacauccuggugaagcagaucagcacccccaagggccccagccugagagugaugaucaacagcagaagcgccgugcuggcccagaugcccagcaaguucaccaucugcgccaacgugagccuggacgagagaagcaagcuggccuacgacgugaccacccccugcgagaucaaggccugcagccugaccugccugaagagcaagaacaugcugaccaccgugaaggaccugaccaugaagacccugaaccccacccacgacaucaucgcccugugcgaguucgagaacaucgugaccagcaagaaggugaucauccccaccuaccugagaagcaucagcgugagaaacaaggaccugaacacccuggagaacaucaccaccaccgaguucaagaacgccaucaccaacgccaagaucauccccuacagcggccugcugcuggugaucaccgugaccgacaacaagggcgccuucaaguacaucaagccccagagccaguucaucguggaccugggcgccuaccuggagaaggagagcaucuacuacgugaccaccaacuggaagcacaccgccaccagauucgccaucaagcccauggaggacuga

SEQ ID NO: 9690 - RNA, 771 nt, Artificial Sequence
  derived and/or modified CDS sequence (opt5) from HRSV(A2)__P0DOE7.1__M
auggagaccuacgugaacaagcugcacgaaggcagcacauauacggccgcuguccaguacaauguucucgagaaagacgaugaccccgccucccugaccaucugggugccuauguuccaaucuagcaugccggcggaucuucugauuaaggaacucgcuaacgugaauauccuggucaaacagauuuccacacccaaggggccuucucuuagagugaugaucaacagccgguccgccguucuggcccagaugcccucuaaauuuaccauuugcgcuaaugugagccucgacgagcgcuccaagcuggccuaugaugucacaaccccuugugaaaucaaggcuugcagccugacaugucucaaaucuaagaacaugcugaccacggugaaagaccuuaccaugaagacacugaaucccacccaugauaucauugcccucugcgaguucgagaacaucguuacauccaaaaaggugauuaucccuaccuaccugagaagcauuucuguccggaauaaggaccuuaacacgcuggaaaauaucacaaccacagaguuuaaaaacgcgauuaccaaugccaagaucaucccguauuccggacuccugcuggugauuaccgugacagauaacaaaggcgcuuucaaguacaucaaaccccagagccaauuuauugucgaccucggggccuaucuggaaaaggagucuaucuacuacguuacgaccaauuggaaacacacagcuacccgcuucgccauuaagccuauggaggauuga

SEQ ID NO: 9691 - RNA, 771 nt, Artificial Sequence
  derived and/or modified CDS sequence (opt6) from HRSV(A2)__P0DOE7.1__M
auggaaacauacguaaacaaacuacacgaaggauccacauacacagcagcaguacaauacaacguacuagaaaaagacgacgacccagcaucuuuaaccauauggguaccaauguuccaaucaucaaugccagcagaccucuuaauaaaagaacuagcaaacguaaacauccuagucaaacaaauaucaacacccaaaggaccaucccucagaguaaugaucaacucaagaucagcaguacuagcacaaaugccaucaaaauucacaauaugcgccaacguuucuuuagacgaacgaucaaaauuagccuacgacguaacaacacccugcgaaauaaaagcaugcucacuaacaugccuaaaaucaaaaaacaugcucacuacaguaaaagaccuaaccaugaaaacacucaacccaacacacgacauaauagcccuaugcgaauuugaaaacauaguaacaucaaaaaaaguaauaaucccaacauacuuaagaucgaucucagucagaaacaaagaccuaaauacacucgaaaacauaacaacaacagaauuuaaaaacgcaauaacaaacgcaaaaauaauaccauacucaggacuacuccuaguaauaacaguaacagacaacaaaggagcauucaaauacauaaaaccacaaucacaauucaucguagaccucggagcauaccuagaaaaagaaucaauauacuacguaacaacaaacuggaaacacaccgccacaagauucgcaauaaaacccauggaagacuaa

SEQ ID NO: 9692 - RNA, 771 nt, Artificial Sequence
  derived and/or modified CDS sequence (opt11) from HRSV(A2)__P0DOE7.1__M
auggaaaccuacgucaacaaacuacacgaaggcucaaccuacaccgccgccguccaauacaacguccucgaaaaagacgacgaccccgccucccuaaccaucuggguucccauguuccaaucauccaugcccgccgaccuccucauaaaagaacuagccaacgucaacauccuagucaaacaaaucagcacccccaaaggccccucccuccgcguaaugaucaacucccgcuccgccguccuagcccaaaugcccuccaaauuuacaaucugcgccaacgucucccucgacgaacgcucaaaacucgccuacgacgucaccacacccugcgaaaucaaagccugcucccucaccugccucaaaagcaaaaauaugcuaaccaccgucaaagaccuuaccaugaaaacccucaaccccacucacgacaucauagcccucugcgaauuugaaaacaucgucaccuccaaaaaagucaucauccccacauaccuccgcuccaucuccguccgcaacaaagaccucaacacccucgaaaacaucaccaccaccgaauuuaaaaacgccaucaccaacgccaaaaucauccccuacuccggccuccuccucgucaucaccguuaccgacaacaaaggcgccuucaaauacaucaaaccccaaucccaauucaucgucgaccucggagccuaccuugaaaaagaguccaucuacuacgucaccaccaacuggaaacacaccgccacccgauucgccaucaaacccauggaagacuaa

SEQ ID NO: 9693 - RNA, 1047 nt, Artificial Sequence
  mRNA product Design a-1 comprising derived and/or modified sequence from HRSV(A2)__P0DOE7.1__M (wt)
gggagagucccgcagucggcguccagcggcucugcuuguucgugugugugucguugcaggccuuauucaagcuuaccauggaaacauacgugaacaagcuucacgaaggcuccacauacacagcugcuguucaauacaaugucuuagaaaaagacgaugacccugcaucacuuacaauaugggugcccauguuccaaucaucuaugccagcagauuuacuuauaaaagaacuagcuaaugucaacauacuagugaaacaaauauccacacccaagggaccuucacuaagagucaugauaaacucaagaagugcagugcuagcacaaaugcccagcaaauuuaccauaugcgcuaauguguccuuggaugaaagaagcaaacuagcauaugauguaaccacacccugugaaaucaaggcauguagucuaacaugccuaaaaucaaaaaauauguugacuacaguuaaagaucucacuaugaagacacucaacccuacacaugauauuauugcuuuaugugaauuugaaaacauaguaacaucaaaaaaagucauaauaccaacauaccuaagauccaucagugucagaaauaaagaucugaacacacuugaaaauauaacaaccacugaauucaaaaaugcuaucacaaaugcaaaaaucaucccuuacucaggauuacuauuagucaucacagugacugacaacaaaggagcauucaaauacauaaagccacaaagucaauucauaguagaucuuggagcuuaccuagaaaaagaaaguauauauuauguuaccacaaauuggaagcacacagcuacacgauuugcaaucaaacccauggaagauuaaggacuagucccuguucccagagcccacuuuuuuuucuuuuuuugaaauaaaauagccugucuuucagaucuaaaaaaaaaaaaaaaaaaaaaaaaaaaaaaaaaaaaaaaaaaaaaaaaaaaaaaaaaaaaaaaaugcaucccccccccccccccccccccccccccccccaaaggcucuuuucagagccaccagaauu

SEQ ID NO: 9694 - RNA, 1047 nt, Artificial Sequence
  mRNA product Design a-1 comprising derived and/or modified sequence from HRSV(A2)__P0DOE7.1__M (opt1)
gggagagucccgcagucggcguccagcggcucugcuuguucgugugugugucguugcaggccuuauucaagcuuaccauggagaccuacgugaacaagcugcacgagggcagcaccuacacggccgccguccaguacaacgugcucgagaaggacgacgaccccgcgucccugaccaucugggugccgauguuccagagcuccaugcccgccgaccugcucaucaaggagcuggccaacgucaacauccuggugaagcagaucagcacccccaaggggcccucccuccgcgugaugaucaacagccgguccgccguccuggcccagaugccgagcaaguucaccaucugcgcgaacgugucccuggacgagcgcagcaagcucgccuacgacgugacgacccccugcgagaucaaggccugcucccugaccugccucaagagcaagaacaugcugaccacggucaaggaccugaccaugaagacccugaaccccacccacgacaucaucgcccucugcgaguucgagaacaucgugacguccaagaaggugaucauccccaccuaccugcggagcaucuccguccgcaacaaggaccugaacacccucgagaacaucaccacgaccgaguucaagaacgcgaucaccaacgccaagaucaucccguacagcggccugcugcucgugaucaccgugacggacaacaagggggccuucaaguacaucaagccccagucccaguucaucgucgaccugggcgccuaccuggagaaggagagcaucuacuacgugaccaccaacuggaagcacaccgccacgcgguucgcgaucaagcccauggaggacugaggacuagucccuguucccagagcccacuuuuuuuucuuuuuuugaaauaaaauagccugucuuucagaucuaaaaaaaaaaaaaaaaaaaaaaaaaaaaaaaaaaaaaaaaaaaaaaaaaaaaaaaaaaaaaaaaugcaucccccccccccccccccccccccccccccccaaaggcucuuuucagagccaccagaauu

SEQ ID NO: 9695 - RNA, 1047 nt, Artificial Sequence
  mRNA product Design a-1 comprising derived and/or modified sequence from HRSV(A2)__P0DOE7.1__M (opt2)
gggagagucccgcagucggcguccagcggcucugcuuguucgugugugugucguugcaggccuuauucaagcuuaccauggagaccuacgucaacaagcuccacgagggcuccaccuacaccgccgccguccaguacaacguccucgagaaggacgacgaccccgccucccucaccaucuggguccccauguuccaguccuccaugcccgccgaccuccucaucaaggagcucgccaacgucaacauccucgucaagcagaucuccacccccaagggccccucccuccgcgucaugaucaacucccgcuccgccguccucgcccagaugcccuccaaguucaccaucugcgccaacgucucccucgacgagcgcuccaagcucgccuacgacgucaccacccccugcgagaucaaggccugcucccucaccugccucaaguccaagaacaugcucaccaccgucaaggaccucaccaugaagacccucaaccccacccacgacaucaucgcccucugcgaguucgagaacaucgucaccuccaagaaggucaucauccccaccuaccuccgcuccaucuccguccgcaacaaggaccucaacacccucgagaacaucaccaccaccgaguucaagaacgccaucaccaacgccaagaucauccccuacuccggccuccuccucgucaucaccgucaccgacaacaagggcgccuucaaguacaucaagccccagucccaguucaucgucgaccucggcgccuaccucgagaaggaguccaucuacuacgucaccaccaacuggaagcacaccgccacccgcuucgccaucaagcccauggaggacugaggacuagucccuguucccagagcccacuuuuuuuucuuuuuuugaaauaaaauagccugucuuucagaucuaaaaaaaaaaaaaaaaaaaaaaaaaaaaaaaaaaaaaaaaaaaaaaaaaaaaaaaaaaaaaaaaugcaucccccccccccccccccccccccccccccccaaaggcucuuuucagagccaccagaauu

SEQ ID NO: 9696 - RNA, 1047 nt, Artificial Sequence
  mRNA product Design a-1 comprising derived and/or modified sequence from HRSV(A2)__P0DOE7.1__M (opt3)
gggagagucccgcagucggcguccagcggcucugcuuguucgugugugugucguugcaggccuuauucaagcuuaccauggagaccuacgugaacaagcugcacgaaggcagcacauauacugccgcuguccaguacaauguucucgagaaagacgaugaccccgcaucccuuacgaucugggugccuauguuccaaucuucaaugccagccgaucuguugauuaaggaauuagcgaacguaaauauacuggugaaacagaucaguaccccgaaggggcccagccuaagagucaugauuaacuccaggucugcugugcucgcccagaugccuucgaaauuuacaaucugcgcaaauguuucacuggacgagcggagcaaacuugccuaugaugugacuaccccaugugaaauuaaggcuugcagucugacauguuugaaguccaagaacaugcucaccacugucaaagaccugacaaugaagacccugaaucccacgcaugauaucauagcacucugcgaguucgagaacaucgugacuucuaaaaagguaauuaucccuaccuacuuacgcagcauuuccguucgaaauaaggaccugaacacacuugaaaauaucacuaccacagaguuuaaaaacgccauaaccaaugcuaagauuaucccauauucaggauugcugcuagugauuacggucacugauaacaaaggugccuucaaguacaucaaaccccagagucaauuuaucguggaccucggcgcguaucuggaaaaggagagcauuuacuacgugacaaccaauuggaaacacacugcaacacguuucgccauaaagccuauggaggauugaggacuagucccuguucccagagcccacuuuuuuuucuuuuuuugaaauaaaauagccugucuuucagaucuaaaaaaaaaaaaaaaaaaaaaaaaaaaaaaaaaaaaaaaaaaaaaaaaaaaaaaaaaaaaaaaaugcaucccccccccccccccccccccccccccccccaaaggcucuuuucagagccaccagaauu

SEQ ID NO: 9697 - RNA, 1047 nt, Artificial Sequence
  mRNA product Design a-1 comprising derived and/or modified sequence from HRSV(A2)__P0DOE7.1__M (opt4)
gggagagucccgcagucggcguccagcggcucugcuuguucgugugugugucguugcaggccuuauucaagcuuaccauggagaccuacgugaacaagcugcacgagggcagcaccuacaccgccgccgugcaguacaacgugcuggagaaggacgacgaccccgccagccugaccaucugggugcccauguuccagagcagcaugcccgccgaccugcugaucaaggagcuggccaacgugaacauccuggugaagcagaucagcacccccaagggccccagccugagagugaugaucaacagcagaagcgccgugcuggcccagaugcccagcaaguucaccaucugcgccaacgugagccuggacgagagaagcaagcuggccuacgacgugaccacccccugcgagaucaaggccugcagccugaccugccugaagagcaagaacaugcugaccaccgugaaggaccugaccaugaagacccugaaccccacccacgacaucaucgcccugugcgaguucgagaacaucgugaccagcaagaaggugaucauccccaccuaccugagaagcaucagcgugagaaacaaggaccugaacacccuggagaacaucaccaccaccgaguucaagaacgccaucaccaacgccaagaucauccccuacagcggccugcugcuggugaucaccgugaccgacaacaagggcgccuucaaguacaucaagccccagagccaguucaucguggaccugggcgccuaccuggagaaggagagcaucuacuacgugaccaccaacuggaagcacaccgccaccagauucgccaucaagcccauggaggacugaggacuagucccuguucccagagcccacuuuuuuuucuuuuuuugaaauaaaauagccugucuuucagaucuaaaaaaaaaaaaaaaaaaaaaaaaaaaaaaaaaaaaaaaaaaaaaaaaaaaaaaaaaaaaaaaaugcaucccccccccccccccccccccccccccccccaaaggcucuuuucagagccaccagaauu

SEQ ID NO: 9698 - RNA, 1047 nt, Artificial Sequence
  mRNA product Design a-1 comprising derived and/or modified sequence from HRSV(A2)__P0DOE7.1__M (opt5)
gggagagucccgcagucggcguccagcggcucugcuuguucgugugugugucguugcaggccuuauucaagcuuaccauggagaccuacgugaacaagcugcacgaaggcagcacauauacggccgcuguccaguacaauguucucgagaaagacgaugaccccgccucccugaccaucugggugccuauguuccaaucuagcaugccggcggaucuucugauuaaggaacucgcuaacgugaauauccuggucaaacagauuuccacacccaaggggccuucucuuagagugaugaucaacagccgguccgccguucuggcccagaugcccucuaaauuuaccauuugcgcuaaugugagccucgacgagcgcuccaagcuggccuaugaugucacaaccccuugugaaaucaaggcuugcagccugacaugucucaaaucuaagaacaugcugaccacggugaaagaccuuaccaugaagacacugaaucccacccaugauaucauugcccucugcgaguucgagaacaucguuacauccaaaaaggugauuaucccuaccuaccugagaagcauuucuguccggaauaaggaccuuaacacgcuggaaaauaucacaaccacagaguuuaaaaacgcgauuaccaaugccaagaucaucccguauuccggacuccugcuggugauuaccgugacagauaacaaaggcgcuuucaaguacaucaaaccccagagccaauuuauugucgaccucggggccuaucuggaaaaggagucuaucuacuacguuacgaccaauuggaaacacacagcuacccgcuucgccauuaagccuauggaggauugaggacuagucccuguucccagagcccacuuuuuuuucuuuuuuugaaauaaaauagccugucuuucagaucuaaaaaaaaaaaaaaaaaaaaaaaaaaaaaaaaaaaaaaaaaaaaaaaaaaaaaaaaaaaaaaaaugcaucccccccccccccccccccccccccccccccaaaggcucuuuucagagccaccagaauu

SEQ ID NO: 9699 - RNA, 1047 nt, Artificial Sequence
  mRNA product Design a-1 comprising derived and/or modified sequence from HRSV(A2)__P0DOE7.1__M (opt6)
gggagagucccgcagucggcguccagcggcucugcuuguucgugugugugucguugcaggccuuauucaagcuuaccauggaaacauacguaaacaaacuacacgaaggauccacauacacagcagcaguacaauacaacguacuagaaaaagacgacgacccagcaucuuuaaccauauggguaccaauguuccaaucaucaaugccagcagaccucuuaauaaaagaacuagcaaacguaaacauccuagucaaacaaauaucaacacccaaaggaccaucccucagaguaaugaucaacucaagaucagcaguacuagcacaaaugccaucaaaauucacaauaugcgccaacguuucuuuagacgaacgaucaaaauuagccuacgacguaacaacacccugcgaaauaaaagcaugcucacuaacaugccuaaaaucaaaaaacaugcucacuacaguaaaagaccuaaccaugaaaacacucaacccaacacacgacauaauagcccuaugcgaauuugaaaacauaguaacaucaaaaaaaguaauaaucccaacauacuuaagaucgaucucagucagaaacaaagaccuaaauacacucgaaaacauaacaacaacagaauuuaaaaacgcaauaacaaacgcaaaaauaauaccauacucaggacuacuccuaguaauaacaguaacagacaacaaaggagcauucaaauacauaaaaccacaaucacaauucaucguagaccucggagcauaccuagaaaaagaaucaauauacuacguaacaacaaacuggaaacacaccgccacaagauucgcaauaaaacccauggaagacuaaggacuagucccuguucccagagcccacuuuuuuuucuuuuuuugaaauaaaauagccugucuuucagaucuaaaaaaaaaaaaaaaaaaaaaaaaaaaaaaaaaaaaaaaaaaaaaaaaaaaaaaaaaaaaaaaaugcaucccccccccccccccccccccccccccccccaaaggcucuuuucagagccaccagaauu

SEQ ID NO: 9700 - RNA, 1047 nt, Artificial Sequence
  mRNA product Design a-1 comprising derived and/or modified sequence from HRSV(A2)__P0DOE7.1__M (opt11)
gggagagucccgcagucggcguccagcggcucugcuuguucgugugugugucguugcaggccuuauucaagcuuaccauggaaaccuacgucaacaaacuacacgaaggcucaaccuacaccgccgccguccaauacaacguccucgaaaaagacgacgaccccgccucccuaaccaucuggguucccauguuccaaucauccaugcccgccgaccuccucauaaaagaacuagccaacgucaacauccuagucaaacaaaucagcacccccaaaggccccucccuccgcguaaugaucaacucccgcuccgccguccuagcccaaaugcccuccaaauuuacaaucugcgccaacgucucccucgacgaacgcucaaaacucgccuacgacgucaccacacccugcgaaaucaaagccugcucccucaccugccucaaaagcaaaaauaugcuaaccaccgucaaagaccuuaccaugaaaacccucaaccccacucacgacaucauagcccucugcgaauuugaaaacaucgucaccuccaaaaaagucaucauccccacauaccuccgcuccaucuccguccgcaacaaagaccucaacacccucgaaaacaucaccaccaccgaauuuaaaaacgccaucaccaacgccaaaaucauccccuacuccggccuccuccucgucaucaccguuaccgacaacaaaggcgccuucaaauacaucaaaccccaaucccaauucaucgucgaccucggagccuaccuugaaaaagaguccaucuacuacgucaccaccaacuggaaacacaccgccacccgauucgccaucaaacccauggaagacuaaggacuagucccuguucccagagcccacuuuuuuuucuuuuuuugaaauaaaauagccugucuuucagaucuaaaaaaaaaaaaaaaaaaaaaaaaaaaaaaaaaaaaaaaaaaaaaaaaaaaaaaaaaaaaaaaaugcaucccccccccccccccccccccccccccccccaaaggcucuuuucagagccaccagaauu

SEQ ID NO: 9701 - RNA, 1066 nt, Artificial Sequence
  mRNA product Design a-2 comprising derived and/or modified sequence from HRSV(A2)__P0DOE7.1__M (wt)
gggagaguccgcucagccagguugcagaagcggcuuagcguguguccuaaucuucucucugcguguagguaggccugugccgcaaacaagcuuaccauggaaacauacgugaacaagcuucacgaaggcuccacauacacagcugcuguucaauacaaugucuuagaaaaagacgaugacccugcaucacuuacaauaugggugcccauguuccaaucaucuaugccagcagauuuacuuauaaaagaacuagcuaaugucaacauacuagugaaacaaauauccacacccaagggaccuucacuaagagucaugauaaacucaagaagugcagugcuagcacaaaugcccagcaaauuuaccauaugcgcuaauguguccuuggaugaaagaagcaaacuagcauaugauguaaccacacccugugaaaucaaggcauguagucuaacaugccuaaaaucaaaaaauauguugacuacaguuaaagaucucacuaugaagacacucaacccuacacaugauauuauugcuuuaugugaauuugaaaacauaguaacaucaaaaaaagucauaauaccaacauaccuaagauccaucagugucagaaauaaagaucugaacacacuugaaaauauaacaaccacugaauucaaaaaugcuaucacaaaugcaaaaaucaucccuuacucaggauuacuauuagucaucacagugacugacaacaaaggagcauucaaauacauaaagccacaaagucaauucauaguagaucuuggagcuuaccuagaaaaagaaaguauauauuauguuaccacaaauuggaagcacacagcuacacgauuugcaaucaaacccauggaagauuaaggacuagucccuguucccagagcccacuuuuuuuucuuuuuuugaaauaaaauagccugucuuucagaucuaaaaaaaaaaaaaaaaaaaaaaaaaaaaaaaaaaaaaaaaaaaaaaaaaaaaaaaaaaaaaaaaugcaucccccccccccccccccccccccccccccccaaaggcucuuuucagagccaccagaauu

SEQ ID NO: 9702 - RNA, 1066 nt, Artificial Sequence
  mRNA product Design a-2 comprising derived and/or modified sequence from HRSV(A2)__P0DOE7.1__M (opt1)
gggagaguccgcucagccagguugcagaagcggcuuagcguguguccuaaucuucucucugcguguagguaggccugugccgcaaacaagcuuaccauggagaccuacgugaacaagcugcacgagggcagcaccuacacggccgccguccaguacaacgugcucgagaaggacgacgaccccgcgucccugaccaucugggugccgauguuccagagcuccaugcccgccgaccugcucaucaaggagcuggccaacgucaacauccuggugaagcagaucagcacccccaaggggcccucccuccgcgugaugaucaacagccgguccgccguccuggcccagaugccgagcaaguucaccaucugcgcgaacgugucccuggacgagcgcagcaagcucgccuacgacgugacgacccccugcgagaucaaggccugcucccugaccugccucaagagcaagaacaugcugaccacggucaaggaccugaccaugaagacccugaaccccacccacgacaucaucgcccucugcgaguucgagaacaucgugacguccaagaaggugaucauccccaccuaccugcggagcaucuccguccgcaacaaggaccugaacacccucgagaacaucaccacgaccgaguucaagaacgcgaucaccaacgccaagaucaucccguacagcggccugcugcucgugaucaccgugacggacaacaagggggccuucaaguacaucaagccccagucccaguucaucgucgaccugggcgccuaccuggagaaggagagcaucuacuacgugaccaccaacuggaagcacaccgccacgcgguucgcgaucaagcccauggaggacugaggacuagucccuguucccagagcccacuuuuuuuucuuuuuuugaaauaaaauagccugucuuucagaucuaaaaaaaaaaaaaaaaaaaaaaaaaaaaaaaaaaaaaaaaaaaaaaaaaaaaaaaaaaaaaaaaugcaucccccccccccccccccccccccccccccccaaaggcucuuuucagagccaccagaauu

SEQ ID NO: 9703 - RNA, 1066 nt, Artificial Sequence
  mRNA product Design a-2 comprising derived and/or modified sequence from HRSV(A2)__P0DOE7.1__M (opt2)
gggagaguccgcucagccagguugcagaagcggcuuagcguguguccuaaucuucucucugcguguagguaggccugugccgcaaacaagcuuaccauggagaccuacgucaacaagcuccacgagggcuccaccuacaccgccgccguccaguacaacguccucgagaaggacgacgaccccgccucccucaccaucuggguccccauguuccaguccuccaugcccgccgaccuccucaucaaggagcucgccaacgucaacauccucgucaagcagaucuccacccccaagggccccucccuccgcgucaugaucaacucccgcuccgccguccucgcccagaugcccuccaaguucaccaucugcgccaacgucucccucgacgagcgcuccaagcucgccuacgacgucaccacccccugcgagaucaaggccugcucccucaccugccucaaguccaagaacaugcucaccaccgucaaggaccucaccaugaagacccucaaccccacccacgacaucaucgcccucugcgaguucgagaacaucgucaccuccaagaaggucaucauccccaccuaccuccgcuccaucuccguccgcaacaaggaccucaacacccucgagaacaucaccaccaccgaguucaagaacgccaucaccaacgccaagaucauccccuacuccggccuccuccucgucaucaccgucaccgacaacaagggcgccuucaaguacaucaagccccagucccaguucaucgucgaccucggcgccuaccucgagaaggaguccaucuacuacgucaccaccaacuggaagcacaccgccacccgcuucgccaucaagcccauggaggacugaggacuagucccuguucccagagcccacuuuuuuuucuuuuuuugaaauaaaauagccugucuuucagaucuaaaaaaaaaaaaaaaaaaaaaaaaaaaaaaaaaaaaaaaaaaaaaaaaaaaaaaaaaaaaaaaaugcaucccccccccccccccccccccccccccccccaaaggcucuuuucagagccaccagaauu

SEQ ID NO: 9704 - RNA, 1066 nt, Artificial Sequence
  mRNA product Design a-2 comprising derived and/or modified sequence from HRSV(A2)__P0DOE7.1__M (opt3)
gggagaguccgcucagccagguugcagaagcggcuuagcguguguccuaaucuucucucugcguguagguaggccugugccgcaaacaagcuuaccauggagaccuacgugaacaagcugcacgaaggcagcacauauacugccgcuguccaguacaauguucucgagaaagacgaugaccccgcaucccuuacgaucugggugccuauguuccaaucuucaaugccagccgaucuguugauuaaggaauuagcgaacguaaauauacuggugaaacagaucaguaccccgaaggggcccagccuaagagucaugauuaacuccaggucugcugugcucgcccagaugccuucgaaauuuacaaucugcgcaaauguuucacuggacgagcggagcaaacuugccuaugaugugacuaccccaugugaaauuaaggcuugcagucugacauguuugaaguccaagaacaugcucaccacugucaaagaccugacaaugaagacccugaaucccacgcaugauaucauagcacucugcgaguucgagaacaucgugacuucuaaaaagguaauuaucccuaccuacuuacgcagcauuuccguucgaaauaaggaccugaacacacuugaaaauaucacuaccacagaguuuaaaaacgccauaaccaaugcuaagauuaucccauauucaggauugcugcuagugauuacggucacugauaacaaaggugccuucaaguacaucaaaccccagagucaauuuaucguggaccucggcgcguaucuggaaaaggagagcauuuacuacgugacaaccaauuggaaacacacugcaacacguuucgccauaaagccuauggaggauugaggacuagucccuguucccagagcccacuuuuuuuucuuuuuuugaaauaaaauagccugucuuucagaucuaaaaaaaaaaaaaaaaaaaaaaaaaaaaaaaaaaaaaaaaaaaaaaaaaaaaaaaaaaaaaaaaugcaucccccccccccccccccccccccccccccccaaaggcucuuuucagagccaccagaauu

SEQ ID NO: 9705 - RNA, 1066 nt, Artificial Sequence
  mRNA product Design a-2 comprising derived and/or modified sequence from HRSV(A2)__P0DOE7.1__M (opt4)
gggagaguccgcucagccagguugcagaagcggcuuagcguguguccuaaucuucucucugcguguagguaggccugugccgcaaacaagcuuaccauggagaccuacgugaacaagcugcacgagggcagcaccuacaccgccgccgugcaguacaacgugcuggagaaggacgacgaccccgccagccugaccaucugggugcccauguuccagagcagcaugcccgccgaccugcugaucaaggagcuggccaacgugaacauccuggugaagcagaucagcacccccaagggccccagccugagagugaugaucaacagcagaagcgccgugcuggcccagaugcccagcaaguucaccaucugcgccaacgugagccuggacgagagaagcaagcuggccuacgacgugaccacccccugcgagaucaaggccugcagccugaccugccugaagagcaagaacaugcugaccaccgugaaggaccugaccaugaagacccugaaccccacccacgacaucaucgcccugugcgaguucgagaacaucgugaccagcaagaaggugaucauccccaccuaccugagaagcaucagcgugagaaacaaggaccugaacacccuggagaacaucaccaccaccgaguucaagaacgccaucaccaacgccaagaucauccccuacagcggccugcugcuggugaucaccgugaccgacaacaagggcgccuucaaguacaucaagccccagagccaguucaucguggaccugggcgccuaccuggagaaggagagcaucuacuacgugaccaccaacuggaagcacaccgccaccagauucgccaucaagcccauggaggacugaggacuagucccuguucccagagcccacuuuuuuuucuuuuuuugaaauaaaauagccugucuuucagaucuaaaaaaaaaaaaaaaaaaaaaaaaaaaaaaaaaaaaaaaaaaaaaaaaaaaaaaaaaaaaaaaaugcaucccccccccccccccccccccccccccccccaaaggcucuuuucagagccaccagaauu

SEQ ID NO: 9706 - RNA, 1066 nt, Artificial Sequence
  mRNA product Design a-2 comprising derived and/or modified sequence from HRSV(A2)__P0DOE7.1__M (opt5)
gggagaguccgcucagccagguugcagaagcggcuuagcguguguccuaaucuucucucugcguguagguaggccugugccgcaaacaagcuuaccauggagaccuacgugaacaagcugcacgaaggcagcacauauacggccgcuguccaguacaauguucucgagaaagacgaugaccccgccucccugaccaucugggugccuauguuccaaucuagcaugccggcggaucuucugauuaaggaacucgcuaacgugaauauccuggucaaacagauuuccacacccaaggggccuucucuuagagugaugaucaacagccgguccgccguucuggcccagaugcccucuaaauuuaccauuugcgcuaaugugagccucgacgagcgcuccaagcuggccuaugaugucacaaccccuugugaaaucaaggcuugcagccugacaugucucaaaucuaagaacaugcugaccacggugaaagaccuuaccaugaagacacugaaucccacccaugauaucauugcccucugcgaguucgagaacaucguuacauccaaaaaggugauuaucccuaccuaccugagaagcauuucuguccggaauaaggaccuuaacacgcuggaaaauaucacaaccacagaguuuaaaaacgcgauuaccaaugccaagaucaucccguauuccggacuccugcuggugauuaccgugacagauaacaaaggcgcuuucaaguacaucaaaccccagagccaauuuauugucgaccucggggccuaucuggaaaaggagucuaucuacuacguuacgaccaauuggaaacacacagcuacccgcuucgccauuaagccuauggaggauugaggacuagucccuguucccagagcccacuuuuuuuucuuuuuuugaaauaaaauagccugucuuucagaucuaaaaaaaaaaaaaaaaaaaaaaaaaaaaaaaaaaaaaaaaaaaaaaaaaaaaaaaaaaaaaaaaugcaucccccccccccccccccccccccccccccccaaaggcucuuuucagagccaccagaauu

SEQ ID NO: 9707 - RNA, 1066 nt, Artificial Sequence
  mRNA product Design a-2 comprising derived and/or modified sequence from HRSV(A2)__P0DOE7.1__M (opt6)
gggagaguccgcucagccagguugcagaagcggcuuagcguguguccuaaucuucucucugcguguagguaggccugugccgcaaacaagcuuaccauggaaacauacguaaacaaacuacacgaaggauccacauacacagcagcaguacaauacaacguacuagaaaaagacgacgacccagcaucuuuaaccauauggguaccaauguuccaaucaucaaugccagcagaccucuuaauaaaagaacuagcaaacguaaacauccuagucaaacaaauaucaacacccaaaggaccaucccucagaguaaugaucaacucaagaucagcaguacuagcacaaaugccaucaaaauucacaauaugcgccaacguuucuuuagacgaacgaucaaaauuagccuacgacguaacaacacccugcgaaauaaaagcaugcucacuaacaugccuaaaaucaaaaaacaugcucacuacaguaaaagaccuaaccaugaaaacacucaacccaacacacgacauaauagcccuaugcgaauuugaaaacauaguaacaucaaaaaaaguaauaaucccaacauacuuaagaucgaucucagucagaaacaaagaccuaaauacacucgaaaacauaacaacaacagaauuuaaaaacgcaauaacaaacgcaaaaauaauaccauacucaggacuacuccuaguaauaacaguaacagacaacaaaggagcauucaaauacauaaaaccacaaucacaauucaucguagaccucggagcauaccuagaaaaagaaucaauauacuacguaacaacaaacuggaaacacaccgccacaagauucgcaauaaaacccauggaagacuaaggacuagucccuguucccagagcccacuuuuuuuucuuuuuuugaaauaaaauagccugucuuucagaucuaaaaaaaaaaaaaaaaaaaaaaaaaaaaaaaaaaaaaaaaaaaaaaaaaaaaaaaaaaaaaaaaugcaucccccccccccccccccccccccccccccccaaaggcucuuuucagagccaccagaauu

SEQ ID NO: 9708 - RNA, 1066 nt, Artificial Sequence
  mRNA product Design a-2 comprising derived and/or modified sequence from HRSV(A2)__P0DOE7.1__M (opt11)
gggagaguccgcucagccagguugcagaagcggcuuagcguguguccuaaucuucucucugcguguagguaggccugugccgcaaacaagcuuaccauggaaaccuacgucaacaaacuacacgaaggcucaaccuacaccgccgccguccaauacaacguccucgaaaaagacgacgaccccgccucccuaaccaucuggguucccauguuccaaucauccaugcccgccgaccuccucauaaaagaacuagccaacgucaacauccuagucaaacaaaucagcacccccaaaggccccucccuccgcguaaugaucaacucccgcuccgccguccuagcccaaaugcccuccaaauuuacaaucugcgccaacgucucccucgacgaacgcucaaaacucgccuacgacgucaccacacccugcgaaaucaaagccugcucccucaccugccucaaaagcaaaaauaugcuaaccaccgucaaagaccuuaccaugaaaacccucaaccccacucacgacaucauagcccucugcgaauuugaaaacaucgucaccuccaaaaaagucaucauccccacauaccuccgcuccaucuccguccgcaacaaagaccucaacacccucgaaaacaucaccaccaccgaauuuaaaaacgccaucaccaacgccaaaaucauccccuacuccggccuccuccucgucaucaccguuaccgacaacaaaggcgccuucaaauacaucaaaccccaaucccaauucaucgucgaccucggagccuaccuugaaaaagaguccaucuacuacgucaccaccaacuggaaacacaccgccacccgauucgccaucaaacccauggaagacuaaggacuagucccuguucccagagcccacuuuuuuuucuuuuuuugaaauaaaauagccugucuuucagaucuaaaaaaaaaaaaaaaaaaaaaaaaaaaaaaaaaaaaaaaaaaaaaaaaaaaaaaaaaaaaaaaaugcaucccccccccccccccccccccccccccccccaaaggcucuuuucagagccaccagaauu

SEQ ID NO: 9709 - RNA, 1144 nt, Artificial Sequence
  mRNA product Design a-3 comprising derived and/or modified sequence from HRSV(A2)__P0DOE7.1__M (wt)
gggagagggcgcuuggcuugcaaggacccugagcugcggcauugaagcacacccaacccaacucgacugaagucagccucacugaaccggaucugagaaucuucucucucugggcuugccagggcucuccgaaccuagcuagcauccucuucaauuccaacuagaaagcuuaccauggaaacauacgugaacaagcuucacgaaggcuccacauacacagcugcuguucaauacaaugucuuagaaaaagacgaugacccugcaucacuuacaauaugggugcccauguuccaaucaucuaugccagcagauuuacuuauaaaagaacuagcuaaugucaacauacuagugaaacaaauauccacacccaagggaccuucacuaagagucaugauaaacucaagaagugcagugcuagcacaaaugcccagcaaauuuaccauaugcgcuaauguguccuuggaugaaagaagcaaacuagcauaugauguaaccacacccugugaaaucaaggcauguagucuaacaugccuaaaaucaaaaaauauguugacuacaguuaaagaucucacuaugaagacacucaacccuacacaugauauuauugcuuuaugugaauuugaaaacauaguaacaucaaaaaaagucauaauaccaacauaccuaagauccaucagugucagaaauaaagaucugaacacacuugaaaauauaacaaccacugaauucaaaaaugcuaucacaaaugcaaaaaucaucccuuacucaggauuacuauuagucaucacagugacugacaacaaaggagcauucaaauacauaaagccacaaagucaauucauaguagaucuuggagcuuaccuagaaaaagaaaguauauauuauguuaccacaaauuggaagcacacagcuacacgauuugcaaucaaacccauggaagauuaaggacuagucccuguucccagagcccacuuuuuuuucuuuuuuugaaauaaaauagccugucuuucagaucuaaaaaaaaaaaaaaaaaaaaaaaaaaaaaaaaaaaaaaaaaaaaaaaaaaaaaaaaaaaaaaaaugcaucccccccccccccccccccccccccccccccaaaggcucuuuucagagccaccagaauu

SEQ ID NO: 9710 - RNA, 1144 nt, Artificial Sequence
  mRNA product Design a-3 comprising derived and/or modified sequence from HRSV(A2)__P0DOE7.1__M (opt1)
gggagagggcgcuuggcuugcaaggacccugagcugcggcauugaagcacacccaacccaacucgacugaagucagccucacugaaccggaucugagaaucuucucucucugggcuugccagggcucuccgaaccuagcuagcauccucuucaauuccaacuagaaagcuuaccauggagaccuacgugaacaagcugcacgagggcagcaccuacacggccgccguccaguacaacgugcucgagaaggacgacgaccccgcgucccugaccaucugggugccgauguuccagagcuccaugcccgccgaccugcucaucaaggagcuggccaacgucaacauccuggugaagcagaucagcacccccaaggggcccucccuccgcgugaugaucaacagccgguccgccguccuggcccagaugccgagcaaguucaccaucugcgcgaacgugucccuggacgagcgcagcaagcucgccuacgacgugacgacccccugcgagaucaaggccugcucccugaccugccucaagagcaagaacaugcugaccacggucaaggaccugaccaugaagacccugaaccccacccacgacaucaucgcccucugcgaguucgagaacaucgugacguccaagaaggugaucauccccaccuaccugcggagcaucuccguccgcaacaaggaccugaacacccucgagaacaucaccacgaccgaguucaagaacgcgaucaccaacgccaagaucaucccguacagcggccugcugcucgugaucaccgugacggacaacaagggggccuucaaguacaucaagccccagucccaguucaucgucgaccugggcgccuaccuggagaaggagagcaucuacuacgugaccaccaacuggaagcacaccgccacgcgguucgcgaucaagcccauggaggacugaggacuagucccuguucccagagcccacuuuuuuuucuuuuuuugaaauaaaauagccugucuuucagaucuaaaaaaaaaaaaaaaaaaaaaaaaaaaaaaaaaaaaaaaaaaaaaaaaaaaaaaaaaaaaaaaaugcaucccccccccccccccccccccccccccccccaaaggcucuuuucagagccaccagaauu

SEQ ID NO: 9711 - RNA, 1144 nt, Artificial Sequence
  mRNA product Design a-3 comprising derived and/or modified sequence from HRSV(A2)__P0DOE7.1__M (opt2)
gggagagggcgcuuggcuugcaaggacccugagcugcggcauugaagcacacccaacccaacucgacugaagucagccucacugaaccggaucugagaaucuucucucucugggcuugccagggcucuccgaaccuagcuagcauccucuucaauuccaacuagaaagcuuaccauggagaccuacgucaacaagcuccacgagggcuccaccuacaccgccgccguccaguacaacguccucgagaaggacgacgaccccgccucccucaccaucuggguccccauguuccaguccuccaugcccgccgaccuccucaucaaggagcucgccaacgucaacauccucgucaagcagaucuccacccccaagggccccucccuccgcgucaugaucaacucccgcuccgccguccucgcccagaugcccuccaaguucaccaucugcgccaacgucucccucgacgagcgcuccaagcucgccuacgacgucaccacccccugcgagaucaaggccugcucccucaccugccucaaguccaagaacaugcucaccaccgucaaggaccucaccaugaagacccucaaccccacccacgacaucaucgcccucugcgaguucgagaacaucgucaccuccaagaaggucaucauccccaccuaccuccgcuccaucuccguccgcaacaaggaccucaacacccucgagaacaucaccaccaccgaguucaagaacgccaucaccaacgccaagaucauccccuacuccggccuccuccucgucaucaccgucaccgacaacaagggcgccuucaaguacaucaagccccagucccaguucaucgucgaccucggcgccuaccucgagaaggaguccaucuacuacgucaccaccaacuggaagcacaccgccacccgcuucgccaucaagcccauggaggacugaggacuagucccuguucccagagcccacuuuuuuuucuuuuuuugaaauaaaauagccugucuuucagaucuaaaaaaaaaaaaaaaaaaaaaaaaaaaaaaaaaaaaaaaaaaaaaaaaaaaaaaaaaaaaaaaaugcaucccccccccccccccccccccccccccccccaaaggcucuuuucagagccaccagaauu

SEQ ID NO: 9712 - RNA, 1144 nt, Artificial Sequence
  mRNA product Design a-3 comprising derived and/or modified sequence from HRSV(A2)__P0DOE7.1__M (opt3)
gggagagggcgcuuggcuugcaaggacccugagcugcggcauugaagcacacccaacccaacucgacugaagucagccucacugaaccggaucugagaaucuucucucucugggcuugccagggcucuccgaaccuagcuagcauccucuucaauuccaacuagaaagcuuaccauggagaccuacgugaacaagcugcacgaaggcagcacauauacugccgcuguccaguacaauguucucgagaaagacgaugaccccgcaucccuuacgaucugggugccuauguuccaaucuucaaugccagccgaucuguugauuaaggaauuagcgaacguaaauauacuggugaaacagaucaguaccccgaaggggcccagccuaagagucaugauuaacuccaggucugcugugcucgcccagaugccuucgaaauuuacaaucugcgcaaauguuucacuggacgagcggagcaaacuugccuaugaugugacuaccccaugugaaauuaaggcuugcagucugacauguuugaaguccaagaacaugcucaccacugucaaagaccugacaaugaagacccugaaucccacgcaugauaucauagcacucugcgaguucgagaacaucgugacuucuaaaaagguaauuaucccuaccuacuuacgcagcauuuccguucgaaauaaggaccugaacacacuugaaaauaucacuaccacagaguuuaaaaacgccauaaccaaugcuaagauuaucccauauucaggauugcugcuagugauuacggucacugauaacaaaggugccuucaaguacaucaaaccccagagucaauuuaucguggaccucggcgcguaucuggaaaaggagagcauuuacuacgugacaaccaauuggaaacacacugcaacacguuucgccauaaagccuauggaggauugaggacuagucccuguucccagagcccacuuuuuuuucuuuuuuugaaauaaaauagccugucuuucagaucuaaaaaaaaaaaaaaaaaaaaaaaaaaaaaaaaaaaaaaaaaaaaaaaaaaaaaaaaaaaaaaaaugcaucccccccccccccccccccccccccccccccaaaggcucuuuucagagccaccagaauu

SEQ ID NO: 9713 - RNA, 1144 nt, Artificial Sequence
  mRNA product Design a-3 comprising derived and/or modified sequence from HRSV(A2)__P0DOE7.1__M (opt4)
gggagagggcgcuuggcuugcaaggacccugagcugcggcauugaagcacacccaacccaacucgacugaagucagccucacugaaccggaucugagaaucuucucucucugggcuugccagggcucuccgaaccuagcuagcauccucuucaauuccaacuagaaagcuuaccauggagaccuacgugaacaagcugcacgagggcagcaccuacaccgccgccgugcaguacaacgugcuggagaaggacgacgaccccgccagccugaccaucugggugcccauguuccagagcagcaugcccgccgaccugcugaucaaggagcuggccaacgugaacauccuggugaagcagaucagcacccccaagggccccagccugagagugaugaucaacagcagaagcgccgugcuggcccagaugcccagcaaguucaccaucugcgccaacgugagccuggacgagagaagcaagcuggccuacgacgugaccacccccugcgagaucaaggccugcagccugaccugccugaagagcaagaacaugcugaccaccgugaaggaccugaccaugaagacccugaaccccacccacgacaucaucgcccugugcgaguucgagaacaucgugaccagcaagaaggugaucauccccaccuaccugagaagcaucagcgugagaaacaaggaccugaacacccuggagaacaucaccaccaccgaguucaagaacgccaucaccaacgccaagaucauccccuacagcggccugcugcuggugaucaccgugaccgacaacaagggcgccuucaaguacaucaagccccagagccaguucaucguggaccugggcgccuaccuggagaaggagagcaucuacuacgugaccaccaacuggaagcacaccgccaccagauucgccaucaagcccauggaggacugaggacuagucccuguucccagagcccacuuuuuuuucuuuuuuugaaauaaaauagccugucuuucagaucuaaaaaaaaaaaaaaaaaaaaaaaaaaaaaaaaaaaaaaaaaaaaaaaaaaaaaaaaaaaaaaaaugcaucccccccccccccccccccccccccccccccaaaggcucuuuucagagccaccagaauu

SEQ ID NO: 9714 - RNA, 1144 nt, Artificial Sequence
  mRNA product Design a-3 comprising derived and/or modified sequence from HRSV(A2)__P0DOE7.1__M (opt5)
gggagagggcgcuuggcuugcaaggacccugagcugcggcauugaagcacacccaacccaacucgacugaagucagccucacugaaccggaucugagaaucuucucucucugggcuugccagggcucuccgaaccuagcuagcauccucuucaauuccaacuagaaagcuuaccauggagaccuacgugaacaagcugcacgaaggcagcacauauacggccgcuguccaguacaauguucucgagaaagacgaugaccccgccucccugaccaucugggugccuauguuccaaucuagcaugccggcggaucuucugauuaaggaacucgcuaacgugaauauccuggucaaacagauuuccacacccaaggggccuucucuuagagugaugaucaacagccgguccgccguucuggcccagaugcccucuaaauuuaccauuugcgcuaaugugagccucgacgagcgcuccaagcuggccuaugaugucacaaccccuugugaaaucaaggcuugcagccugacaugucucaaaucuaagaacaugcugaccacggugaaagaccuuaccaugaagacacugaaucccacccaugauaucauugcccucugcgaguucgagaacaucguuacauccaaaaaggugauuaucccuaccuaccugagaagcauuucuguccggaauaaggaccuuaacacgcuggaaaauaucacaaccacagaguuuaaaaacgcgauuaccaaugccaagaucaucccguauuccggacuccugcuggugauuaccgugacagauaacaaaggcgcuuucaaguacaucaaaccccagagccaauuuauugucgaccucggggccuaucuggaaaaggagucuaucuacuacguuacgaccaauuggaaacacacagcuacccgcuucgccauuaagccuauggaggauugaggacuagucccuguucccagagcccacuuuuuuuucuuuuuuugaaauaaaauagccugucuuucagaucuaaaaaaaaaaaaaaaaaaaaaaaaaaaaaaaaaaaaaaaaaaaaaaaaaaaaaaaaaaaaaaaaugcaucccccccccccccccccccccccccccccccaaaggcucuuuucagagccaccagaauu

SEQ ID NO: 9715 - RNA, 1144 nt, Artificial Sequence
  mRNA product Design a-3 comprising derived and/or modified sequence from HRSV(A2)__P0DOE7.1__M (opt6)
gggagagggcgcuuggcuugcaaggacccugagcugcggcauugaagcacacccaacccaacucgacugaagucagccucacugaaccggaucugagaaucuucucucucugggcuugccagggcucuccgaaccuagcuagcauccucuucaauuccaacuagaaagcuuaccauggaaacauacguaaacaaacuacacgaaggauccacauacacagcagcaguacaauacaacguacuagaaaaagacgacgacccagcaucuuuaaccauauggguaccaauguuccaaucaucaaugccagcagaccucuuaauaaaagaacuagcaaacguaaacauccuagucaaacaaauaucaacacccaaaggaccaucccucagaguaaugaucaacucaagaucagcaguacuagcacaaaugccaucaaaauucacaauaugcgccaacguuucuuuagacgaacgaucaaaauuagccuacgacguaacaacacccugcgaaauaaaagcaugcucacuaacaugccuaaaaucaaaaaacaugcucacuacaguaaaagaccuaaccaugaaaacacucaacccaacacacgacauaauagcccuaugcgaauuugaaaacauaguaacaucaaaaaaaguaauaaucccaacauacuuaagaucgaucucagucagaaacaaagaccuaaauacacucgaaaacauaacaacaacagaauuuaaaaacgcaauaacaaacgcaaaaauaauaccauacucaggacuacuccuaguaauaacaguaacagacaacaaaggagcauucaaauacauaaaaccacaaucacaauucaucguagaccucggagcauaccuagaaaaagaaucaauauacuacguaacaacaaacuggaaacacaccgccacaagauucgcaauaaaacccauggaagacuaaggacuagucccuguucccagagcccacuuuuuuuucuuuuuuugaaauaaaauagccugucuuucagaucuaaaaaaaaaaaaaaaaaaaaaaaaaaaaaaaaaaaaaaaaaaaaaaaaaaaaaaaaaaaaaaaaugcaucccccccccccccccccccccccccccccccaaaggcucuuuucagagccaccagaauu

SEQ ID NO: 9716 - RNA, 1144 nt, Artificial Sequence
  mRNA product Design a-3 comprising derived and/or modified sequence from HRSV(A2)__P0DOE7.1__M (opt11)
gggagagggcgcuuggcuugcaaggacccugagcugcggcauugaagcacacccaacccaacucgacugaagucagccucacugaaccggaucugagaaucuucucucucugggcuugccagggcucuccgaaccuagcuagcauccucuucaauuccaacuagaaagcuuaccauggaaaccuacgucaacaaacuacacgaaggcucaaccuacaccgccgccguccaauacaacguccucgaaaaagacgacgaccccgccucccuaaccaucuggguucccauguuccaaucauccaugcccgccgaccuccucauaaaagaacuagccaacgucaacauccuagucaaacaaaucagcacccccaaaggccccucccuccgcguaaugaucaacucccgcuccgccguccuagcccaaaugcccuccaaauuuacaaucugcgccaacgucucccucgacgaacgcucaaaacucgccuacgacgucaccacacccugcgaaaucaaagccugcucccucaccugccucaaaagcaaaaauaugcuaaccaccgucaaagaccuuaccaugaaaacccucaaccccacucacgacaucauagcccucugcgaauuugaaaacaucgucaccuccaaaaaagucaucauccccacauaccuccgcuccaucuccguccgcaacaaagaccucaacacccucgaaaacaucaccaccaccgaauuuaaaaacgccaucaccaacgccaaaaucauccccuacuccggccuccuccucgucaucaccguuaccgacaacaaaggcgccuucaaauacaucaaaccccaaucccaauucaucgucgaccucggagccuaccuugaaaaagaguccaucuacuacgucaccaccaacuggaaacacaccgccacccgauucgccaucaaacccauggaagacuaaggacuagucccuguucccagagcccacuuuuuuuucuuuuuuugaaauaaaauagccugucuuucagaucuaaaaaaaaaaaaaaaaaaaaaaaaaaaaaaaaaaaaaaaaaaaaaaaaaaaaaaaaaaaaaaaaugcaucccccccccccccccccccccccccccccccaaaggcucuuuucagagccaccagaauu

SEQ ID NO: 9717 - RNA, 1093 nt, Artificial Sequence
  mRNA product Design a-4 comprising derived and/or modified sequence from HRSV(A2)__P0DOE7.1__M (wt)
gggagacuccugucgggcggaaguaggaggaguagaguuuaaaaacaguacucuuuuuccgguucgggacguaguugaagcaacgacaagccggauaaccgcucuugagacaggaagcuuaccauggaaacauacgugaacaagcuucacgaaggcuccacauacacagcugcuguucaauacaaugucuuagaaaaagacgaugacccugcaucacuuacaauaugggugcccauguuccaaucaucuaugccagcagauuuacuuauaaaagaacuagcuaaugucaacauacuagugaaacaaauauccacacccaagggaccuucacuaagagucaugauaaacucaagaagugcagugcuagcacaaaugcccagcaaauuuaccauaugcgcuaauguguccuuggaugaaagaagcaaacuagcauaugauguaaccacacccugugaaaucaaggcauguagucuaacaugccuaaaaucaaaaaauauguugacuacaguuaaagaucucacuaugaagacacucaacccuacacaugauauuauugcuuuaugugaauuugaaaacauaguaacaucaaaaaaagucauaauaccaacauaccuaagauccaucagugucagaaauaaagaucugaacacacuugaaaauauaacaaccacugaauucaaaaaugcuaucacaaaugcaaaaaucaucccuuacucaggauuacuauuagucaucacagugacugacaacaaaggagcauucaaauacauaaagccacaaagucaauucauaguagaucuuggagcuuaccuagaaaaagaaaguauauauuauguuaccacaaauuggaagcacacagcuacacgauuugcaaucaaacccauggaagauuaaggacuagucccuguucccagagcccacuuuuuuuucuuuuuuugaaauaaaauagccugucuuucagaucuaaaaaaaaaaaaaaaaaaaaaaaaaaaaaaaaaaaaaaaaaaaaaaaaaaaaaaaaaaaaaaaaugcaucccccccccccccccccccccccccccccccaaaggcucuuuucagagccaccagaauu

SEQ ID NO: 9718 - RNA, 1093 nt, Artificial Sequence
  mRNA product Design a-4 comprising derived and/or modified sequence from HRSV(A2)__P0DOE7.1__M (opt1)
gggagacuccugucgggcggaaguaggaggaguagaguuuaaaaacaguacucuuuuuccgguucgggacguaguugaagcaacgacaagccggauaaccgcucuugagacaggaagcuuaccauggagaccuacgugaacaagcugcacgagggcagcaccuacacggccgccguccaguacaacgugcucgagaaggacgacgaccccgcgucccugaccaucugggugccgauguuccagagcuccaugcccgccgaccugcucaucaaggagcuggccaacgucaacauccuggugaagcagaucagcacccccaaggggcccucccuccgcgugaugaucaacagccgguccgccguccuggcccagaugccgagcaaguucaccaucugcgcgaacgugucccuggacgagcgcagcaagcucgccuacgacgugacgacccccugcgagaucaaggccugcucccugaccugccucaagagcaagaacaugcugaccacggucaaggaccugaccaugaagacccugaaccccacccacgacaucaucgcccucugcgaguucgagaacaucgugacguccaagaaggugaucauccccaccuaccugcggagcaucuccguccgcaacaaggaccugaacacccucgagaacaucaccacgaccgaguucaagaacgcgaucaccaacgccaagaucaucccguacagcggccugcugcucgugaucaccgugacggacaacaagggggccuucaaguacaucaagccccagucccaguucaucgucgaccugggcgccuaccuggagaaggagagcaucuacuacgugaccaccaacuggaagcacaccgccacgcgguucgcgaucaagcccauggaggacugaggacuagucccuguucccagagcccacuuuuuuuucuuuuuuugaaauaaaauagccugucuuucagaucuaaaaaaaaaaaaaaaaaaaaaaaaaaaaaaaaaaaaaaaaaaaaaaaaaaaaaaaaaaaaaaaaugcaucccccccccccccccccccccccccccccccaaaggcucuuuucagagccaccagaauu

SEQ ID NO: 9719 - RNA, 1093 nt, Artificial Sequence
  mRNA product Design a-4 comprising derived and/or modified sequence from HRSV(A2)__P0DOE7.1__M (opt2)
gggagacuccugucgggcggaaguaggaggaguagaguuuaaaaacaguacucuuuuuccgguucgggacguaguugaagcaacgacaagccggauaaccgcucuugagacaggaagcuuaccauggagaccuacgucaacaagcuccacgagggcuccaccuacaccgccgccguccaguacaacguccucgagaaggacgacgaccccgccucccucaccaucuggguccccauguuccaguccuccaugcccgccgaccuccucaucaaggagcucgccaacgucaacauccucgucaagcagaucuccacccccaagggccccucccuccgcgucaugaucaacucccgcuccgccguccucgcccagaugcccuccaaguucaccaucugcgccaacgucucccucgacgagcgcuccaagcucgccuacgacgucaccacccccugcgagaucaaggccugcucccucaccugccucaaguccaagaacaugcucaccaccgucaaggaccucaccaugaagacccucaaccccacccacgacaucaucgcccucugcgaguucgagaacaucgucaccuccaagaaggucaucauccccaccuaccuccgcuccaucuccguccgcaacaaggaccucaacacccucgagaacaucaccaccaccgaguucaagaacgccaucaccaacgccaagaucauccccuacuccggccuccuccucgucaucaccgucaccgacaacaagggcgccuucaaguacaucaagccccagucccaguucaucgucgaccucggcgccuaccucgagaaggaguccaucuacuacgucaccaccaacuggaagcacaccgccacccgcuucgccaucaagcccauggaggacugaggacuagucccuguucccagagcccacuuuuuuuucuuuuuuugaaauaaaauagccugucuuucagaucuaaaaaaaaaaaaaaaaaaaaaaaaaaaaaaaaaaaaaaaaaaaaaaaaaaaaaaaaaaaaaaaaugcaucccccccccccccccccccccccccccccccaaaggcucuuuucagagccaccagaauu

SEQ ID NO: 9720 - RNA, 1093 nt, Artificial Sequence
  mRNA product Design a-4 comprising derived and/or modified sequence from HRSV(A2)__P0DOE7.1__M (opt3)
gggagacuccugucgggcggaaguaggaggaguagaguuuaaaaacaguacucuuuuuccgguucgggacguaguugaagcaacgacaagccggauaaccgcucuugagacaggaagcuuaccauggagaccuacgugaacaagcugcacgaaggcagcacauauacugccgcuguccaguacaauguucucgagaaagacgaugaccccgcaucccuuacgaucugggugccuauguuccaaucuucaaugccagccgaucuguugauuaaggaauuagcgaacguaaauauacuggugaaacagaucaguaccccgaaggggcccagccuaagagucaugauuaacuccaggucugcugugcucgcccagaugccuucgaaauuuacaaucugcgcaaauguuucacuggacgagcggagcaaacuugccuaugaugugacuaccccaugugaaauuaaggcuugcagucugacauguuugaaguccaagaacaugcucaccacugucaaagaccugacaaugaagacccugaaucccacgcaugauaucauagcacucugcgaguucgagaacaucgugacuucuaaaaagguaauuaucccuaccuacuuacgcagcauuuccguucgaaauaaggaccugaacacacuugaaaauaucacuaccacagaguuuaaaaacgccauaaccaaugcuaagauuaucccauauucaggauugcugcuagugauuacggucacugauaacaaaggugccuucaaguacaucaaaccccagagucaauuuaucguggaccucggcgcguaucuggaaaaggagagcauuuacuacgugacaaccaauuggaaacacacugcaacacguuucgccauaaagccuauggaggauugaggacuagucccuguucccagagcccacuuuuuuuucuuuuuuugaaauaaaauagccugucuuucagaucuaaaaaaaaaaaaaaaaaaaaaaaaaaaaaaaaaaaaaaaaaaaaaaaaaaaaaaaaaaaaaaaaugcaucccccccccccccccccccccccccccccccaaaggcucuuuucagagccaccagaauu

SEQ ID NO: 9721 - RNA, 1093 nt, Artificial Sequence
  mRNA product Design a-4 comprising derived and/or modified sequence from HRSV(A2)__P0DOE7.1__M (opt4)
gggagacuccugucgggcggaaguaggaggaguagaguuuaaaaacaguacucuuuuuccgguucgggacguaguugaagcaacgacaagccggauaaccgcucuugagacaggaagcuuaccauggagaccuacgugaacaagcugcacgagggcagcaccuacaccgccgccgugcaguacaacgugcuggagaaggacgacgaccccgccagccugaccaucugggugcccauguuccagagcagcaugcccgccgaccugcugaucaaggagcuggccaacgugaacauccuggugaagcagaucagcacccccaagggccccagccugagagugaugaucaacagcagaagcgccgugcuggcccagaugcccagcaaguucaccaucugcgccaacgugagccuggacgagagaagcaagcuggccuacgacgugaccacccccugcgagaucaaggccugcagccugaccugccugaagagcaagaacaugcugaccaccgugaaggaccugaccaugaagacccugaaccccacccacgacaucaucgcccugugcgaguucgagaacaucgugaccagcaagaaggugaucauccccaccuaccugagaagcaucagcgugagaaacaaggaccugaacacccuggagaacaucaccaccaccgaguucaagaacgccaucaccaacgccaagaucauccccuacagcggccugcugcuggugaucaccgugaccgacaacaagggcgccuucaaguacaucaagccccagagccaguucaucguggaccugggcgccuaccuggagaaggagagcaucuacuacgugaccaccaacuggaagcacaccgccaccagauucgccaucaagcccauggaggacugaggacuagucccuguucccagagcccacuuuuuuuucuuuuuuugaaauaaaauagccugucuuucagaucuaaaaaaaaaaaaaaaaaaaaaaaaaaaaaaaaaaaaaaaaaaaaaaaaaaaaaaaaaaaaaaaaugcaucccccccccccccccccccccccccccccccaaaggcucuuuucagagccaccagaauu

SEQ ID NO: 9722 - RNA, 1093 nt, Artificial Sequence
  mRNA product Design a-4 comprising derived and/or modified sequence from HRSV(A2)__P0DOE7.1__M (opt5)
gggagacuccugucgggcggaaguaggaggaguagaguuuaaaaacaguacucuuuuuccgguucgggacguaguugaagcaacgacaagccggauaaccgcucuugagacaggaagcuuaccauggagaccuacgugaacaagcugcacgaaggcagcacauauacggccgcuguccaguacaauguucucgagaaagacgaugaccccgccucccugaccaucugggugccuauguuccaaucuagcaugccggcggaucuucugauuaaggaacucgcuaacgugaauauccuggucaaacagauuuccacacccaaggggccuucucuuagagugaugaucaacagccgguccgccguucuggcccagaugcccucuaaauuuaccauuugcgcuaaugugagccucgacgagcgcuccaagcuggccuaugaugucacaaccccuugugaaaucaaggcuugcagccugacaugucucaaaucuaagaacaugcugaccacggugaaagaccuuaccaugaagacacugaaucccacccaugauaucauugcccucugcgaguucgagaacaucguuacauccaaaaaggugauuaucccuaccuaccugagaagcauuucuguccggaauaaggaccuuaacacgcuggaaaauaucacaaccacagaguuuaaaaacgcgauuaccaaugccaagaucaucccguauuccggacuccugcuggugauuaccgugacagauaacaaaggcgcuuucaaguacaucaaaccccagagccaauuuauugucgaccucggggccuaucuggaaaaggagucuaucuacuacguuacgaccaauuggaaacacacagcuacccgcuucgccauuaagccuauggaggauugaggacuagucccuguucccagagcccacuuuuuuuucuuuuuuugaaauaaaauagccugucuuucagaucuaaaaaaaaaaaaaaaaaaaaaaaaaaaaaaaaaaaaaaaaaaaaaaaaaaaaaaaaaaaaaaaaugcaucccccccccccccccccccccccccccccccaaaggcucuuuucagagccaccagaauu

SEQ ID NO: 9723 - RNA, 1093 nt, Artificial Sequence
  mRNA product Design a-4 comprising derived and/or modified sequence from HRSV(A2)__P0DOE7.1__M (opt6)
gggagacuccugucgggcggaaguaggaggaguagaguuuaaaaacaguacucuuuuuccgguucgggacguaguugaagcaacgacaagccggauaaccgcucuugagacaggaagcuuaccauggaaacauacguaaacaaacuacacgaaggauccacauacacagcagcaguacaauacaacguacuagaaaaagacgacgacccagcaucuuuaaccauauggguaccaauguuccaaucaucaaugccagcagaccucuuaauaaaagaacuagcaaacguaaacauccuagucaaacaaauaucaacacccaaaggaccaucccucagaguaaugaucaacucaagaucagcaguacuagcacaaaugccaucaaaauucacaauaugcgccaacguuucuuuagacgaacgaucaaaauuagccuacgacguaacaacacccugcgaaauaaaagcaugcucacuaacaugccuaaaaucaaaaaacaugcucacuacaguaaaagaccuaaccaugaaaacacucaacccaacacacgacauaauagcccuaugcgaauuugaaaacauaguaacaucaaaaaaaguaauaaucccaacauacuuaagaucgaucucagucagaaacaaagaccuaaauacacucgaaaacauaacaacaacagaauuuaaaaacgcaauaacaaacgcaaaaauaauaccauacucaggacuacuccuaguaauaacaguaacagacaacaaaggagcauucaaauacauaaaaccacaaucacaauucaucguagaccucggagcauaccuagaaaaagaaucaauauacuacguaacaacaaacuggaaacacaccgccacaagauucgcaauaaaacccauggaagacuaaggacuagucccuguucccagagcccacuuuuuuuucuuuuuuugaaauaaaauagccugucuuucagaucuaaaaaaaaaaaaaaaaaaaaaaaaaaaaaaaaaaaaaaaaaaaaaaaaaaaaaaaaaaaaaaaaugcaucccccccccccccccccccccccccccccccaaaggcucuuuucagagccaccagaauu

SEQ ID NO: 9724 - RNA, 1093 nt, Artificial Sequence
  mRNA product Design a-4 comprising derived and/or modified sequence from HRSV(A2)__P0DOE7.1__M (opt11)
gggagacuccugucgggcggaaguaggaggaguagaguuuaaaaacaguacucuuuuuccgguucgggacguaguugaagcaacgacaagccggauaaccgcucuugagacaggaagcuuaccauggaaaccuacgucaacaaacuacacgaaggcucaaccuacaccgccgccguccaauacaacguccucgaaaaagacgacgaccccgccucccuaaccaucuggguucccauguuccaaucauccaugcccgccgaccuccucauaaaagaacuagccaacgucaacauccuagucaaacaaaucagcacccccaaaggccccucccuccgcguaaugaucaacucccgcuccgccguccuagcccaaaugcccuccaaauuuacaaucugcgccaacgucucccucgacgaacgcucaaaacucgccuacgacgucaccacacccugcgaaaucaaagccugcucccucaccugccucaaaagcaaaaauaugcuaaccaccgucaaagaccuuaccaugaaaacccucaaccccacucacgacaucauagcccucugcgaauuugaaaacaucgucaccuccaaaaaagucaucauccccacauaccuccgcuccaucuccguccgcaacaaagaccucaacacccucgaaaacaucaccaccaccgaauuuaaaaacgccaucaccaacgccaaaaucauccccuacuccggccuccuccucgucaucaccguuaccgacaacaaaggcgccuucaaauacaucaaaccccaaucccaauucaucgucgaccucggagccuaccuugaaaaagaguccaucuacuacgucaccaccaacuggaaacacaccgccacccgauucgccaucaaacccauggaagacuaaggacuagucccuguucccagagcccacuuuuuuuucuuuuuuugaaauaaaauagccugucuuucagaucuaaaaaaaaaaaaaaaaaaaaaaaaaaaaaaaaaaaaaaaaaaaaaaaaaaaaaaaaaaaaaaaaugcaucccccccccccccccccccccccccccccccaaaggcucuuuucagagccaccagaauu

SEQ ID NO: 9725 - RNA, 1039 nt, Artificial Sequence
  mRNA product Design a-5 comprising derived and/or modified sequence from HRSV(A2)__P0DOE7.1__M (wt)
gggagacuuucccauucuguagcagaauuugguguugccuguggucuuggucccgcggagaagcuuaccauggaaacauacgugaacaagcuucacgaaggcuccacauacacagcugcuguucaauacaaugucuuagaaaaagacgaugacccugcaucacuuacaauaugggugcccauguuccaaucaucuaugccagcagauuuacuuauaaaagaacuagcuaaugucaacauacuagugaaacaaauauccacacccaagggaccuucacuaagagucaugauaaacucaagaagugcagugcuagcacaaaugcccagcaaauuuaccauaugcgcuaauguguccuuggaugaaagaagcaaacuagcauaugauguaaccacacccugugaaaucaaggcauguagucuaacaugccuaaaaucaaaaaauauguugacuacaguuaaagaucucacuaugaagacacucaacccuacacaugauauuauugcuuuaugugaauuugaaaacauaguaacaucaaaaaaagucauaauaccaacauaccuaagauccaucagugucagaaauaaagaucugaacacacuugaaaauauaacaaccacugaauucaaaaaugcuaucacaaaugcaaaaaucaucccuuacucaggauuacuauuagucaucacagugacugacaacaaaggagcauucaaauacauaaagccacaaagucaauucauaguagaucuuggagcuuaccuagaaaaagaaaguauauauuauguuaccacaaauuggaagcacacagcuacacgauuugcaaucaaacccauggaagauuaaggacuagucccuguucccagagcccacuuuuuuuucuuuuuuugaaauaaaauagccugucuuucagaucuaaaaaaaaaaaaaaaaaaaaaaaaaaaaaaaaaaaaaaaaaaaaaaaaaaaaaaaaaaaaaaaaugcaucccccccccccccccccccccccccccccccaaaggcucuuuucagagccaccagaauu

SEQ ID NO: 9726 - RNA, 1039 nt, Artificial Sequence
  mRNA product Design a-5 comprising derived and/or modified sequence from HRSV(A2)__P0DOE7.1__M (opt1)
gggagacuuucccauucuguagcagaauuugguguugccuguggucuuggucccgcggagaagcuuaccauggagaccuacgugaacaagcugcacgagggcagcaccuacacggccgccguccaguacaacgugcucgagaaggacgacgaccccgcgucccugaccaucugggugccgauguuccagagcuccaugcccgccgaccugcucaucaaggagcuggccaacgucaacauccuggugaagcagaucagcacccccaaggggcccucccuccgcgugaugaucaacagccgguccgccguccuggcccagaugccgagcaaguucaccaucugcgcgaacgugucccuggacgagcgcagcaagcucgccuacgacgugacgacccccugcgagaucaaggccugcucccugaccugccucaagagcaagaacaugcugaccacggucaaggaccugaccaugaagacccugaaccccacccacgacaucaucgcccucugcgaguucgagaacaucgugacguccaagaaggugaucauccccaccuaccugcggagcaucuccguccgcaacaaggaccugaacacccucgagaacaucaccacgaccgaguucaagaacgcgaucaccaacgccaagaucaucccguacagcggccugcugcucgugaucaccgugacggacaacaagggggccuucaaguacaucaagccccagucccaguucaucgucgaccugggcgccuaccuggagaaggagagcaucuacuacgugaccaccaacuggaagcacaccgccacgcgguucgcgaucaagcccauggaggacugaggacuagucccuguucccagagcccacuuuuuuuucuuuuuuugaaauaaaauagccugucuuucagaucuaaaaaaaaaaaaaaaaaaaaaaaaaaaaaaaaaaaaaaaaaaaaaaaaaaaaaaaaaaaaaaaaugcaucccccccccccccccccccccccccccccccaaaggcucuuuucagagccaccagaauu

SEQ ID NO: 9727 - RNA, 1039 nt, Artificial Sequence
  mRNA product Design a-5 comprising derived and/or modified sequence from HRSV(A2)__P0DOE7.1__M (opt2)
gggagacuuucccauucuguagcagaauuugguguugccuguggucuuggucccgcggagaagcuuaccauggagaccuacgucaacaagcuccacgagggcuccaccuacaccgccgccguccaguacaacguccucgagaaggacgacgaccccgccucccucaccaucuggguccccauguuccaguccuccaugcccgccgaccuccucaucaaggagcucgccaacgucaacauccucgucaagcagaucuccacccccaagggccccucccuccgcgucaugaucaacucccgcuccgccguccucgcccagaugcccuccaaguucaccaucugcgccaacgucucccucgacgagcgcuccaagcucgccuacgacgucaccacccccugcgagaucaaggccugcucccucaccugccucaaguccaagaacaugcucaccaccgucaaggaccucaccaugaagacccucaaccccacccacgacaucaucgcccucugcgaguucgagaacaucgucaccuccaagaaggucaucauccccaccuaccuccgcuccaucuccguccgcaacaaggaccucaacacccucgagaacaucaccaccaccgaguucaagaacgccaucaccaacgccaagaucauccccuacuccggccuccuccucgucaucaccgucaccgacaacaagggcgccuucaaguacaucaagccccagucccaguucaucgucgaccucggcgccuaccucgagaaggaguccaucuacuacgucaccaccaacuggaagcacaccgccacccgcuucgccaucaagcccauggaggacugaggacuagucccuguucccagagcccacuuuuuuuucuuuuuuugaaauaaaauagccugucuuucagaucuaaaaaaaaaaaaaaaaaaaaaaaaaaaaaaaaaaaaaaaaaaaaaaaaaaaaaaaaaaaaaaaaugcaucccccccccccccccccccccccccccccccaaaggcucuuuucagagccaccagaauu

SEQ ID NO: 9728 - RNA, 1039 nt, Artificial Sequence
  mRNA product Design a-5 comprising derived and/or modified sequence from HRSV(A2)__P0DOE7.1__M (opt3)
gggagacuuucccauucuguagcagaauuugguguugccuguggucuuggucccgcggagaagcuuaccauggagaccuacgugaacaagcugcacgaaggcagcacauauacugccgcuguccaguacaauguucucgagaaagacgaugaccccgcaucccuuacgaucugggugccuauguuccaaucuucaaugccagccgaucuguugauuaaggaauuagcgaacguaaauauacuggugaaacagaucaguaccccgaaggggcccagccuaagagucaugauuaacuccaggucugcugugcucgcccagaugccuucgaaauuuacaaucugcgcaaauguuucacuggacgagcggagcaaacuugccuaugaugugacuaccccaugugaaauuaaggcuugcagucugacauguuugaaguccaagaacaugcucaccacugucaaagaccugacaaugaagacccugaaucccacgcaugauaucauagcacucugcgaguucgagaacaucgugacuucuaaaaagguaauuaucccuaccuacuuacgcagcauuuccguucgaaauaaggaccugaacacacuugaaaauaucacuaccacagaguuuaaaaacgccauaaccaaugcuaagauuaucccauauucaggauugcugcuagugauuacggucacugauaacaaaggugccuucaaguacaucaaaccccagagucaauuuaucguggaccucggcgcguaucuggaaaaggagagcauuuacuacgugacaaccaauuggaaacacacugcaacacguuucgccauaaagccuauggaggauugaggacuagucccuguucccagagcccacuuuuuuuucuuuuuuugaaauaaaauagccugucuuucagaucuaaaaaaaaaaaaaaaaaaaaaaaaaaaaaaaaaaaaaaaaaaaaaaaaaaaaaaaaaaaaaaaaugcaucccccccccccccccccccccccccccccccaaaggcucuuuucagagccaccagaauu

SEQ ID NO: 9729 - RNA, 1039 nt, Artificial Sequence
  mRNA product Design a-5 comprising derived and/or modified sequence from HRSV(A2)__P0DOE7.1__M (opt4)
gggagacuuucccauucuguagcagaauuugguguugccuguggucuuggucccgcggagaagcuuaccauggagaccuacgugaacaagcugcacgagggcagcaccuacaccgccgccgugcaguacaacgugcuggagaaggacgacgaccccgccagccugaccaucugggugcccauguuccagagcagcaugcccgccgaccugcugaucaaggagcuggccaacgugaacauccuggugaagcagaucagcacccccaagggccccagccugagagugaugaucaacagcagaagcgccgugcuggcccagaugcccagcaaguucaccaucugcgccaacgugagccuggacgagagaagcaagcuggccuacgacgugaccacccccugcgagaucaaggccugcagccugaccugccugaagagcaagaacaugcugaccaccgugaaggaccugaccaugaagacccugaaccccacccacgacaucaucgcccugugcgaguucgagaacaucgugaccagcaagaaggugaucauccccaccuaccugagaagcaucagcgugagaaacaaggaccugaacacccuggagaacaucaccaccaccgaguucaagaacgccaucaccaacgccaagaucauccccuacagcggccugcugcuggugaucaccgugaccgacaacaagggcgccuucaaguacaucaagccccagagccaguucaucguggaccugggcgccuaccuggagaaggagagcaucuacuacgugaccaccaacuggaagcacaccgccaccagauucgccaucaagcccauggaggacugaggacuagucccuguucccagagcccacuuuuuuuucuuuuuuugaaauaaaauagccugucuuucagaucuaaaaaaaaaaaaaaaaaaaaaaaaaaaaaaaaaaaaaaaaaaaaaaaaaaaaaaaaaaaaaaaaugcaucccccccccccccccccccccccccccccccaaaggcucuuuucagagccaccagaauu

SEQ ID NO: 9730 - RNA, 1039 nt, Artificial Sequence
  mRNA product Design a-5 comprising derived and/or modified sequence from HRSV(A2)__P0DOE7.1__M (opt5)
gggagacuuucccauucuguagcagaauuugguguugccuguggucuuggucccgcggagaagcuuaccauggagaccuacgugaacaagcugcacgaaggcagcacauauacggccgcuguccaguacaauguucucgagaaagacgaugaccccgccucccugaccaucugggugccuauguuccaaucuagcaugccggcggaucuucugauuaaggaacucgcuaacgugaauauccuggucaaacagauuuccacacccaaggggccuucucuuagagugaugaucaacagccgguccgccguucuggcccagaugcccucuaaauuuaccauuugcgcuaaugugagccucgacgagcgcuccaagcuggccuaugaugucacaaccccuugugaaaucaaggcuugcagccugacaugucucaaaucuaagaacaugcugaccacggugaaagaccuuaccaugaagacacugaaucccacccaugauaucauugcccucugcgaguucgagaacaucguuacauccaaaaaggugauuaucccuaccuaccugagaagcauuucuguccggaauaaggaccuuaacacgcuggaaaauaucacaaccacagaguuuaaaaacgcgauuaccaaugccaagaucaucccguauuccggacuccugcuggugauuaccgugacagauaacaaaggcgcuuucaaguacaucaaaccccagagccaauuuauugucgaccucggggccuaucuggaaaaggagucuaucuacuacguuacgaccaauuggaaacacacagcuacccgcuucgccauuaagccuauggaggauugaggacuagucccuguucccagagcccacuuuuuuuucuuuuuuugaaauaaaauagccugucuuucagaucuaaaaaaaaaaaaaaaaaaaaaaaaaaaaaaaaaaaaaaaaaaaaaaaaaaaaaaaaaaaaaaaaugcaucccccccccccccccccccccccccccccccaaaggcucuuuucagagccaccagaauu

SEQ ID NO: 9731 - RNA, 1039 nt, Artificial Sequence
  mRNA product Design a-5 comprising derived and/or modified sequence from HRSV(A2)__P0DOE7.1__M (opt6)
gggagacuuucccauucuguagcagaauuugguguugccuguggucuuggucccgcggagaagcuuaccauggaaacauacguaaacaaacuacacgaaggauccacauacacagcagcaguacaauacaacguacuagaaaaagacgacgacccagcaucuuuaaccauauggguaccaauguuccaaucaucaaugccagcagaccucuuaauaaaagaacuagcaaacguaaacauccuagucaaacaaauaucaacacccaaaggaccaucccucagaguaaugaucaacucaagaucagcaguacuagcacaaaugccaucaaaauucacaauaugcgccaacguuucuuuagacgaacgaucaaaauuagccuacgacguaacaacacccugcgaaauaaaagcaugcucacuaacaugccuaaaaucaaaaaacaugcucacuacaguaaaagaccuaaccaugaaaacacucaacccaacacacgacauaauagcccuaugcgaauuugaaaacauaguaacaucaaaaaaaguaauaaucccaacauacuuaagaucgaucucagucagaaacaaagaccuaaauacacucgaaaacauaacaacaacagaauuuaaaaacgcaauaacaaacgcaaaaauaauaccauacucaggacuacuccuaguaauaacaguaacagacaacaaaggagcauucaaauacauaaaaccacaaucacaauucaucguagaccucggagcauaccuagaaaaagaaucaauauacuacguaacaacaaacuggaaacacaccgccacaagauucgcaauaaaacccauggaagacuaaggacuagucccuguucccagagcccacuuuuuuuucuuuuuuugaaauaaaauagccugucuuucagaucuaaaaaaaaaaaaaaaaaaaaaaaaaaaaaaaaaaaaaaaaaaaaaaaaaaaaaaaaaaaaaaaaugcaucccccccccccccccccccccccccccccccaaaggcucuuuucagagccaccagaauu

SEQ ID NO: 9732 - RNA, 1039 nt, Artificial Sequence
  mRNA product Design a-5 comprising derived and/or modified sequence from HRSV(A2)__P0DOE7.1__M (opt11)
gggagacuuucccauucuguagcagaauuugguguugccuguggucuuggucccgcggagaagcuuaccauggaaaccuacgucaacaaacuacacgaaggcucaaccuacaccgccgccguccaauacaacguccucgaaaaagacgacgaccccgccucccuaaccaucuggguucccauguuccaaucauccaugcccgccgaccuccucauaaaagaacuagccaacgucaacauccuagucaaacaaaucagcacccccaaaggccccucccuccgcguaaugaucaacucccgcuccgccguccuagcccaaaugcccuccaaauuuacaaucugcgccaacgucucccucgacgaacgcucaaaacucgccuacgacgucaccacacccugcgaaaucaaagccugcucccucaccugccucaaaagcaaaaauaugcuaaccaccgucaaagaccuuaccaugaaaacccucaaccccacucacgacaucauagcccucugcgaauuugaaaacaucgucaccuccaaaaaagucaucauccccacauaccuccgcuccaucuccguccgcaacaaagaccucaacacccucgaaaacaucaccaccaccgaauuuaaaaacgccaucaccaacgccaaaaucauccccuacuccggccuccuccucgucaucaccguuaccgacaacaaaggcgccuucaaauacaucaaaccccaaucccaauucaucgucgaccucggagccuaccuugaaaaagaguccaucuacuacgucaccaccaacuggaaacacaccgccacccgauucgccaucaaacccauggaagacuaaggacuagucccuguucccagagcccacuuuuuuuucuuuuuuugaaauaaaauagccugucuuucagaucuaaaaaaaaaaaaaaaaaaaaaaaaaaaaaaaaaaaaaaaaaaaaaaaaaaaaaaaaaaaaaaaaugcaucccccccccccccccccccccccccccccccaaaggcucuuuucagagccaccagaauu

SEQ ID NO: 9733 - RNA, 1220 nt, Artificial Sequence
  mRNA product Design b-1 comprising derived and/or modified sequence from HRSV(A2)__P0DOE7.1__M (wt)
gggagacggagacggccugcaggaccugcucucucagcccucagccgaggccuacgccgagccgagugcgcagccgacgaccgggaggagccgcagccuucaacucugagguacugugauccgcgcugcccgccgggccgccccaguccgcugcugcggcaccuccuucccucgcgcccucuucgcucgccagcgccuucccugugagccugcgucaccgcggccgccaagcuuaccauggaaacauacgugaacaagcuucacgaaggcuccacauacacagcugcuguucaauacaaugucuuagaaaaagacgaugacccugcaucacuuacaauaugggugcccauguuccaaucaucuaugccagcagauuuacuuauaaaagaacuagcuaaugucaacauacuagugaaacaaauauccacacccaagggaccuucacuaagagucaugauaaacucaagaagugcagugcuagcacaaaugcccagcaaauuuaccauaugcgcuaauguguccuuggaugaaagaagcaaacuagcauaugauguaaccacacccugugaaaucaaggcauguagucuaacaugccuaaaaucaaaaaauauguugacuacaguuaaagaucucacuaugaagacacucaacccuacacaugauauuauugcuuuaugugaauuugaaaacauaguaacaucaaaaaaagucauaauaccaacauaccuaagauccaucagugucagaaauaaagaucugaacacacuugaaaauauaacaaccacugaauucaaaaaugcuaucacaaaugcaaaaaucaucccuuacucaggauuacuauuagucaucacagugacugacaacaaaggagcauucaaauacauaaagccacaaagucaauucauaguagaucuuggagcuuaccuagaaaaagaaaguauauauuauguuaccacaaauuggaagcacacagcuacacgauuugcaaucaaacccauggaagauuaaggacuaguguccaccugucccuccugggcugcuggauugucucguuuuccugccaaauaaacaggaucagcgcuuuacagaucuaaaaaaaaaaaaaaaaaaaaaaaaaaaaaaaaaaaaaaaaaaaaaaaaaaaaaaaaaaaaaaaaugcaucccccccccccccccccccccccccccccccaaaggcucuuuucagagccaccagaauu

SEQ ID NO: 9734 - RNA, 1220 nt, Artificial Sequence
  mRNA product Design b-1 comprising derived and/or modified sequence from HRSV(A2)__P0DOE7.1__M (opt1)
gggagacggagacggccugcaggaccugcucucucagcccucagccgaggccuacgccgagccgagugcgcagccgacgaccgggaggagccgcagccuucaacucugagguacugugauccgcgcugcccgccgggccgccccaguccgcugcugcggcaccuccuucccucgcgcccucuucgcucgccagcgccuucccugugagccugcgucaccgcggccgccaagcuuaccauggagaccuacgugaacaagcugcacgagggcagcaccuacacggccgccguccaguacaacgugcucgagaaggacgacgaccccgcgucccugaccaucugggugccgauguuccagagcuccaugcccgccgaccugcucaucaaggagcuggccaacgucaacauccuggugaagcagaucagcacccccaaggggcccucccuccgcgugaugaucaacagccgguccgccguccuggcccagaugccgagcaaguucaccaucugcgcgaacgugucccuggacgagcgcagcaagcucgccuacgacgugacgacccccugcgagaucaaggccugcucccugaccugccucaagagcaagaacaugcugaccacggucaaggaccugaccaugaagacccugaaccccacccacgacaucaucgcccucugcgaguucgagaacaucgugacguccaagaaggugaucauccccaccuaccugcggagcaucuccguccgcaacaaggaccugaacacccucgagaacaucaccacgaccgaguucaagaacgcgaucaccaacgccaagaucaucccguacagcggccugcugcucgugaucaccgugacggacaacaagggggccuucaaguacaucaagccccagucccaguucaucgucgaccugggcgccuaccuggagaaggagagcaucuacuacgugaccaccaacuggaagcacaccgccacgcgguucgcgaucaagcccauggaggacugaggacuaguguccaccugucccuccugggcugcuggauugucucguuuuccugccaaauaaacaggaucagcgcuuuacagaucuaaaaaaaaaaaaaaaaaaaaaaaaaaaaaaaaaaaaaaaaaaaaaaaaaaaaaaaaaaaaaaaaugcaucccccccccccccccccccccccccccccccaaaggcucuuuucagagccaccagaauu

SEQ ID NO: 9735 - RNA, 1220 nt, Artificial Sequence
  mRNA product Design b-1 comprising derived and/or modified sequence from HRSV(A2)__P0DOE7.1__M (opt2)
gggagacggagacggccugcaggaccugcucucucagcccucagccgaggccuacgccgagccgagugcgcagccgacgaccgggaggagccgcagccuucaacucugagguacugugauccgcgcugcccgccgggccgccccaguccgcugcugcggcaccuccuucccucgcgcccucuucgcucgccagcgccuucccugugagccugcgucaccgcggccgccaagcuuaccauggagaccuacgucaacaagcuccacgagggcuccaccuacaccgccgccguccaguacaacguccucgagaaggacgacgaccccgccucccucaccaucuggguccccauguuccaguccuccaugcccgccgaccuccucaucaaggagcucgccaacgucaacauccucgucaagcagaucuccacccccaagggccccucccuccgcgucaugaucaacucccgcuccgccguccucgcccagaugcccuccaaguucaccaucugcgccaacgucucccucgacgagcgcuccaagcucgccuacgacgucaccacccccugcgagaucaaggccugcucccucaccugccucaaguccaagaacaugcucaccaccgucaaggaccucaccaugaagacccucaaccccacccacgacaucaucgcccucugcgaguucgagaacaucgucaccuccaagaaggucaucauccccaccuaccuccgcuccaucuccguccgcaacaaggaccucaacacccucgagaacaucaccaccaccgaguucaagaacgccaucaccaacgccaagaucauccccuacuccggccuccuccucgucaucaccgucaccgacaacaagggcgccuucaaguacaucaagccccagucccaguucaucgucgaccucggcgccuaccucgagaaggaguccaucuacuacgucaccaccaacuggaagcacaccgccacccgcuucgccaucaagcccauggaggacugaggacuaguguccaccugucccuccugggcugcuggauugucucguuuuccugccaaauaaacaggaucagcgcuuuacagaucuaaaaaaaaaaaaaaaaaaaaaaaaaaaaaaaaaaaaaaaaaaaaaaaaaaaaaaaaaaaaaaaaugcaucccccccccccccccccccccccccccccccaaaggcucuuuucagagccaccagaauu

SEQ ID NO: 9736 - RNA, 1220 nt, Artificial Sequence
  mRNA product Design b-1 comprising derived and/or modified sequence from HRSV(A2)__P0DOE7.1__M (opt3)
gggagacggagacggccugcaggaccugcucucucagcccucagccgaggccuacgccgagccgagugcgcagccgacgaccgggaggagccgcagccuucaacucugagguacugugauccgcgcugcccgccgggccgccccaguccgcugcugcggcaccuccuucccucgcgcccucuucgcucgccagcgccuucccugugagccugcgucaccgcggccgccaagcuuaccauggagaccuacgugaacaagcugcacgaaggcagcacauauacugccgcuguccaguacaauguucucgagaaagacgaugaccccgcaucccuuacgaucugggugccuauguuccaaucuucaaugccagccgaucuguugauuaaggaauuagcgaacguaaauauacuggugaaacagaucaguaccccgaaggggcccagccuaagagucaugauuaacuccaggucugcugugcucgcccagaugccuucgaaauuuacaaucugcgcaaauguuucacuggacgagcggagcaaacuugccuaugaugugacuaccccaugugaaauuaaggcuugcagucugacauguuugaaguccaagaacaugcucaccacugucaaagaccugacaaugaagacccugaaucccacgcaugauaucauagcacucugcgaguucgagaacaucgugacuucuaaaaagguaauuaucccuaccuacuuacgcagcauuuccguucgaaauaaggaccugaacacacuugaaaauaucacuaccacagaguuuaaaaacgccauaaccaaugcuaagauuaucccauauucaggauugcugcuagugauuacggucacugauaacaaaggugccuucaaguacaucaaaccccagagucaauuuaucguggaccucggcgcguaucuggaaaaggagagcauuuacuacgugacaaccaauuggaaacacacugcaacacguuucgccauaaagccuauggaggauugaggacuaguguccaccugucccuccugggcugcuggauugucucguuuuccugccaaauaaacaggaucagcgcuuuacagaucuaaaaaaaaaaaaaaaaaaaaaaaaaaaaaaaaaaaaaaaaaaaaaaaaaaaaaaaaaaaaaaaaugcaucccccccccccccccccccccccccccccccaaaggcucuuuucagagccaccagaauu

SEQ ID NO: 9737 - RNA, 1220 nt, Artificial Sequence
  mRNA product Design b-1 comprising derived and/or modified sequence from HRSV(A2)__P0DOE7.1__M (opt4)
gggagacggagacggccugcaggaccugcucucucagcccucagccgaggccuacgccgagccgagugcgcagccgacgaccgggaggagccgcagccuucaacucugagguacugugauccgcgcugcccgccgggccgccccaguccgcugcugcggcaccuccuucccucgcgcccucuucgcucgccagcgccuucccugugagccugcgucaccgcggccgccaagcuuaccauggagaccuacgugaacaagcugcacgagggcagcaccuacaccgccgccgugcaguacaacgugcuggagaaggacgacgaccccgccagccugaccaucugggugcccauguuccagagcagcaugcccgccgaccugcugaucaaggagcuggccaacgugaacauccuggugaagcagaucagcacccccaagggccccagccugagagugaugaucaacagcagaagcgccgugcuggcccagaugcccagcaaguucaccaucugcgccaacgugagccuggacgagagaagcaagcuggccuacgacgugaccacccccugcgagaucaaggccugcagccugaccugccugaagagcaagaacaugcugaccaccgugaaggaccugaccaugaagacccugaaccccacccacgacaucaucgcccugugcgaguucgagaacaucgugaccagcaagaaggugaucauccccaccuaccugagaagcaucagcgugagaaacaaggaccugaacacccuggagaacaucaccaccaccgaguucaagaacgccaucaccaacgccaagaucauccccuacagcggccugcugcuggugaucaccgugaccgacaacaagggcgccuucaaguacaucaagccccagagccaguucaucguggaccugggcgccuaccuggagaaggagagcaucuacuacgugaccaccaacuggaagcacaccgccaccagauucgccaucaagcccauggaggacugaggacuaguguccaccugucccuccugggcugcuggauugucucguuuuccugccaaauaaacaggaucagcgcuuuacagaucuaaaaaaaaaaaaaaaaaaaaaaaaaaaaaaaaaaaaaaaaaaaaaaaaaaaaaaaaaaaaaaaaugcaucccccccccccccccccccccccccccccccaaaggcucuuuucagagccaccagaauu

SEQ ID NO: 9738 - RNA, 1220 nt, Artificial Sequence
  mRNA product Design b-1 comprising derived and/or modified sequence from HRSV(A2)__P0DOE7.1__M (opt5)
gggagacggagacggccugcaggaccugcucucucagcccucagccgaggccuacgccgagccgagugcgcagccgacgaccgggaggagccgcagccuucaacucugagguacugugauccgcgcugcccgccgggccgccccaguccgcugcugcggcaccuccuucccucgcgcccucuucgcucgccagcgccuucccugugagccugcgucaccgcggccgccaagcuuaccauggagaccuacgugaacaagcugcacgaaggcagcacauauacggccgcuguccaguacaauguucucgagaaagacgaugaccccgccucccugaccaucugggugccuauguuccaaucuagcaugccggcggaucuucugauuaaggaacucgcuaacgugaauauccuggucaaacagauuuccacacccaaggggccuucucuuagagugaugaucaacagccgguccgccguucuggcccagaugcccucuaaauuuaccauuugcgcuaaugugagccucgacgagcgcuccaagcuggccuaugaugucacaaccccuugugaaaucaaggcuugcagccugacaugucucaaaucuaagaacaugcugaccacggugaaagaccuuaccaugaagacacugaaucccacccaugauaucauugcccucugcgaguucgagaacaucguuacauccaaaaaggugauuaucccuaccuaccugagaagcauuucuguccggaauaaggaccuuaacacgcuggaaaauaucacaaccacagaguuuaaaaacgcgauuaccaaugccaagaucaucccguauuccggacuccugcuggugauuaccgugacagauaacaaaggcgcuuucaaguacaucaaaccccagagccaauuuauugucgaccucggggccuaucuggaaaaggagucuaucuacuacguuacgaccaauuggaaacacacagcuacccgcuucgccauuaagccuauggaggauugaggacuaguguccaccugucccuccugggcugcuggauugucucguuuuccugccaaauaaacaggaucagcgcuuuacagaucuaaaaaaaaaaaaaaaaaaaaaaaaaaaaaaaaaaaaaaaaaaaaaaaaaaaaaaaaaaaaaaaaugcaucccccccccccccccccccccccccccccccaaaggcucuuuucagagccaccagaauu

SEQ ID NO: 9739 - RNA, 1220 nt, Artificial Sequence
  mRNA product Design b-1 comprising derived and/or modified sequence from HRSV(A2)__P0DOE7.1__M (opt6)
gggagacggagacggccugcaggaccugcucucucagcccucagccgaggccuacgccgagccgagugcgcagccgacgaccgggaggagccgcagccuucaacucugagguacugugauccgcgcugcccgccgggccgccccaguccgcugcugcggcaccuccuucccucgcgcccucuucgcucgccagcgccuucccugugagccugcgucaccgcggccgccaagcuuaccauggaaacauacguaaacaaacuacacgaaggauccacauacacagcagcaguacaauacaacguacuagaaaaagacgacgacccagcaucuuuaaccauauggguaccaauguuccaaucaucaaugccagcagaccucuuaauaaaagaacuagcaaacguaaacauccuagucaaacaaauaucaacacccaaaggaccaucccucagaguaaugaucaacucaagaucagcaguacuagcacaaaugccaucaaaauucacaauaugcgccaacguuucuuuagacgaacgaucaaaauuagccuacgacguaacaacacccugcgaaauaaaagcaugcucacuaacaugccuaaaaucaaaaaacaugcucacuacaguaaaagaccuaaccaugaaaacacucaacccaacacacgacauaauagcccuaugcgaauuugaaaacauaguaacaucaaaaaaaguaauaaucccaacauacuuaagaucgaucucagucagaaacaaagaccuaaauacacucgaaaacauaacaacaacagaauuuaaaaacgcaauaacaaacgcaaaaauaauaccauacucaggacuacuccuaguaauaacaguaacagacaacaaaggagcauucaaauacauaaaaccacaaucacaauucaucguagaccucggagcauaccuagaaaaagaaucaauauacuacguaacaacaaacuggaaacacaccgccacaagauucgcaauaaaacccauggaagacuaaggacuaguguccaccugucccuccugggcugcuggauugucucguuuuccugccaaauaaacaggaucagcgcuuuacagaucuaaaaaaaaaaaaaaaaaaaaaaaaaaaaaaaaaaaaaaaaaaaaaaaaaaaaaaaaaaaaaaaaugcaucccccccccccccccccccccccccccccccaaaggcucuuuucagagccaccagaauu

SEQ ID NO: 9740 - RNA, 1220 nt, Artificial Sequence
  mRNA product Design b-1 comprising derived and/or modified sequence from HRSV(A2)__P0DOE7.1__M (opt11)
gggagacggagacggccugcaggaccugcucucucagcccucagccgaggccuacgccgagccgagugcgcagccgacgaccgggaggagccgcagccuucaacucugagguacugugauccgcgcugcccgccgggccgccccaguccgcugcugcggcaccuccuucccucgcgcccucuucgcucgccagcgccuucccugugagccugcgucaccgcggccgccaagcuuaccauggaaaccuacgucaacaaacuacacgaaggcucaaccuacaccgccgccguccaauacaacguccucgaaaaagacgacgaccccgccucccuaaccaucuggguucccauguuccaaucauccaugcccgccgaccuccucauaaaagaacuagccaacgucaacauccuagucaaacaaaucagcacccccaaaggccccucccuccgcguaaugaucaacucccgcuccgccguccuagcccaaaugcccuccaaauuuacaaucugcgccaacgucucccucgacgaacgcucaaaacucgccuacgacgucaccacacccugcgaaaucaaagccugcucccucaccugccucaaaagcaaaaauaugcuaaccaccgucaaagaccuuaccaugaaaacccucaaccccacucacgacaucauagcccucugcgaauuugaaaacaucgucaccuccaaaaaagucaucauccccacauaccuccgcuccaucuccguccgcaacaaagaccucaacacccucgaaaacaucaccaccaccgaauuuaaaaacgccaucaccaacgccaaaaucauccccuacuccggccuccuccucgucaucaccguuaccgacaacaaaggcgccuucaaauacaucaaaccccaaucccaauucaucgucgaccucggagccuaccuugaaaaagaguccaucuacuacgucaccaccaacuggaaacacaccgccacccgauucgccaucaaacccauggaagacuaaggacuaguguccaccugucccuccugggcugcuggauugucucguuuuccugccaaauaaacaggaucagcgcuuuacagaucuaaaaaaaaaaaaaaaaaaaaaaaaaaaaaaaaaaaaaaaaaaaaaaaaaaaaaaaaaaaaaaaaugcaucccccccccccccccccccccccccccccccaaaggcucuuuucagagccaccagaauu

SEQ ID NO: 9741 - RNA, 1040 nt, Artificial Sequence
  mRNA product Design b-2 comprising derived and/or modified sequence from HRSV(A2)__P0DOE7.1__M (wt)
gggagagccucugcuggaguccggggaguggcguuggcugcuagagcgaagcuuaccauggaaacauacgugaacaagcuucacgaaggcuccacauacacagcugcuguucaauacaaugucuuagaaaaagacgaugacccugcaucacuuacaauaugggugcccauguuccaaucaucuaugccagcagauuuacuuauaaaagaacuagcuaaugucaacauacuagugaaacaaauauccacacccaagggaccuucacuaagagucaugauaaacucaagaagugcagugcuagcacaaaugcccagcaaauuuaccauaugcgcuaauguguccuuggaugaaagaagcaaacuagcauaugauguaaccacacccugugaaaucaaggcauguagucuaacaugccuaaaaucaaaaaauauguugacuacaguuaaagaucucacuaugaagacacucaacccuacacaugauauuauugcuuuaugugaauuugaaaacauaguaacaucaaaaaaagucauaauaccaacauaccuaagauccaucagugucagaaauaaagaucugaacacacuugaaaauauaacaaccacugaauucaaaaaugcuaucacaaaugcaaaaaucaucccuuacucaggauuacuauuagucaucacagugacugacaacaaaggagcauucaaauacauaaagccacaaagucaauucauaguagaucuuggagcuuaccuagaaaaagaaaguauauauuauguuaccacaaauuggaagcacacagcuacacgauuugcaaucaaacccauggaagauuaaggacuaguguccaccugucccuccugggcugcuggauugucucguuuuccugccaaauaaacaggaucagcgcuuuacagaucuaaaaaaaaaaaaaaaaaaaaaaaaaaaaaaaaaaaaaaaaaaaaaaaaaaaaaaaaaaaaaaaaugcaucccccccccccccccccccccccccccccccaaaggcucuuuucagagccaccagaauu

SEQ ID NO: 9742 - RNA, 1040 nt, Artificial Sequence
  mRNA product Design b-2 comprising derived and/or modified sequence from HRSV(A2)__P0DOE7.1__M (opt1)
gggagagccucugcuggaguccggggaguggcguuggcugcuagagcgaagcuuaccauggagaccuacgugaacaagcugcacgagggcagcaccuacacggccgccguccaguacaacgugcucgagaaggacgacgaccccgcgucccugaccaucugggugccgauguuccagagcuccaugcccgccgaccugcucaucaaggagcuggccaacgucaacauccuggugaagcagaucagcacccccaaggggcccucccuccgcgugaugaucaacagccgguccgccguccuggcccagaugccgagcaaguucaccaucugcgcgaacgugucccuggacgagcgcagcaagcucgccuacgacgugacgacccccugcgagaucaaggccugcucccugaccugccucaagagcaagaacaugcugaccacggucaaggaccugaccaugaagacccugaaccccacccacgacaucaucgcccucugcgaguucgagaacaucgugacguccaagaaggugaucauccccaccuaccugcggagcaucuccguccgcaacaaggaccugaacacccucgagaacaucaccacgaccgaguucaagaacgcgaucaccaacgccaagaucaucccguacagcggccugcugcucgugaucaccgugacggacaacaagggggccuucaaguacaucaagccccagucccaguucaucgucgaccugggcgccuaccuggagaaggagagcaucuacuacgugaccaccaacuggaagcacaccgccacgcgguucgcgaucaagcccauggaggacugaggacuaguguccaccugucccuccugggcugcuggauugucucguuuuccugccaaauaaacaggaucagcgcuuuacagaucuaaaaaaaaaaaaaaaaaaaaaaaaaaaaaaaaaaaaaaaaaaaaaaaaaaaaaaaaaaaaaaaaugcaucccccccccccccccccccccccccccccccaaaggcucuuuucagagccaccagaauu

SEQ ID NO: 9743 - RNA, 1040 nt, Artificial Sequence
  mRNA product Design b-2 comprising derived and/or modified sequence from HRSV(A2)__P0DOE7.1__M (opt2)
gggagagccucugcuggaguccggggaguggcguuggcugcuagagcgaagcuuaccauggagaccuacgucaacaagcuccacgagggcuccaccuacaccgccgccguccaguacaacguccucgagaaggacgacgaccccgccucccucaccaucuggguccccauguuccaguccuccaugcccgccgaccuccucaucaaggagcucgccaacgucaacauccucgucaagcagaucuccacccccaagggccccucccuccgcgucaugaucaacucccgcuccgccguccucgcccagaugcccuccaaguucaccaucugcgccaacgucucccucgacgagcgcuccaagcucgccuacgacgucaccacccccugcgagaucaaggccugcucccucaccugccucaaguccaagaacaugcucaccaccgucaaggaccucaccaugaagacccucaaccccacccacgacaucaucgcccucugcgaguucgagaacaucgucaccuccaagaaggucaucauccccaccuaccuccgcuccaucuccguccgcaacaaggaccucaacacccucgagaacaucaccaccaccgaguucaagaacgccaucaccaacgccaagaucauccccuacuccggccuccuccucgucaucaccgucaccgacaacaagggcgccuucaaguacaucaagccccagucccaguucaucgucgaccucggcgccuaccucgagaaggaguccaucuacuacgucaccaccaacuggaagcacaccgccacccgcuucgccaucaagcccauggaggacugaggacuaguguccaccugucccuccugggcugcuggauugucucguuuuccugccaaauaaacaggaucagcgcuuuacagaucuaaaaaaaaaaaaaaaaaaaaaaaaaaaaaaaaaaaaaaaaaaaaaaaaaaaaaaaaaaaaaaaaugcaucccccccccccccccccccccccccccccccaaaggcucuuuucagagccaccagaauu

SEQ ID NO: 9744 - RNA, 1040 nt, Artificial Sequence
  mRNA product Design b-2 comprising derived and/or modified sequence from HRSV(A2)__P0DOE7.1__M (opt3)
gggagagccucugcuggaguccggggaguggcguuggcugcuagagcgaagcuuaccauggagaccuacgugaacaagcugcacgaaggcagcacauauacugccgcuguccaguacaauguucucgagaaagacgaugaccccgcaucccuuacgaucugggugccuauguuccaaucuucaaugccagccgaucuguugauuaaggaauuagcgaacguaaauauacuggugaaacagaucaguaccccgaaggggcccagccuaagagucaugauuaacuccaggucugcugugcucgcccagaugccuucgaaauuuacaaucugcgcaaauguuucacuggacgagcggagcaaacuugccuaugaugugacuaccccaugugaaauuaaggcuugcagucugacauguuugaaguccaagaacaugcucaccacugucaaagaccugacaaugaagacccugaaucccacgcaugauaucauagcacucugcgaguucgagaacaucgugacuucuaaaaagguaauuaucccuaccuacuuacgcagcauuuccguucgaaauaaggaccugaacacacuugaaaauaucacuaccacagaguuuaaaaacgccauaaccaaugcuaagauuaucccauauucaggauugcugcuagugauuacggucacugauaacaaaggugccuucaaguacaucaaaccccagagucaauuuaucguggaccucggcgcguaucuggaaaaggagagcauuuacuacgugacaaccaauuggaaacacacugcaacacguuucgccauaaagccuauggaggauugaggacuaguguccaccugucccuccugggcugcuggauugucucguuuuccugccaaauaaacaggaucagcgcuuuacagaucuaaaaaaaaaaaaaaaaaaaaaaaaaaaaaaaaaaaaaaaaaaaaaaaaaaaaaaaaaaaaaaaaugcaucccccccccccccccccccccccccccccccaaaggcucuuuucagagccaccagaauu

SEQ ID NO: 9745 - RNA, 1040 nt, Artificial Sequence
  mRNA product Design b-2 comprising derived and/or modified sequence from HRSV(A2)__P0DOE7.1__M (opt4)
gggagagccucugcuggaguccggggaguggcguuggcugcuagagcgaagcuuaccauggagaccuacgugaacaagcugcacgagggcagcaccuacaccgccgccgugcaguacaacgugcuggagaaggacgacgaccccgccagccugaccaucugggugcccauguuccagagcagcaugcccgccgaccugcugaucaaggagcuggccaacgugaacauccuggugaagcagaucagcacccccaagggccccagccugagagugaugaucaacagcagaagcgccgugcuggcccagaugcccagcaaguucaccaucugcgccaacgugagccuggacgagagaagcaagcuggccuacgacgugaccacccccugcgagaucaaggccugcagccugaccugccugaagagcaagaacaugcugaccaccgugaaggaccugaccaugaagacccugaaccccacccacgacaucaucgcccugugcgaguucgagaacaucgugaccagcaagaaggugaucauccccaccuaccugagaagcaucagcgugagaaacaaggaccugaacacccuggagaacaucaccaccaccgaguucaagaacgccaucaccaacgccaagaucauccccuacagcggccugcugcuggugaucaccgugaccgacaacaagggcgccuucaaguacaucaagccccagagccaguucaucguggaccugggcgccuaccuggagaaggagagcaucuacuacgugaccaccaacuggaagcacaccgccaccagauucgccaucaagcccauggaggacugaggacuaguguccaccugucccuccugggcugcuggauugucucguuuuccugccaaauaaacaggaucagcgcuuuacagaucuaaaaaaaaaaaaaaaaaaaaaaaaaaaaaaaaaaaaaaaaaaaaaaaaaaaaaaaaaaaaaaaaugcaucccccccccccccccccccccccccccccccaaaggcucuuuucagagccaccagaauu

SEQ ID NO: 9746 - RNA, 1040 nt, Artificial Sequence
  mRNA product Design b-2 comprising derived and/or modified sequence from HRSV(A2)__P0DOE7.1__M (opt5)
gggagagccucugcuggaguccggggaguggcguuggcugcuagagcgaagcuuaccauggagaccuacgugaacaagcugcacgaaggcagcacauauacggccgcuguccaguacaauguucucgagaaagacgaugaccccgccucccugaccaucugggugccuauguuccaaucuagcaugccggcggaucuucugauuaaggaacucgcuaacgugaauauccuggucaaacagauuuccacacccaaggggccuucucuuagagugaugaucaacagccgguccgccguucuggcccagaugcccucuaaauuuaccauuugcgcuaaugugagccucgacgagcgcuccaagcuggccuaugaugucacaaccccuugugaaaucaaggcuugcagccugacaugucucaaaucuaagaacaugcugaccacggugaaagaccuuaccaugaagacacugaaucccacccaugauaucauugcccucugcgaguucgagaacaucguuacauccaaaaaggugauuaucccuaccuaccugagaagcauuucuguccggaauaaggaccuuaacacgcuggaaaauaucacaaccacagaguuuaaaaacgcgauuaccaaugccaagaucaucccguauuccggacuccugcuggugauuaccgugacagauaacaaaggcgcuuucaaguacaucaaaccccagagccaauuuauugucgaccucggggccuaucuggaaaaggagucuaucuacuacguuacgaccaauuggaaacacacagcuacccgcuucgccauuaagccuauggaggauugaggacuaguguccaccugucccuccugggcugcuggauugucucguuuuccugccaaauaaacaggaucagcgcuuuacagaucuaaaaaaaaaaaaaaaaaaaaaaaaaaaaaaaaaaaaaaaaaaaaaaaaaaaaaaaaaaaaaaaaugcaucccccccccccccccccccccccccccccccaaaggcucuuuucagagccaccagaauu

SEQ ID NO: 9747 - RNA, 1040 nt, Artificial Sequence
  mRNA product Design b-2 comprising derived and/or modified sequence from HRSV(A2)__P0DOE7.1__M (opt6)
gggagagccucugcuggaguccggggaguggcguuggcugcuagagcgaagcuuaccauggaaacauacguaaacaaacuacacgaaggauccacauacacagcagcaguacaauacaacguacuagaaaaagacgacgacccagcaucuuuaaccauauggguaccaauguuccaaucaucaaugccagcagaccucuuaauaaaagaacuagcaaacguaaacauccuagucaaacaaauaucaacacccaaaggaccaucccucagaguaaugaucaacucaagaucagcaguacuagcacaaaugccaucaaaauucacaauaugcgccaacguuucuuuagacgaacgaucaaaauuagccuacgacguaacaacacccugcgaaauaaaagcaugcucacuaacaugccuaaaaucaaaaaacaugcucacuacaguaaaagaccuaaccaugaaaacacucaacccaacacacgacauaauagcccuaugcgaauuugaaaacauaguaacaucaaaaaaaguaauaaucccaacauacuuaagaucgaucucagucagaaacaaagaccuaaauacacucgaaaacauaacaacaacagaauuuaaaaacgcaauaacaaacgcaaaaauaauaccauacucaggacuacuccuaguaauaacaguaacagacaacaaaggagcauucaaauacauaaaaccacaaucacaauucaucguagaccucggagcauaccuagaaaaagaaucaauauacuacguaacaacaaacuggaaacacaccgccacaagauucgcaauaaaacccauggaagacuaaggacuaguguccaccugucccuccugggcugcuggauugucucguuuuccugccaaauaaacaggaucagcgcuuuacagaucuaaaaaaaaaaaaaaaaaaaaaaaaaaaaaaaaaaaaaaaaaaaaaaaaaaaaaaaaaaaaaaaaugcaucccccccccccccccccccccccccccccccaaaggcucuuuucagagccaccagaauu

SEQ ID NO: 9748 - RNA, 1040 nt, Artificial Sequence
  mRNA product Design b-2 comprising derived and/or modified sequence from HRSV(A2)__P0DOE7.1__M (opt11)
gggagagccucugcuggaguccggggaguggcguuggcugcuagagcgaagcuuaccauggaaaccuacgucaacaaacuacacgaaggcucaaccuacaccgccgccguccaauacaacguccucgaaaaagacgacgaccccgccucccuaaccaucuggguucccauguuccaaucauccaugcccgccgaccuccucauaaaagaacuagccaacgucaacauccuagucaaacaaaucagcacccccaaaggccccucccuccgcguaaugaucaacucccgcuccgccguccuagcccaaaugcccuccaaauuuacaaucugcgccaacgucucccucgacgaacgcucaaaacucgccuacgacgucaccacacccugcgaaaucaaagccugcucccucaccugccucaaaagcaaaaauaugcuaaccaccgucaaagaccuuaccaugaaaacccucaaccccacucacgacaucauagcccucugcgaauuugaaaacaucgucaccuccaaaaaagucaucauccccacauaccuccgcuccaucuccguccgcaacaaagaccucaacacccucgaaaacaucaccaccaccgaauuuaaaaacgccaucaccaacgccaaaaucauccccuacuccggccuccuccucgucaucaccguuaccgacaacaaaggcgccuucaaauacaucaaaccccaaucccaauucaucgucgaccucggagccuaccuugaaaaagaguccaucuacuacgucaccaccaacuggaaacacaccgccacccgauucgccaucaaacccauggaagacuaaggacuaguguccaccugucccuccugggcugcuggauugucucguuuuccugccaaauaaacaggaucagcgcuuuacagaucuaaaaaaaaaaaaaaaaaaaaaaaaaaaaaaaaaaaaaaaaaaaaaaaaaaaaaaaaaaaaaaaaugcaucccccccccccccccccccccccccccccccaaaggcucuuuucagagccaccagaauu

SEQ ID NO: 9749 - RNA, 1060 nt, Artificial Sequence
  mRNA product Design b-3 comprising derived and/or modified sequence from HRSV(A2)__P0DOE7.1__M (wt)
gggagagucccgcagucggcguccagcggcucugcuuguucgugugugugucguugcaggccuuauucaagcuuaccauggaaacauacgugaacaagcuucacgaaggcuccacauacacagcugcuguucaauacaaugucuuagaaaaagacgaugacccugcaucacuuacaauaugggugcccauguuccaaucaucuaugccagcagauuuacuuauaaaagaacuagcuaaugucaacauacuagugaaacaaauauccacacccaagggaccuucacuaagagucaugauaaacucaagaagugcagugcuagcacaaaugcccagcaaauuuaccauaugcgcuaauguguccuuggaugaaagaagcaaacuagcauaugauguaaccacacccugugaaaucaaggcauguagucuaacaugccuaaaaucaaaaaauauguugacuacaguuaaagaucucacuaugaagacacucaacccuacacaugauauuauugcuuuaugugaauuugaaaacauaguaacaucaaaaaaagucauaauaccaacauaccuaagauccaucagugucagaaauaaagaucugaacacacuugaaaauauaacaaccacugaauucaaaaaugcuaucacaaaugcaaaaaucaucccuuacucaggauuacuauuagucaucacagugacugacaacaaaggagcauucaaauacauaaagccacaaagucaauucauaguagaucuuggagcuuaccuagaaaaagaaaguauauauuauguuaccacaaauuggaagcacacagcuacacgauuugcaaucaaacccauggaagauuaaggacuaguguccaccugucccuccugggcugcuggauugucucguuuuccugccaaauaaacaggaucagcgcuuuacagaucuaaaaaaaaaaaaaaaaaaaaaaaaaaaaaaaaaaaaaaaaaaaaaaaaaaaaaaaaaaaaaaaaugcaucccccccccccccccccccccccccccccccaaaggcucuuuucagagccaccagaauu

SEQ ID NO: 9750 - RNA, 1060 nt, Artificial Sequence
  mRNA product Design b-3 comprising derived and/or modified sequence from HRSV(A2)__P0DOE7.1__M (opt1)
gggagagucccgcagucggcguccagcggcucugcuuguucgugugugugucguugcaggccuuauucaagcuuaccauggagaccuacgugaacaagcugcacgagggcagcaccuacacggccgccguccaguacaacgugcucgagaaggacgacgaccccgcgucccugaccaucugggugccgauguuccagagcuccaugcccgccgaccugcucaucaaggagcuggccaacgucaacauccuggugaagcagaucagcacccccaaggggcccucccuccgcgugaugaucaacagccgguccgccguccuggcccagaugccgagcaaguucaccaucugcgcgaacgugucccuggacgagcgcagcaagcucgccuacgacgugacgacccccugcgagaucaaggccugcucccugaccugccucaagagcaagaacaugcugaccacggucaaggaccugaccaugaagacccugaaccccacccacgacaucaucgcccucugcgaguucgagaacaucgugacguccaagaaggugaucauccccaccuaccugcggagcaucuccguccgcaacaaggaccugaacacccucgagaacaucaccacgaccgaguucaagaacgcgaucaccaacgccaagaucaucccguacagcggccugcugcucgugaucaccgugacggacaacaagggggccuucaaguacaucaagccccagucccaguucaucgucgaccugggcgccuaccuggagaaggagagcaucuacuacgugaccaccaacuggaagcacaccgccacgcgguucgcgaucaagcccauggaggacugaggacuaguguccaccugucccuccugggcugcuggauugucucguuuuccugccaaauaaacaggaucagcgcuuuacagaucuaaaaaaaaaaaaaaaaaaaaaaaaaaaaaaaaaaaaaaaaaaaaaaaaaaaaaaaaaaaaaaaaugcaucccccccccccccccccccccccccccccccaaaggcucuuuucagagccaccagaauu

SEQ ID NO: 9751 - RNA, 1060 nt, Artificial Sequence
  mRNA product Design b-3 comprising derived and/or modified sequence from HRSV(A2)__P0DOE7.1__M (opt2)
gggagagucccgcagucggcguccagcggcucugcuuguucgugugugugucguugcaggccuuauucaagcuuaccauggagaccuacgucaacaagcuccacgagggcuccaccuacaccgccgccguccaguacaacguccucgagaaggacgacgaccccgccucccucaccaucuggguccccauguuccaguccuccaugcccgccgaccuccucaucaaggagcucgccaacgucaacauccucgucaagcagaucuccacccccaagggccccucccuccgcgucaugaucaacucccgcuccgccguccucgcccagaugcccuccaaguucaccaucugcgccaacgucucccucgacgagcgcuccaagcucgccuacgacgucaccacccccugcgagaucaaggccugcucccucaccugccucaaguccaagaacaugcucaccaccgucaaggaccucaccaugaagacccucaaccccacccacgacaucaucgcccucugcgaguucgagaacaucgucaccuccaagaaggucaucauccccaccuaccuccgcuccaucuccguccgcaacaaggaccucaacacccucgagaacaucaccaccaccgaguucaagaacgccaucaccaacgccaagaucauccccuacuccggccuccuccucgucaucaccgucaccgacaacaagggcgccuucaaguacaucaagccccagucccaguucaucgucgaccucggcgccuaccucgagaaggaguccaucuacuacgucaccaccaacuggaagcacaccgccacccgcuucgccaucaagcccauggaggacugaggacuaguguccaccugucccuccugggcugcuggauugucucguuuuccugccaaauaaacaggaucagcgcuuuacagaucuaaaaaaaaaaaaaaaaaaaaaaaaaaaaaaaaaaaaaaaaaaaaaaaaaaaaaaaaaaaaaaaaugcaucccccccccccccccccccccccccccccccaaaggcucuuuucagagccaccagaauu

SEQ ID NO: 9752 - RNA, 1060 nt, Artificial Sequence
  mRNA product Design b-3 comprising derived and/or modified sequence from HRSV(A2)__P0DOE7.1__M (opt3)
gggagagucccgcagucggcguccagcggcucugcuuguucgugugugugucguugcaggccuuauucaagcuuaccauggagaccuacgugaacaagcugcacgaaggcagcacauauacugccgcuguccaguacaauguucucgagaaagacgaugaccccgcaucccuuacgaucugggugccuauguuccaaucuucaaugccagccgaucuguugauuaaggaauuagcgaacguaaauauacuggugaaacagaucaguaccccgaaggggcccagccuaagagucaugauuaacuccaggucugcugugcucgcccagaugccuucgaaauuuacaaucugcgcaaauguuucacuggacgagcggagcaaacuugccuaugaugugacuaccccaugugaaauuaaggcuugcagucugacauguuugaaguccaagaacaugcucaccacugucaaagaccugacaaugaagacccugaaucccacgcaugauaucauagcacucugcgaguucgagaacaucgugacuucuaaaaagguaauuaucccuaccuacuuacgcagcauuuccguucgaaauaaggaccugaacacacuugaaaauaucacuaccacagaguuuaaaaacgccauaaccaaugcuaagauuaucccauauucaggauugcugcuagugauuacggucacugauaacaaaggugccuucaaguacaucaaaccccagagucaauuuaucguggaccucggcgcguaucuggaaaaggagagcauuuacuacgugacaaccaauuggaaacacacugcaacacguuucgccauaaagccuauggaggauugaggacuaguguccaccugucccuccugggcugcuggauugucucguuuuccugccaaauaaacaggaucagcgcuuuacagaucuaaaaaaaaaaaaaaaaaaaaaaaaaaaaaaaaaaaaaaaaaaaaaaaaaaaaaaaaaaaaaaaaugcaucccccccccccccccccccccccccccccccaaaggcucuuuucagagccaccagaauu

SEQ ID NO: 9753 - RNA, 1060 nt, Artificial Sequence
  mRNA product Design b-3 comprising derived and/or modified sequence from HRSV(A2)__P0DOE7.1__M (opt4)
gggagagucccgcagucggcguccagcggcucugcuuguucgugugugugucguugcaggccuuauucaagcuuaccauggagaccuacgugaacaagcugcacgagggcagcaccuacaccgccgccgugcaguacaacgugcuggagaaggacgacgaccccgccagccugaccaucugggugcccauguuccagagcagcaugcccgccgaccugcugaucaaggagcuggccaacgugaacauccuggugaagcagaucagcacccccaagggccccagccugagagugaugaucaacagcagaagcgccgugcuggcccagaugcccagcaaguucaccaucugcgccaacgugagccuggacgagagaagcaagcuggccuacgacgugaccacccccugcgagaucaaggccugcagccugaccugccugaagagcaagaacaugcugaccaccgugaaggaccugaccaugaagacccugaaccccacccacgacaucaucgcccugugcgaguucgagaacaucgugaccagcaagaaggugaucauccccaccuaccugagaagcaucagcgugagaaacaaggaccugaacacccuggagaacaucaccaccaccgaguucaagaacgccaucaccaacgccaagaucauccccuacagcggccugcugcuggugaucaccgugaccgacaacaagggcgccuucaaguacaucaagccccagagccaguucaucguggaccugggcgccuaccuggagaaggagagcaucuacuacgugaccaccaacuggaagcacaccgccaccagauucgccaucaagcccauggaggacugaggacuaguguccaccugucccuccugggcugcuggauugucucguuuuccugccaaauaaacaggaucagcgcuuuacagaucuaaaaaaaaaaaaaaaaaaaaaaaaaaaaaaaaaaaaaaaaaaaaaaaaaaaaaaaaaaaaaaaaugcaucccccccccccccccccccccccccccccccaaaggcucuuuucagagccaccagaauu

SEQ ID NO: 9754 - RNA, 1060 nt, Artificial Sequence
  mRNA product Design b-3 comprising derived and/or modified sequence from HRSV(A2)__P0DOE7.1__M (opt5)
gggagagucccgcagucggcguccagcggcucugcuuguucgugugugugucguugcaggccuuauucaagcuuaccauggagaccuacgugaacaagcugcacgaaggcagcacauauacggccgcuguccaguacaauguucucgagaaagacgaugaccccgccucccugaccaucugggugccuauguuccaaucuagcaugccggcggaucuucugauuaaggaacucgcuaacgugaauauccuggucaaacagauuuccacacccaaggggccuucucuuagagugaugaucaacagccgguccgccguucuggcccagaugcccucuaaauuuaccauuugcgcuaaugugagccucgacgagcgcuccaagcuggccuaugaugucacaaccccuugugaaaucaaggcuugcagccugacaugucucaaaucuaagaacaugcugaccacggugaaagaccuuaccaugaagacacugaaucccacccaugauaucauugcccucugcgaguucgagaacaucguuacauccaaaaaggugauuaucccuaccuaccugagaagcauuucuguccggaauaaggaccuuaacacgcuggaaaauaucacaaccacagaguuuaaaaacgcgauuaccaaugccaagaucaucccguauuccggacuccugcuggugauuaccgugacagauaacaaaggcgcuuucaaguacaucaaaccccagagccaauuuauugucgaccucggggccuaucuggaaaaggagucuaucuacuacguuacgaccaauuggaaacacacagcuacccgcuucgccauuaagccuauggaggauugaggacuaguguccaccugucccuccugggcugcuggauugucucguuuuccugccaaauaaacaggaucagcgcuuuacagaucuaaaaaaaaaaaaaaaaaaaaaaaaaaaaaaaaaaaaaaaaaaaaaaaaaaaaaaaaaaaaaaaaugcaucccccccccccccccccccccccccccccccaaaggcucuuuucagagccaccagaauu

SEQ ID NO: 9755 - RNA, 1060 nt, Artificial Sequence
  mRNA product Design b-3 comprising derived and/or modified sequence from HRSV(A2)__P0DOE7.1__M (opt6)
gggagagucccgcagucggcguccagcggcucugcuuguucgugugugugucguugcaggccuuauucaagcuuaccauggaaacauacguaaacaaacuacacgaaggauccacauacacagcagcaguacaauacaacguacuagaaaaagacgacgacccagcaucuuuaaccauauggguaccaauguuccaaucaucaaugccagcagaccucuuaauaaaagaacuagcaaacguaaacauccuagucaaacaaauaucaacacccaaaggaccaucccucagaguaaugaucaacucaagaucagcaguacuagcacaaaugccaucaaaauucacaauaugcgccaacguuucuuuagacgaacgaucaaaauuagccuacgacguaacaacacccugcgaaauaaaagcaugcucacuaacaugccuaaaaucaaaaaacaugcucacuacaguaaaagaccuaaccaugaaaacacucaacccaacacacgacauaauagcccuaugcgaauuugaaaacauaguaacaucaaaaaaaguaauaaucccaacauacuuaagaucgaucucagucagaaacaaagaccuaaauacacucgaaaacauaacaacaacagaauuuaaaaacgcaauaacaaacgcaaaaauaauaccauacucaggacuacuccuaguaauaacaguaacagacaacaaaggagcauucaaauacauaaaaccacaaucacaauucaucguagaccucggagcauaccuagaaaaagaaucaauauacuacguaacaacaaacuggaaacacaccgccacaagauucgcaauaaaacccauggaagacuaaggacuaguguccaccugucccuccugggcugcuggauugucucguuuuccugccaaauaaacaggaucagcgcuuuacagaucuaaaaaaaaaaaaaaaaaaaaaaaaaaaaaaaaaaaaaaaaaaaaaaaaaaaaaaaaaaaaaaaaugcaucccccccccccccccccccccccccccccccaaaggcucuuuucagagccaccagaauu

SEQ ID NO: 9756 - RNA, 1060 nt, Artificial Sequence
  mRNA product Design b-3 comprising derived and/or modified sequence from HRSV(A2)__P0DOE7.1__M (opt11)
gggagagucccgcagucggcguccagcggcucugcuuguucgugugugugucguugcaggccuuauucaagcuuaccauggaaaccuacgucaacaaacuacacgaaggcucaaccuacaccgccgccguccaauacaacguccucgaaaaagacgacgaccccgccucccuaaccaucuggguucccauguuccaaucauccaugcccgccgaccuccucauaaaagaacuagccaacgucaacauccuagucaaacaaaucagcacccccaaaggccccucccuccgcguaaugaucaacucccgcuccgccguccuagcccaaaugcccuccaaauuuacaaucugcgccaacgucucccucgacgaacgcucaaaacucgccuacgacgucaccacacccugcgaaaucaaagccugcucccucaccugccucaaaagcaaaaauaugcuaaccaccgucaaagaccuuaccaugaaaacccucaaccccacucacgacaucauagcccucugcgaauuugaaaacaucgucaccuccaaaaaagucaucauccccacauaccuccgcuccaucuccguccgcaacaaagaccucaacacccucgaaaacaucaccaccaccgaauuuaaaaacgccaucaccaacgccaaaaucauccccuacuccggccuccuccucgucaucaccguuaccgacaacaaaggcgccuucaaauacaucaaaccccaaucccaauucaucgucgaccucggagccuaccuugaaaaagaguccaucuacuacgucaccaccaacuggaaacacaccgccacccgauucgccaucaaacccauggaagacuaaggacuaguguccaccugucccuccugggcugcuggauugucucguuuuccugccaaauaaacaggaucagcgcuuuacagaucuaaaaaaaaaaaaaaaaaaaaaaaaaaaaaaaaaaaaaaaaaaaaaaaaaaaaaaaaaaaaaaaaugcaucccccccccccccccccccccccccccccccaaaggcucuuuucagagccaccagaauu

SEQ ID NO: 9757 - RNA, 1111 nt, Artificial Sequence
  mRNA product Design b-4 comprising derived and/or modified sequence from HRSV(A2)__P0DOE7.1__M (wt)
gggagagucccgcagucggcguccagcggcucugcuuguucgugugugugucguugcaggccuuauucaagcuuaccauggaaacauacgugaacaagcuucacgaaggcuccacauacacagcugcuguucaauacaaugucuuagaaaaagacgaugacccugcaucacuuacaauaugggugcccauguuccaaucaucuaugccagcagauuuacuuauaaaagaacuagcuaaugucaacauacuagugaaacaaauauccacacccaagggaccuucacuaagagucaugauaaacucaagaagugcagugcuagcacaaaugcccagcaaauuuaccauaugcgcuaauguguccuuggaugaaagaagcaaacuagcauaugauguaaccacacccugugaaaucaaggcauguagucuaacaugccuaaaaucaaaaaauauguugacuacaguuaaagaucucacuaugaagacacucaacccuacacaugauauuauugcuuuaugugaauuugaaaacauaguaacaucaaaaaaagucauaauaccaacauaccuaagauccaucagugucagaaauaaagaucugaacacacuugaaaauauaacaaccacugaauucaaaaaugcuaucacaaaugcaaaaaucaucccuuacucaggauuacuauuagucaucacagugacugacaacaaaggagcauucaaauacauaaagccacaaagucaauucauaguagaucuuggagcuuaccuagaaaaagaaaguauauauuauguuaccacaaauuggaagcacacagcuacacgauuugcaaucaaacccauggaagauuaaggacuaguaauaaggaaacuguaugaaugucugugggcaggaagugaagagauccuucuguaaagguuuuuggaauuaugucugcugaauaauaaacuuuuuugaaauaauaaaucugguagaaaaaugagaucuaaaaaaaaaaaaaaaaaaaaaaaaaaaaaaaaaaaaaaaaaaaaaaaaaaaaaaaaaaaaaaaaugcaucccccccccccccccccccccccccccccccaaaggcucuuuucagagccaccagaauu

SEQ ID NO: 9758 - RNA, 1111 nt, Artificial Sequence
  mRNA product Design b-4 comprising derived and/or modified sequence from HRSV(A2)__P0DOE7.1__M (opt1)
gggagagucccgcagucggcguccagcggcucugcuuguucgugugugugucguugcaggccuuauucaagcuuaccauggagaccuacgugaacaagcugcacgagggcagcaccuacacggccgccguccaguacaacgugcucgagaaggacgacgaccccgcgucccugaccaucugggugccgauguuccagagcuccaugcccgccgaccugcucaucaaggagcuggccaacgucaacauccuggugaagcagaucagcacccccaaggggcccucccuccgcgugaugaucaacagccgguccgccguccuggcccagaugccgagcaaguucaccaucugcgcgaacgugucccuggacgagcgcagcaagcucgccuacgacgugacgacccccugcgagaucaaggccugcucccugaccugccucaagagcaagaacaugcugaccacggucaaggaccugaccaugaagacccugaaccccacccacgacaucaucgcccucugcgaguucgagaacaucgugacguccaagaaggugaucauccccaccuaccugcggagcaucuccguccgcaacaaggaccugaacacccucgagaacaucaccacgaccgaguucaagaacgcgaucaccaacgccaagaucaucccguacagcggccugcugcucgugaucaccgugacggacaacaagggggccuucaaguacaucaagccccagucccaguucaucgucgaccugggcgccuaccuggagaaggagagcaucuacuacgugaccaccaacuggaagcacaccgccacgcgguucgcgaucaagcccauggaggacugaggacuaguaauaaggaaacuguaugaaugucugugggcaggaagugaagagauccuucuguaaagguuuuuggaauuaugucugcugaauaauaaacuuuuuugaaauaauaaaucugguagaaaaaugagaucuaaaaaaaaaaaaaaaaaaaaaaaaaaaaaaaaaaaaaaaaaaaaaaaaaaaaaaaaaaaaaaaaugcaucccccccccccccccccccccccccccccccaaaggcucuuuucagagccaccagaauu

SEQ ID NO: 9759 - RNA, 1111 nt, Artificial Sequence
  mRNA product Design b-4 comprising derived and/or modified sequence from HRSV(A2)__P0DOE7.1__M (opt2)
gggagagucccgcagucggcguccagcggcucugcuuguucgugugugugucguugcaggccuuauucaagcuuaccauggagaccuacgucaacaagcuccacgagggcuccaccuacaccgccgccguccaguacaacguccucgagaaggacgacgaccccgccucccucaccaucuggguccccauguuccaguccuccaugcccgccgaccuccucaucaaggagcucgccaacgucaacauccucgucaagcagaucuccacccccaagggccccucccuccgcgucaugaucaacucccgcuccgccguccucgcccagaugcccuccaaguucaccaucugcgccaacgucucccucgacgagcgcuccaagcucgccuacgacgucaccacccccugcgagaucaaggccugcucccucaccugccucaaguccaagaacaugcucaccaccgucaaggaccucaccaugaagacccucaaccccacccacgacaucaucgcccucugcgaguucgagaacaucgucaccuccaagaaggucaucauccccaccuaccuccgcuccaucuccguccgcaacaaggaccucaacacccucgagaacaucaccaccaccgaguucaagaacgccaucaccaacgccaagaucauccccuacuccggccuccuccucgucaucaccgucaccgacaacaagggcgccuucaaguacaucaagccccagucccaguucaucgucgaccucggcgccuaccucgagaaggaguccaucuacuacgucaccaccaacuggaagcacaccgccacccgcuucgccaucaagcccauggaggacugaggacuaguaauaaggaaacuguaugaaugucugugggcaggaagugaagagauccuucuguaaagguuuuuggaauuaugucugcugaauaauaaacuuuuuugaaauaauaaaucugguagaaaaaugagaucuaaaaaaaaaaaaaaaaaaaaaaaaaaaaaaaaaaaaaaaaaaaaaaaaaaaaaaaaaaaaaaaaugcaucccccccccccccccccccccccccccccccaaaggcucuuuucagagccaccagaauu

SEQ ID NO: 9760 - RNA, 1111 nt, Artificial Sequence
  mRNA product Design b-4 comprising derived and/or modified sequence from HRSV(A2)__P0DOE7.1__M (opt3)
gggagagucccgcagucggcguccagcggcucugcuuguucgugugugugucguugcaggccuuauucaagcuuaccauggagaccuacgugaacaagcugcacgaaggcagcacauauacugccgcuguccaguacaauguucucgagaaagacgaugaccccgcaucccuuacgaucugggugccuauguuccaaucuucaaugccagccgaucuguugauuaaggaauuagcgaacguaaauauacuggugaaacagaucaguaccccgaaggggcccagccuaagagucaugauuaacuccaggucugcugugcucgcccagaugccuucgaaauuuacaaucugcgcaaauguuucacuggacgagcggagcaaacuugccuaugaugugacuaccccaugugaaauuaaggcuugcagucugacauguuugaaguccaagaacaugcucaccacugucaaagaccugacaaugaagacccugaaucccacgcaugauaucauagcacucugcgaguucgagaacaucgugacuucuaaaaagguaauuaucccuaccuacuuacgcagcauuuccguucgaaauaaggaccugaacacacuugaaaauaucacuaccacagaguuuaaaaacgccauaaccaaugcuaagauuaucccauauucaggauugcugcuagugauuacggucacugauaacaaaggugccuucaaguacaucaaaccccagagucaauuuaucguggaccucggcgcguaucuggaaaaggagagcauuuacuacgugacaaccaauuggaaacacacugcaacacguuucgccauaaagccuauggaggauugaggacuaguaauaaggaaacuguaugaaugucugugggcaggaagugaagagauccuucuguaaagguuuuuggaauuaugucugcugaauaauaaacuuuuuugaaauaauaaaucugguagaaaaaugagaucuaaaaaaaaaaaaaaaaaaaaaaaaaaaaaaaaaaaaaaaaaaaaaaaaaaaaaaaaaaaaaaaaugcaucccccccccccccccccccccccccccccccaaaggcucuuuucagagccaccagaauu

SEQ ID NO: 9761 - RNA, 1111 nt, Artificial Sequence
  mRNA product Design b-4 comprising derived and/or modified sequence from HRSV(A2)__P0DOE7.1__M (opt4)
gggagagucccgcagucggcguccagcggcucugcuuguucgugugugugucguugcaggccuuauucaagcuuaccauggagaccuacgugaacaagcugcacgagggcagcaccuacaccgccgccgugcaguacaacgugcuggagaaggacgacgaccccgccagccugaccaucugggugcccauguuccagagcagcaugcccgccgaccugcugaucaaggagcuggccaacgugaacauccuggugaagcagaucagcacccccaagggccccagccugagagugaugaucaacagcagaagcgccgugcuggcccagaugcccagcaaguucaccaucugcgccaacgugagccuggacgagagaagcaagcuggccuacgacgugaccacccccugcgagaucaaggccugcagccugaccugccugaagagcaagaacaugcugaccaccgugaaggaccugaccaugaagacccugaaccccacccacgacaucaucgcccugugcgaguucgagaacaucgugaccagcaagaaggugaucauccccaccuaccugagaagcaucagcgugagaaacaaggaccugaacacccuggagaacaucaccaccaccgaguucaagaacgccaucaccaacgccaagaucauccccuacagcggccugcugcuggugaucaccgugaccgacaacaagggcgccuucaaguacaucaagccccagagccaguucaucguggaccugggcgccuaccuggagaaggagagcaucuacuacgugaccaccaacuggaagcacaccgccaccagauucgccaucaagcccauggaggacugaggacuaguaauaaggaaacuguaugaaugucugugggcaggaagugaagagauccuucuguaaagguuuuuggaauuaugucugcugaauaauaaacuuuuuugaaauaauaaaucugguagaaaaaugagaucuaaaaaaaaaaaaaaaaaaaaaaaaaaaaaaaaaaaaaaaaaaaaaaaaaaaaaaaaaaaaaaaaugcaucccccccccccccccccccccccccccccccaaaggcucuuuucagagccaccagaauu

SEQ ID NO: 9762 - RNA, 1111 nt, Artificial Sequence
  mRNA product Design b-4 comprising derived and/or modified sequence from HRSV(A2)__P0DOE7.1__M (opt5)
gggagagucccgcagucggcguccagcggcucugcuuguucgugugugugucguugcaggccuuauucaagcuuaccauggagaccuacgugaacaagcugcacgaaggcagcacauauacggccgcuguccaguacaauguucucgagaaagacgaugaccccgccucccugaccaucugggugccuauguuccaaucuagcaugccggcggaucuucugauuaaggaacucgcuaacgugaauauccuggucaaacagauuuccacacccaaggggccuucucuuagagugaugaucaacagccgguccgccguucuggcccagaugcccucuaaauuuaccauuugcgcuaaugugagccucgacgagcgcuccaagcuggccuaugaugucacaaccccuugugaaaucaaggcuugcagccugacaugucucaaaucuaagaacaugcugaccacggugaaagaccuuaccaugaagacacugaaucccacccaugauaucauugcccucugcgaguucgagaacaucguuacauccaaaaaggugauuaucccuaccuaccugagaagcauuucuguccggaauaaggaccuuaacacgcuggaaaauaucacaaccacagaguuuaaaaacgcgauuaccaaugccaagaucaucccguauuccggacuccugcuggugauuaccgugacagauaacaaaggcgcuuucaaguacaucaaaccccagagccaauuuauugucgaccucggggccuaucuggaaaaggagucuaucuacuacguuacgaccaauuggaaacacacagcuacccgcuucgccauuaagccuauggaggauugaggacuaguaauaaggaaacuguaugaaugucugugggcaggaagugaagagauccuucuguaaagguuuuuggaauuaugucugcugaauaauaaacuuuuuugaaauaauaaaucugguagaaaaaugagaucuaaaaaaaaaaaaaaaaaaaaaaaaaaaaaaaaaaaaaaaaaaaaaaaaaaaaaaaaaaaaaaaaugcaucccccccccccccccccccccccccccccccaaaggcucuuuucagagccaccagaauu

SEQ ID NO: 9763 - RNA, 1111 nt, Artificial Sequence
  mRNA product Design b-4 comprising derived and/or modified sequence from HRSV(A2)__P0DOE7.1__M (opt6)
gggagagucccgcagucggcguccagcggcucugcuuguucgugugugugucguugcaggccuuauucaagcuuaccauggaaacauacguaaacaaacuacacgaaggauccacauacacagcagcaguacaauacaacguacuagaaaaagacgacgacccagcaucuuuaaccauauggguaccaauguuccaaucaucaaugccagcagaccucuuaauaaaagaacuagcaaacguaaacauccuagucaaacaaauaucaacacccaaaggaccaucccucagaguaaugaucaacucaagaucagcaguacuagcacaaaugccaucaaaauucacaauaugcgccaacguuucuuuagacgaacgaucaaaauuagccuacgacguaacaacacccugcgaaauaaaagcaugcucacuaacaugccuaaaaucaaaaaacaugcucacuacaguaaaagaccuaaccaugaaaacacucaacccaacacacgacauaauagcccuaugcgaauuugaaaacauaguaacaucaaaaaaaguaauaaucccaacauacuuaagaucgaucucagucagaaacaaagaccuaaauacacucgaaaacauaacaacaacagaauuuaaaaacgcaauaacaaacgcaaaaauaauaccauacucaggacuacuccuaguaauaacaguaacagacaacaaaggagcauucaaauacauaaaaccacaaucacaauucaucguagaccucggagcauaccuagaaaaagaaucaauauacuacguaacaacaaacuggaaacacaccgccacaagauucgcaauaaaacccauggaagacuaaggacuaguaauaaggaaacuguaugaaugucugugggcaggaagugaagagauccuucuguaaagguuuuuggaauuaugucugcugaauaauaaacuuuuuugaaauaauaaaucugguagaaaaaugagaucuaaaaaaaaaaaaaaaaaaaaaaaaaaaaaaaaaaaaaaaaaaaaaaaaaaaaaaaaaaaaaaaaugcaucccccccccccccccccccccccccccccccaaaggcucuuuucagagccaccagaauu

SEQ ID NO: 9764 - RNA, 1111 nt, Artificial Sequence
  mRNA product Design b-4 comprising derived and/or modified sequence from HRSV(A2)__P0DOE7.1__M (opt11)
gggagagucccgcagucggcguccagcggcucugcuuguucgugugugugucguugcaggccuuauucaagcuuaccauggaaaccuacgucaacaaacuacacgaaggcucaaccuacaccgccgccguccaauacaacguccucgaaaaagacgacgaccccgccucccuaaccaucuggguucccauguuccaaucauccaugcccgccgaccuccucauaaaagaacuagccaacgucaacauccuagucaaacaaaucagcacccccaaaggccccucccuccgcguaaugaucaacucccgcuccgccguccuagcccaaaugcccuccaaauuuacaaucugcgccaacgucucccucgacgaacgcucaaaacucgccuacgacgucaccacacccugcgaaaucaaagccugcucccucaccugccucaaaagcaaaaauaugcuaaccaccgucaaagaccuuaccaugaaaacccucaaccccacucacgacaucauagcccucugcgaauuugaaaacaucgucaccuccaaaaaagucaucauccccacauaccuccgcuccaucuccguccgcaacaaagaccucaacacccucgaaaacaucaccaccaccgaauuuaaaaacgccaucaccaacgccaaaaucauccccuacuccggccuccuccucgucaucaccguuaccgacaacaaaggcgccuucaaauacaucaaaccccaaucccaauucaucgucgaccucggagccuaccuugaaaaagaguccaucuacuacgucaccaccaacuggaaacacaccgccacccgauucgccaucaaacccauggaagacuaaggacuaguaauaaggaaacuguaugaaugucugugggcaggaagugaagagauccuucuguaaagguuuuuggaauuaugucugcugaauaauaaacuuuuuugaaauaauaaaucugguagaaaaaugagaucuaaaaaaaaaaaaaaaaaaaaaaaaaaaaaaaaaaaaaaaaaaaaaaaaaaaaaaaaaaaaaaaaugcaucccccccccccccccccccccccccccccccaaaggcucuuuucagagccaccagaauu

SEQ ID NO: 9765 - RNA, 1173 nt, Artificial Sequence
  mRNA product Design b-5 comprising derived and/or modified sequence from HRSV(A2)__P0DOE7.1__M (wt)
gggagacuccugucgggcggaaguaggaggaguagaguuuaaaaacaguacucuuuuuccgguucgggacguaguugaagcaacgacaagccggauaaccgcucuugagacaggaagcuuaccauggaaacauacgugaacaagcuucacgaaggcuccacauacacagcugcuguucaauacaaugucuuagaaaaagacgaugacccugcaucacuuacaauaugggugcccauguuccaaucaucuaugccagcagauuuacuuauaaaagaacuagcuaaugucaacauacuagugaaacaaauauccacacccaagggaccuucacuaagagucaugauaaacucaagaagugcagugcuagcacaaaugcccagcaaauuuaccauaugcgcuaauguguccuuggaugaaagaagcaaacuagcauaugauguaaccacacccugugaaaucaaggcauguagucuaacaugccuaaaaucaaaaaauauguugacuacaguuaaagaucucacuaugaagacacucaacccuacacaugauauuauugcuuuaugugaauuugaaaacauaguaacaucaaaaaaagucauaauaccaacauaccuaagauccaucagugucagaaauaaagaucugaacacacuugaaaauauaacaaccacugaauucaaaaaugcuaucacaaaugcaaaaaucaucccuuacucaggauuacuauuagucaucacagugacugacaacaaaggagcauucaaauacauaaagccacaaagucaauucauaguagaucuuggagcuuaccuagaaaaagaaaguauauauuauguuaccacaaauuggaagcacacagcuacacgauuugcaaucaaacccauggaagauuaaggacuaguacuggcugcaucucccuuuccucuguccuccauccuucucccaggauggugaagggggaccugguacccagugauccccaccccaggauccuaaaucaugacuuaccugcuaauaaaaacucauuggaaaagugagaagaucuaaaaaaaaaaaaaaaaaaaaaaaaaaaaaaaaaaaaaaaaaaaaaaaaaaaaaaaaaaaaaaaaugcaucccccccccccccccccccccccccccccccaaaggcucuuuucagagccaccagaauu

SEQ ID NO: 9766 - RNA, 1173 nt, Artificial Sequence
  mRNA product Design b-5 comprising derived and/or modified sequence from HRSV(A2)__P0DOE7.1__M (opt1)
gggagacuccugucgggcggaaguaggaggaguagaguuuaaaaacaguacucuuuuuccgguucgggacguaguugaagcaacgacaagccggauaaccgcucuugagacaggaagcuuaccauggagaccuacgugaacaagcugcacgagggcagcaccuacacggccgccguccaguacaacgugcucgagaaggacgacgaccccgcgucccugaccaucugggugccgauguuccagagcuccaugcccgccgaccugcucaucaaggagcuggccaacgucaacauccuggugaagcagaucagcacccccaaggggcccucccuccgcgugaugaucaacagccgguccgccguccuggcccagaugccgagcaaguucaccaucugcgcgaacgugucccuggacgagcgcagcaagcucgccuacgacgugacgacccccugcgagaucaaggccugcucccugaccugccucaagagcaagaacaugcugaccacggucaaggaccugaccaugaagacccugaaccccacccacgacaucaucgcccucugcgaguucgagaacaucgugacguccaagaaggugaucauccccaccuaccugcggagcaucuccguccgcaacaaggaccugaacacccucgagaacaucaccacgaccgaguucaagaacgcgaucaccaacgccaagaucaucccguacagcggccugcugcucgugaucaccgugacggacaacaagggggccuucaaguacaucaagccccagucccaguucaucgucgaccugggcgccuaccuggagaaggagagcaucuacuacgugaccaccaacuggaagcacaccgccacgcgguucgcgaucaagcccauggaggacugaggacuaguacuggcugcaucucccuuuccucuguccuccauccuucucccaggauggugaagggggaccugguacccagugauccccaccccaggauccuaaaucaugacuuaccugcuaauaaaaacucauuggaaaagugagaagaucuaaaaaaaaaaaaaaaaaaaaaaaaaaaaaaaaaaaaaaaaaaaaaaaaaaaaaaaaaaaaaaaaugcaucccccccccccccccccccccccccccccccaaaggcucuuuucagagccaccagaauu

SEQ ID NO: 9767 - RNA, 1173 nt, Artificial Sequence
  mRNA product Design b-5 comprising derived and/or modified sequence from HRSV(A2)__P0DOE7.1__M (opt2)
gggagacuccugucgggcggaaguaggaggaguagaguuuaaaaacaguacucuuuuuccgguucgggacguaguugaagcaacgacaagccggauaaccgcucuugagacaggaagcuuaccauggagaccuacgucaacaagcuccacgagggcuccaccuacaccgccgccguccaguacaacguccucgagaaggacgacgaccccgccucccucaccaucuggguccccauguuccaguccuccaugcccgccgaccuccucaucaaggagcucgccaacgucaacauccucgucaagcagaucuccacccccaagggccccucccuccgcgucaugaucaacucccgcuccgccguccucgcccagaugcccuccaaguucaccaucugcgccaacgucucccucgacgagcgcuccaagcucgccuacgacgucaccacccccugcgagaucaaggccugcucccucaccugccucaaguccaagaacaugcucaccaccgucaaggaccucaccaugaagacccucaaccccacccacgacaucaucgcccucugcgaguucgagaacaucgucaccuccaagaaggucaucauccccaccuaccuccgcuccaucuccguccgcaacaaggaccucaacacccucgagaacaucaccaccaccgaguucaagaacgccaucaccaacgccaagaucauccccuacuccggccuccuccucgucaucaccgucaccgacaacaagggcgccuucaaguacaucaagccccagucccaguucaucgucgaccucggcgccuaccucgagaaggaguccaucuacuacgucaccaccaacuggaagcacaccgccacccgcuucgccaucaagcccauggaggacugaggacuaguacuggcugcaucucccuuuccucuguccuccauccuucucccaggauggugaagggggaccugguacccagugauccccaccccaggauccuaaaucaugacuuaccugcuaauaaaaacucauuggaaaagugagaagaucuaaaaaaaaaaaaaaaaaaaaaaaaaaaaaaaaaaaaaaaaaaaaaaaaaaaaaaaaaaaaaaaaugcaucccccccccccccccccccccccccccccccaaaggcucuuuucagagccaccagaauu

SEQ ID NO: 9768 - RNA, 1173 nt, Artificial Sequence
  mRNA product Design b-5 comprising derived and/or modified sequence from HRSV(A2)__P0DOE7.1__M (opt3)
gggagacuccugucgggcggaaguaggaggaguagaguuuaaaaacaguacucuuuuuccgguucgggacguaguugaagcaacgacaagccggauaaccgcucuugagacaggaagcuuaccauggagaccuacgugaacaagcugcacgaaggcagcacauauacugccgcuguccaguacaauguucucgagaaagacgaugaccccgcaucccuuacgaucugggugccuauguuccaaucuucaaugccagccgaucuguugauuaaggaauuagcgaacguaaauauacuggugaaacagaucaguaccccgaaggggcccagccuaagagucaugauuaacuccaggucugcugugcucgcccagaugccuucgaaauuuacaaucugcgcaaauguuucacuggacgagcggagcaaacuugccuaugaugugacuaccccaugugaaauuaaggcuugcagucugacauguuugaaguccaagaacaugcucaccacugucaaagaccugacaaugaagacccugaaucccacgcaugauaucauagcacucugcgaguucgagaacaucgugacuucuaaaaagguaauuaucccuaccuacuuacgcagcauuuccguucgaaauaaggaccugaacacacuugaaaauaucacuaccacagaguuuaaaaacgccauaaccaaugcuaagauuaucccauauucaggauugcugcuagugauuacggucacugauaacaaaggugccuucaaguacaucaaaccccagagucaauuuaucguggaccucggcgcguaucuggaaaaggagagcauuuacuacgugacaaccaauuggaaacacacugcaacacguuucgccauaaagccuauggaggauugaggacuaguacuggcugcaucucccuuuccucuguccuccauccuucucccaggauggugaagggggaccugguacccagugauccccaccccaggauccuaaaucaugacuuaccugcuaauaaaaacucauuggaaaagugagaagaucuaaaaaaaaaaaaaaaaaaaaaaaaaaaaaaaaaaaaaaaaaaaaaaaaaaaaaaaaaaaaaaaaugcaucccccccccccccccccccccccccccccccaaaggcucuuuucagagccaccagaauu

SEQ ID NO: 9769 - RNA, 1173 nt, Artificial Sequence
  mRNA product Design b-5 comprising derived and/or modified sequence from HRSV(A2)__P0DOE7.1__M (opt4)
gggagacuccugucgggcggaaguaggaggaguagaguuuaaaaacaguacucuuuuuccgguucgggacguaguugaagcaacgacaagccggauaaccgcucuugagacaggaagcuuaccauggagaccuacgugaacaagcugcacgagggcagcaccuacaccgccgccgugcaguacaacgugcuggagaaggacgacgaccccgccagccugaccaucugggugcccauguuccagagcagcaugcccgccgaccugcugaucaaggagcuggccaacgugaacauccuggugaagcagaucagcacccccaagggccccagccugagagugaugaucaacagcagaagcgccgugcuggcccagaugcccagcaaguucaccaucugcgccaacgugagccuggacgagagaagcaagcuggccuacgacgugaccacccccugcgagaucaaggccugcagccugaccugccugaagagcaagaacaugcugaccaccgugaaggaccugaccaugaagacccugaaccccacccacgacaucaucgcccugugcgaguucgagaacaucgugaccagcaagaaggugaucauccccaccuaccugagaagcaucagcgugagaaacaaggaccugaacacccuggagaacaucaccaccaccgaguucaagaacgccaucaccaacgccaagaucauccccuacagcggccugcugcuggugaucaccgugaccgacaacaagggcgccuucaaguacaucaagccccagagccaguucaucguggaccugggcgccuaccuggagaaggagagcaucuacuacgugaccaccaacuggaagcacaccgccaccagauucgccaucaagcccauggaggacugaggacuaguacuggcugcaucucccuuuccucuguccuccauccuucucccaggauggugaagggggaccugguacccagugauccccaccccaggauccuaaaucaugacuuaccugcuaauaaaaacucauuggaaaagugagaagaucuaaaaaaaaaaaaaaaaaaaaaaaaaaaaaaaaaaaaaaaaaaaaaaaaaaaaaaaaaaaaaaaaugcaucccccccccccccccccccccccccccccccaaaggcucuuuucagagccaccagaauu

SEQ ID NO: 9770 - RNA, 1173 nt, Artificial Sequence
  mRNA product Design b-5 comprising derived and/or modified sequence from HRSV(A2)__P0DOE7.1__M (opt5)
gggagacuccugucgggcggaaguaggaggaguagaguuuaaaaacaguacucuuuuuccgguucgggacguaguugaagcaacgacaagccggauaaccgcucuugagacaggaagcuuaccauggagaccuacgugaacaagcugcacgaaggcagcacauauacggccgcuguccaguacaauguucucgagaaagacgaugaccccgccucccugaccaucugggugccuauguuccaaucuagcaugccggcggaucuucugauuaaggaacucgcuaacgugaauauccuggucaaacagauuuccacacccaaggggccuucucuuagagugaugaucaacagccgguccgccguucuggcccagaugcccucuaaauuuaccauuugcgcuaaugugagccucgacgagcgcuccaagcuggccuaugaugucacaaccccuugugaaaucaaggcuugcagccugacaugucucaaaucuaagaacaugcugaccacggugaaagaccuuaccaugaagacacugaaucccacccaugauaucauugcccucugcgaguucgagaacaucguuacauccaaaaaggugauuaucccuaccuaccugagaagcauuucuguccggaauaaggaccuuaacacgcuggaaaauaucacaaccacagaguuuaaaaacgcgauuaccaaugccaagaucaucccguauuccggacuccugcuggugauuaccgugacagauaacaaaggcgcuuucaaguacaucaaaccccagagccaauuuauugucgaccucggggccuaucuggaaaaggagucuaucuacuacguuacgaccaauuggaaacacacagcuacccgcuucgccauuaagccuauggaggauugaggacuaguacuggcugcaucucccuuuccucuguccuccauccuucucccaggauggugaagggggaccugguacccagugauccccaccccaggauccuaaaucaugacuuaccugcuaauaaaaacucauuggaaaagugagaagaucuaaaaaaaaaaaaaaaaaaaaaaaaaaaaaaaaaaaaaaaaaaaaaaaaaaaaaaaaaaaaaaaaugcaucccccccccccccccccccccccccccccccaaaggcucuuuucagagccaccagaauu

SEQ ID NO: 9771 - RNA, 1173 nt, Artificial Sequence
  mRNA product Design b-5 comprising derived and/or modified sequence from HRSV(A2)__P0DOE7.1__M (opt6)
gggagacuccugucgggcggaaguaggaggaguagaguuuaaaaacaguacucuuuuuccgguucgggacguaguugaagcaacgacaagccggauaaccgcucuugagacaggaagcuuaccauggaaacauacguaaacaaacuacacgaaggauccacauacacagcagcaguacaauacaacguacuagaaaaagacgacgacccagcaucuuuaaccauauggguaccaauguuccaaucaucaaugccagcagaccucuuaauaaaagaacuagcaaacguaaacauccuagucaaacaaauaucaacacccaaaggaccaucccucagaguaaugaucaacucaagaucagcaguacuagcacaaaugccaucaaaauucacaauaugcgccaacguuucuuuagacgaacgaucaaaauuagccuacgacguaacaacacccugcgaaauaaaagcaugcucacuaacaugccuaaaaucaaaaaacaugcucacuacaguaaaagaccuaaccaugaaaacacucaacccaacacacgacauaauagcccuaugcgaauuugaaaacauaguaacaucaaaaaaaguaauaaucccaacauacuuaagaucgaucucagucagaaacaaagaccuaaauacacucgaaaacauaacaacaacagaauuuaaaaacgcaauaacaaacgcaaaaauaauaccauacucaggacuacuccuaguaauaacaguaacagacaacaaaggagcauucaaauacauaaaaccacaaucacaauucaucguagaccucggagcauaccuagaaaaagaaucaauauacuacguaacaacaaacuggaaacacaccgccacaagauucgcaauaaaacccauggaagacuaaggacuaguacuggcugcaucucccuuuccucuguccuccauccuucucccaggauggugaagggggaccugguacccagugauccccaccccaggauccuaaaucaugacuuaccugcuaauaaaaacucauuggaaaagugagaagaucuaaaaaaaaaaaaaaaaaaaaaaaaaaaaaaaaaaaaaaaaaaaaaaaaaaaaaaaaaaaaaaaaugcaucccccccccccccccccccccccccccccccaaaggcucuuuucagagccaccagaauu

SEQ ID NO: 9772 - RNA, 1173 nt, Artificial Sequence
  mRNA product Design b-5 comprising derived and/or modified sequence from HRSV(A2)__P0DOE7.1__M (opt11)
gggagacuccugucgggcggaaguaggaggaguagaguuuaaaaacaguacucuuuuuccgguucgggacguaguugaagcaacgacaagccggauaaccgcucuugagacaggaagcuuaccauggaaaccuacgucaacaaacuacacgaaggcucaaccuacaccgccgccguccaauacaacguccucgaaaaagacgacgaccccgccucccuaaccaucuggguucccauguuccaaucauccaugcccgccgaccuccucauaaaagaacuagccaacgucaacauccuagucaaacaaaucagcacccccaaaggccccucccuccgcguaaugaucaacucccgcuccgccguccuagcccaaaugcccuccaaauuuacaaucugcgccaacgucucccucgacgaacgcucaaaacucgccuacgacgucaccacacccugcgaaaucaaagccugcucccucaccugccucaaaagcaaaaauaugcuaaccaccgucaaagaccuuaccaugaaaacccucaaccccacucacgacaucauagcccucugcgaauuugaaaacaucgucaccuccaaaaaagucaucauccccacauaccuccgcuccaucuccguccgcaacaaagaccucaacacccucgaaaacaucaccaccaccgaauuuaaaaacgccaucaccaacgccaaaaucauccccuacuccggccuccuccucgucaucaccguuaccgacaacaaaggcgccuucaaauacaucaaaccccaaucccaauucaucgucgaccucggagccuaccuugaaaaagaguccaucuacuacgucaccaccaacuggaaacacaccgccacccgauucgccaucaaacccauggaagacuaaggacuaguacuggcugcaucucccuuuccucuguccuccauccuucucccaggauggugaagggggaccugguacccagugauccccaccccaggauccuaaaucaugacuuaccugcuaauaaaaacucauuggaaaagugagaagaucuaaaaaaaaaaaaaaaaaaaaaaaaaaaaaaaaaaaaaaaaaaaaaaaaaaaaaaaaaaaaaaaaugcaucccccccccccccccccccccccccccccccaaaggcucuuuucagagccaccagaauu

SEQ ID NO: 9773 - RNA, 1079 nt, Artificial Sequence
  mRNA product Design c-1 comprising derived and/or modified sequence from HRSV(A2)__P0DOE7.1__M (wt)
gggagaguccgcucagccagguugcagaagcggcuuagcguguguccuaaucuucucucugcguguagguaggccugugccgcaaacaagcuuaccauggaaacauacgugaacaagcuucacgaaggcuccacauacacagcugcuguucaauacaaugucuuagaaaaagacgaugacccugcaucacuuacaauaugggugcccauguuccaaucaucuaugccagcagauuuacuuauaaaagaacuagcuaaugucaacauacuagugaaacaaauauccacacccaagggaccuucacuaagagucaugauaaacucaagaagugcagugcuagcacaaaugcccagcaaauuuaccauaugcgcuaauguguccuuggaugaaagaagcaaacuagcauaugauguaaccacacccugugaaaucaaggcauguagucuaacaugccuaaaaucaaaaaauauguugacuacaguuaaagaucucacuaugaagacacucaacccuacacaugauauuauugcuuuaugugaauuugaaaacauaguaacaucaaaaaaagucauaauaccaacauaccuaagauccaucagugucagaaauaaagaucugaacacacuugaaaauauaacaaccacugaauucaaaaaugcuaucacaaaugcaaaaaucaucccuuacucaggauuacuauuagucaucacagugacugacaacaaaggagcauucaaauacauaaagccacaaagucaauucauaguagaucuuggagcuuaccuagaaaaagaaaguauauauuauguuaccacaaauuggaagcacacagcuacacgauuugcaaucaaacccauggaagauuaaggacuaguguccaccugucccuccugggcugcuggauugucucguuuuccugccaaauaaacaggaucagcgcuuuacagaucuaaaaaaaaaaaaaaaaaaaaaaaaaaaaaaaaaaaaaaaaaaaaaaaaaaaaaaaaaaaaaaaaugcaucccccccccccccccccccccccccccccccaaaggcucuuuucagagccaccagaauu

SEQ ID NO: 9774 - RNA, 1079 nt, Artificial Sequence
  mRNA product Design c-1 comprising derived and/or modified sequence from HRSV(A2)__P0DOE7.1__M (opt1)
gggagaguccgcucagccagguugcagaagcggcuuagcguguguccuaaucuucucucugcguguagguaggccugugccgcaaacaagcuuaccauggagaccuacgugaacaagcugcacgagggcagcaccuacacggccgccguccaguacaacgugcucgagaaggacgacgaccccgcgucccugaccaucugggugccgauguuccagagcuccaugcccgccgaccugcucaucaaggagcuggccaacgucaacauccuggugaagcagaucagcacccccaaggggcccucccuccgcgugaugaucaacagccgguccgccguccuggcccagaugccgagcaaguucaccaucugcgcgaacgugucccuggacgagcgcagcaagcucgccuacgacgugacgacccccugcgagaucaaggccugcucccugaccugccucaagagcaagaacaugcugaccacggucaaggaccugaccaugaagacccugaaccccacccacgacaucaucgcccucugcgaguucgagaacaucgugacguccaagaaggugaucauccccaccuaccugcggagcaucuccguccgcaacaaggaccugaacacccucgagaacaucaccacgaccgaguucaagaacgcgaucaccaacgccaagaucaucccguacagcggccugcugcucgugaucaccgugacggacaacaagggggccuucaaguacaucaagccccagucccaguucaucgucgaccugggcgccuaccuggagaaggagagcaucuacuacgugaccaccaacuggaagcacaccgccacgcgguucgcgaucaagcccauggaggacugaggacuaguguccaccugucccuccugggcugcuggauugucucguuuuccugccaaauaaacaggaucagcgcuuuacagaucuaaaaaaaaaaaaaaaaaaaaaaaaaaaaaaaaaaaaaaaaaaaaaaaaaaaaaaaaaaaaaaaaugcaucccccccccccccccccccccccccccccccaaaggcucuuuucagagccaccagaauu

SEQ ID NO: 9775 - RNA, 1079 nt, Artificial Sequence
  mRNA product Design c-1 comprising derived and/or modified sequence from HRSV(A2)__P0DOE7.1__M (opt2)
gggagaguccgcucagccagguugcagaagcggcuuagcguguguccuaaucuucucucugcguguagguaggccugugccgcaaacaagcuuaccauggagaccuacgucaacaagcuccacgagggcuccaccuacaccgccgccguccaguacaacguccucgagaaggacgacgaccccgccucccucaccaucuggguccccauguuccaguccuccaugcccgccgaccuccucaucaaggagcucgccaacgucaacauccucgucaagcagaucuccacccccaagggccccucccuccgcgucaugaucaacucccgcuccgccguccucgcccagaugcccuccaaguucaccaucugcgccaacgucucccucgacgagcgcuccaagcucgccuacgacgucaccacccccugcgagaucaaggccugcucccucaccugccucaaguccaagaacaugcucaccaccgucaaggaccucaccaugaagacccucaaccccacccacgacaucaucgcccucugcgaguucgagaacaucgucaccuccaagaaggucaucauccccaccuaccuccgcuccaucuccguccgcaacaaggaccucaacacccucgagaacaucaccaccaccgaguucaagaacgccaucaccaacgccaagaucauccccuacuccggccuccuccucgucaucaccgucaccgacaacaagggcgccuucaaguacaucaagccccagucccaguucaucgucgaccucggcgccuaccucgagaaggaguccaucuacuacgucaccaccaacuggaagcacaccgccacccgcuucgccaucaagcccauggaggacugaggacuaguguccaccugucccuccugggcugcuggauugucucguuuuccugccaaauaaacaggaucagcgcuuuacagaucuaaaaaaaaaaaaaaaaaaaaaaaaaaaaaaaaaaaaaaaaaaaaaaaaaaaaaaaaaaaaaaaaugcaucccccccccccccccccccccccccccccccaaaggcucuuuucagagccaccagaauu

SEQ ID NO: 9776 - RNA, 1079 nt, Artificial Sequence
  mRNA product Design c-1 comprising derived and/or modified sequence from HRSV(A2)__P0DOE7.1__M (opt3)
gggagaguccgcucagccagguugcagaagcggcuuagcguguguccuaaucuucucucugcguguagguaggccugugccgcaaacaagcuuaccauggagaccuacgugaacaagcugcacgaaggcagcacauauacugccgcuguccaguacaauguucucgagaaagacgaugaccccgcaucccuuacgaucugggugccuauguuccaaucuucaaugccagccgaucuguugauuaaggaauuagcgaacguaaauauacuggugaaacagaucaguaccccgaaggggcccagccuaagagucaugauuaacuccaggucugcugugcucgcccagaugccuucgaaauuuacaaucugcgcaaauguuucacuggacgagcggagcaaacuugccuaugaugugacuaccccaugugaaauuaaggcuugcagucugacauguuugaaguccaagaacaugcucaccacugucaaagaccugacaaugaagacccugaaucccacgcaugauaucauagcacucugcgaguucgagaacaucgugacuucuaaaaagguaauuaucccuaccuacuuacgcagcauuuccguucgaaauaaggaccugaacacacuugaaaauaucacuaccacagaguuuaaaaacgccauaaccaaugcuaagauuaucccauauucaggauugcugcuagugauuacggucacugauaacaaaggugccuucaaguacaucaaaccccagagucaauuuaucguggaccucggcgcguaucuggaaaaggagagcauuuacuacgugacaaccaauuggaaacacacugcaacacguuucgccauaaagccuauggaggauugaggacuaguguccaccugucccuccugggcugcuggauugucucguuuuccugccaaauaaacaggaucagcgcuuuacagaucuaaaaaaaaaaaaaaaaaaaaaaaaaaaaaaaaaaaaaaaaaaaaaaaaaaaaaaaaaaaaaaaaugcaucccccccccccccccccccccccccccccccaaaggcucuuuucagagccaccagaauu

SEQ ID NO: 9777 - RNA, 1079 nt, Artificial Sequence
  mRNA product Design c-1 comprising derived and/or modified sequence from HRSV(A2)__P0DOE7.1__M (opt4)
gggagaguccgcucagccagguugcagaagcggcuuagcguguguccuaaucuucucucugcguguagguaggccugugccgcaaacaagcuuaccauggagaccuacgugaacaagcugcacgagggcagcaccuacaccgccgccgugcaguacaacgugcuggagaaggacgacgaccccgccagccugaccaucugggugcccauguuccagagcagcaugcccgccgaccugcugaucaaggagcuggccaacgugaacauccuggugaagcagaucagcacccccaagggccccagccugagagugaugaucaacagcagaagcgccgugcuggcccagaugcccagcaaguucaccaucugcgccaacgugagccuggacgagagaagcaagcuggccuacgacgugaccacccccugcgagaucaaggccugcagccugaccugccugaagagcaagaacaugcugaccaccgugaaggaccugaccaugaagacccugaaccccacccacgacaucaucgcccugugcgaguucgagaacaucgugaccagcaagaaggugaucauccccaccuaccugagaagcaucagcgugagaaacaaggaccugaacacccuggagaacaucaccaccaccgaguucaagaacgccaucaccaacgccaagaucauccccuacagcggccugcugcuggugaucaccgugaccgacaacaagggcgccuucaaguacaucaagccccagagccaguucaucguggaccugggcgccuaccuggagaaggagagcaucuacuacgugaccaccaacuggaagcacaccgccaccagauucgccaucaagcccauggaggacugaggacuaguguccaccugucccuccugggcugcuggauugucucguuuuccugccaaauaaacaggaucagcgcuuuacagaucuaaaaaaaaaaaaaaaaaaaaaaaaaaaaaaaaaaaaaaaaaaaaaaaaaaaaaaaaaaaaaaaaugcaucccccccccccccccccccccccccccccccaaaggcucuuuucagagccaccagaauu

SEQ ID NO: 9778 - RNA, 1079 nt, Artificial Sequence
  mRNA product Design c-1 comprising derived and/or modified sequence from HRSV(A2)__P0DOE7.1__M (opt5)
gggagaguccgcucagccagguugcagaagcggcuuagcguguguccuaaucuucucucugcguguagguaggccugugccgcaaacaagcuuaccauggagaccuacgugaacaagcugcacgaaggcagcacauauacggccgcuguccaguacaauguucucgagaaagacgaugaccccgccucccugaccaucugggugccuauguuccaaucuagcaugccggcggaucuucugauuaaggaacucgcuaacgugaauauccuggucaaacagauuuccacacccaaggggccuucucuuagagugaugaucaacagccgguccgccguucuggcccagaugcccucuaaauuuaccauuugcgcuaaugugagccucgacgagcgcuccaagcuggccuaugaugucacaaccccuugugaaaucaaggcuugcagccugacaugucucaaaucuaagaacaugcugaccacggugaaagaccuuaccaugaagacacugaaucccacccaugauaucauugcccucugcgaguucgagaacaucguuacauccaaaaaggugauuaucccuaccuaccugagaagcauuucuguccggaauaaggaccuuaacacgcuggaaaauaucacaaccacagaguuuaaaaacgcgauuaccaaugccaagaucaucccguauuccggacuccugcuggugauuaccgugacagauaacaaaggcgcuuucaaguacaucaaaccccagagccaauuuauugucgaccucggggccuaucuggaaaaggagucuaucuacuacguuacgaccaauuggaaacacacagcuacccgcuucgccauuaagccuauggaggauugaggacuaguguccaccugucccuccugggcugcuggauugucucguuuuccugccaaauaaacaggaucagcgcuuuacagaucuaaaaaaaaaaaaaaaaaaaaaaaaaaaaaaaaaaaaaaaaaaaaaaaaaaaaaaaaaaaaaaaaugcaucccccccccccccccccccccccccccccccaaaggcucuuuucagagccaccagaauu

SEQ ID NO: 9779 - RNA, 1079 nt, Artificial Sequence
  mRNA product Design c-1 comprising derived and/or modified sequence from HRSV(A2)__P0DOE7.1__M (opt6)
gggagaguccgcucagccagguugcagaagcggcuuagcguguguccuaaucuucucucugcguguagguaggccugugccgcaaacaagcuuaccauggaaacauacguaaacaaacuacacgaaggauccacauacacagcagcaguacaauacaacguacuagaaaaagacgacgacccagcaucuuuaaccauauggguaccaauguuccaaucaucaaugccagcagaccucuuaauaaaagaacuagcaaacguaaacauccuagucaaacaaauaucaacacccaaaggaccaucccucagaguaaugaucaacucaagaucagcaguacuagcacaaaugccaucaaaauucacaauaugcgccaacguuucuuuagacgaacgaucaaaauuagccuacgacguaacaacacccugcgaaauaaaagcaugcucacuaacaugccuaaaaucaaaaaacaugcucacuacaguaaaagaccuaaccaugaaaacacucaacccaacacacgacauaauagcccuaugcgaauuugaaaacauaguaacaucaaaaaaaguaauaaucccaacauacuuaagaucgaucucagucagaaacaaagaccuaaauacacucgaaaacauaacaacaacagaauuuaaaaacgcaauaacaaacgcaaaaauaauaccauacucaggacuacuccuaguaauaacaguaacagacaacaaaggagcauucaaauacauaaaaccacaaucacaauucaucguagaccucggagcauaccuagaaaaagaaucaauauacuacguaacaacaaacuggaaacacaccgccacaagauucgcaauaaaacccauggaagacuaaggacuaguguccaccugucccuccugggcugcuggauugucucguuuuccugccaaauaaacaggaucagcgcuuuacagaucuaaaaaaaaaaaaaaaaaaaaaaaaaaaaaaaaaaaaaaaaaaaaaaaaaaaaaaaaaaaaaaaaugcaucccccccccccccccccccccccccccccccaaaggcucuuuucagagccaccagaauu

SEQ ID NO: 9780 - RNA, 1079 nt, Artificial Sequence
  mRNA product Design c-1 comprising derived and/or modified sequence from HRSV(A2)__P0DOE7.1__M (opt11)
gggagaguccgcucagccagguugcagaagcggcuuagcguguguccuaaucuucucucugcguguagguaggccugugccgcaaacaagcuuaccauggaaaccuacgucaacaaacuacacgaaggcucaaccuacaccgccgccguccaauacaacguccucgaaaaagacgacgaccccgccucccuaaccaucuggguucccauguuccaaucauccaugcccgccgaccuccucauaaaagaacuagccaacgucaacauccuagucaaacaaaucagcacccccaaaggccccucccuccgcguaaugaucaacucccgcuccgccguccuagcccaaaugcccuccaaauuuacaaucugcgccaacgucucccucgacgaacgcucaaaacucgccuacgacgucaccacacccugcgaaaucaaagccugcucccucaccugccucaaaagcaaaaauaugcuaaccaccgucaaagaccuuaccaugaaaacccucaaccccacucacgacaucauagcccucugcgaauuugaaaacaucgucaccuccaaaaaagucaucauccccacauaccuccgcuccaucuccguccgcaacaaagaccucaacacccucgaaaacaucaccaccaccgaauuuaaaaacgccaucaccaacgccaaaaucauccccuacuccggccuccuccucgucaucaccguuaccgacaacaaaggcgccuucaaauacaucaaaccccaaucccaauucaucgucgaccucggagccuaccuugaaaaagaguccaucuacuacgucaccaccaacuggaaacacaccgccacccgauucgccaucaaacccauggaagacuaaggacuaguguccaccugucccuccugggcugcuggauugucucguuuuccugccaaauaaacaggaucagcgcuuuacagaucuaaaaaaaaaaaaaaaaaaaaaaaaaaaaaaaaaaaaaaaaaaaaaaaaaaaaaaaaaaaaaaaaugcaucccccccccccccccccccccccccccccccaaaggcucuuuucagagccaccagaauu

SEQ ID NO: 9781 - RNA, 1169 nt, Artificial Sequence
  mRNA product Design c-2 comprising derived and/or modified sequence from HRSV(A2)__P0DOE7.1__M (wt)
gggagacuccugucgggcggaaguaggaggaguagaguuuaaaaacaguacucuuuuuccgguucgggacguaguugaagcaacgacaagccggauaaccgcucuugagacaggaagcuuaccauggaaacauacgugaacaagcuucacgaaggcuccacauacacagcugcuguucaauacaaugucuuagaaaaagacgaugacccugcaucacuuacaauaugggugcccauguuccaaucaucuaugccagcagauuuacuuauaaaagaacuagcuaaugucaacauacuagugaaacaaauauccacacccaagggaccuucacuaagagucaugauaaacucaagaagugcagugcuagcacaaaugcccagcaaauuuaccauaugcgcuaauguguccuuggaugaaagaagcaaacuagcauaugauguaaccacacccugugaaaucaaggcauguagucuaacaugccuaaaaucaaaaaauauguugacuacaguuaaagaucucacuaugaagacacucaacccuacacaugauauuauugcuuuaugugaauuugaaaacauaguaacaucaaaaaaagucauaauaccaacauaccuaagauccaucagugucagaaauaaagaucugaacacacuugaaaauauaacaaccacugaauucaaaaaugcuaucacaaaugcaaaaaucaucccuuacucaggauuacuauuagucaucacagugacugacaacaaaggagcauucaaauacauaaagccacaaagucaauucauaguagaucuuggagcuuaccuagaaaaagaaaguauauauuauguuaccacaaauuggaagcacacagcuacacgauuugcaaucaaacccauggaagauuaaggacuaguggaagcauuuuccuggcugauuaaaagaaauuacucagcuauggucaucuguuccuguuagaaggcuaugcagcauauuauauacuaugcgcauguuaugaaaugcauaauaaaaaauuuuaaaaaaucuaaaagaucuaaaaaaaaaaaaaaaaaaaaaaaaaaaaaaaaaaaaaaaaaaaaaaaaaaaaaaaaaaaaaaaaugcaucccccccccccccccccccccccccccccccaaaggcucuuuucagagccaccagaauu

SEQ ID NO: 9782 - RNA, 1169 nt, Artificial Sequence
  mRNA product Design c-2 comprising derived and/or modified sequence from HRSV(A2)__P0DOE7.1__M (opt1)
gggagacuccugucgggcggaaguaggaggaguagaguuuaaaaacaguacucuuuuuccgguucgggacguaguugaagcaacgacaagccggauaaccgcucuugagacaggaagcuuaccauggagaccuacgugaacaagcugcacgagggcagcaccuacacggccgccguccaguacaacgugcucgagaaggacgacgaccccgcgucccugaccaucugggugccgauguuccagagcuccaugcccgccgaccugcucaucaaggagcuggccaacgucaacauccuggugaagcagaucagcacccccaaggggcccucccuccgcgugaugaucaacagccgguccgccguccuggcccagaugccgagcaaguucaccaucugcgcgaacgugucccuggacgagcgcagcaagcucgccuacgacgugacgacccccugcgagaucaaggccugcucccugaccugccucaagagcaagaacaugcugaccacggucaaggaccugaccaugaagacccugaaccccacccacgacaucaucgcccucugcgaguucgagaacaucgugacguccaagaaggugaucauccccaccuaccugcggagcaucuccguccgcaacaaggaccugaacacccucgagaacaucaccacgaccgaguucaagaacgcgaucaccaacgccaagaucaucccguacagcggccugcugcucgugaucaccgugacggacaacaagggggccuucaaguacaucaagccccagucccaguucaucgucgaccugggcgccuaccuggagaaggagagcaucuacuacgugaccaccaacuggaagcacaccgccacgcgguucgcgaucaagcccauggaggacugaggacuaguggaagcauuuuccuggcugauuaaaagaaauuacucagcuauggucaucuguuccuguuagaaggcuaugcagcauauuauauacuaugcgcauguuaugaaaugcauaauaaaaaauuuuaaaaaaucuaaaagaucuaaaaaaaaaaaaaaaaaaaaaaaaaaaaaaaaaaaaaaaaaaaaaaaaaaaaaaaaaaaaaaaaugcaucccccccccccccccccccccccccccccccaaaggcucuuuucagagccaccagaauu

SEQ ID NO: 9783 - RNA, 1169 nt, Artificial Sequence
  mRNA product Design c-2 comprising derived and/or modified sequence from HRSV(A2)__P0DOE7.1__M (opt2)
gggagacuccugucgggcggaaguaggaggaguagaguuuaaaaacaguacucuuuuuccgguucgggacguaguugaagcaacgacaagccggauaaccgcucuugagacaggaagcuuaccauggagaccuacgucaacaagcuccacgagggcuccaccuacaccgccgccguccaguacaacguccucgagaaggacgacgaccccgccucccucaccaucuggguccccauguuccaguccuccaugcccgccgaccuccucaucaaggagcucgccaacgucaacauccucgucaagcagaucuccacccccaagggccccucccuccgcgucaugaucaacucccgcuccgccguccucgcccagaugcccuccaaguucaccaucugcgccaacgucucccucgacgagcgcuccaagcucgccuacgacgucaccacccccugcgagaucaaggccugcucccucaccugccucaaguccaagaacaugcucaccaccgucaaggaccucaccaugaagacccucaaccccacccacgacaucaucgcccucugcgaguucgagaacaucgucaccuccaagaaggucaucauccccaccuaccuccgcuccaucuccguccgcaacaaggaccucaacacccucgagaacaucaccaccaccgaguucaagaacgccaucaccaacgccaagaucauccccuacuccggccuccuccucgucaucaccgucaccgacaacaagggcgccuucaaguacaucaagccccagucccaguucaucgucgaccucggcgccuaccucgagaaggaguccaucuacuacgucaccaccaacuggaagcacaccgccacccgcuucgccaucaagcccauggaggacugaggacuaguggaagcauuuuccuggcugauuaaaagaaauuacucagcuauggucaucuguuccuguuagaaggcuaugcagcauauuauauacuaugcgcauguuaugaaaugcauaauaaaaaauuuuaaaaaaucuaaaagaucuaaaaaaaaaaaaaaaaaaaaaaaaaaaaaaaaaaaaaaaaaaaaaaaaaaaaaaaaaaaaaaaaugcaucccccccccccccccccccccccccccccccaaaggcucuuuucagagccaccagaauu

SEQ ID NO: 9784 - RNA, 1169 nt, Artificial Sequence
  mRNA product Design c-2 comprising derived and/or modified sequence from HRSV(A2)__P0DOE7.1__M (opt3)
gggagacuccugucgggcggaaguaggaggaguagaguuuaaaaacaguacucuuuuuccgguucgggacguaguugaagcaacgacaagccggauaaccgcucuugagacaggaagcuuaccauggagaccuacgugaacaagcugcacgaaggcagcacauauacugccgcuguccaguacaauguucucgagaaagacgaugaccccgcaucccuuacgaucugggugccuauguuccaaucuucaaugccagccgaucuguugauuaaggaauuagcgaacguaaauauacuggugaaacagaucaguaccccgaaggggcccagccuaagagucaugauuaacuccaggucugcugugcucgcccagaugccuucgaaauuuacaaucugcgcaaauguuucacuggacgagcggagcaaacuugccuaugaugugacuaccccaugugaaauuaaggcuugcagucugacauguuugaaguccaagaacaugcucaccacugucaaagaccugacaaugaagacccugaaucccacgcaugauaucauagcacucugcgaguucgagaacaucgugacuucuaaaaagguaauuaucccuaccuacuuacgcagcauuuccguucgaaauaaggaccugaacacacuugaaaauaucacuaccacagaguuuaaaaacgccauaaccaaugcuaagauuaucccauauucaggauugcugcuagugauuacggucacugauaacaaaggugccuucaaguacaucaaaccccagagucaauuuaucguggaccucggcgcguaucuggaaaaggagagcauuuacuacgugacaaccaauuggaaacacacugcaacacguuucgccauaaagccuauggaggauugaggacuaguggaagcauuuuccuggcugauuaaaagaaauuacucagcuauggucaucuguuccuguuagaaggcuaugcagcauauuauauacuaugcgcauguuaugaaaugcauaauaaaaaauuuuaaaaaaucuaaaagaucuaaaaaaaaaaaaaaaaaaaaaaaaaaaaaaaaaaaaaaaaaaaaaaaaaaaaaaaaaaaaaaaaugcaucccccccccccccccccccccccccccccccaaaggcucuuuucagagccaccagaauu

SEQ ID NO: 9785 - RNA, 1169 nt, Artificial Sequence
  mRNA product Design c-2 comprising derived and/or modified sequence from HRSV(A2)__P0DOE7.1__M (opt4)
gggagacuccugucgggcggaaguaggaggaguagaguuuaaaaacaguacucuuuuuccgguucgggacguaguugaagcaacgacaagccggauaaccgcucuugagacaggaagcuuaccauggagaccuacgugaacaagcugcacgagggcagcaccuacaccgccgccgugcaguacaacgugcuggagaaggacgacgaccccgccagccugaccaucugggugcccauguuccagagcagcaugcccgccgaccugcugaucaaggagcuggccaacgugaacauccuggugaagcagaucagcacccccaagggccccagccugagagugaugaucaacagcagaagcgccgugcuggcccagaugcccagcaaguucaccaucugcgccaacgugagccuggacgagagaagcaagcuggccuacgacgugaccacccccugcgagaucaaggccugcagccugaccugccugaagagcaagaacaugcugaccaccgugaaggaccugaccaugaagacccugaaccccacccacgacaucaucgcccugugcgaguucgagaacaucgugaccagcaagaaggugaucauccccaccuaccugagaagcaucagcgugagaaacaaggaccugaacacccuggagaacaucaccaccaccgaguucaagaacgccaucaccaacgccaagaucauccccuacagcggccugcugcuggugaucaccgugaccgacaacaagggcgccuucaaguacaucaagccccagagccaguucaucguggaccugggcgccuaccuggagaaggagagcaucuacuacgugaccaccaacuggaagcacaccgccaccagauucgccaucaagcccauggaggacugaggacuaguggaagcauuuuccuggcugauuaaaagaaauuacucagcuauggucaucuguuccuguuagaaggcuaugcagcauauuauauacuaugcgcauguuaugaaaugcauaauaaaaaauuuuaaaaaaucuaaaagaucuaaaaaaaaaaaaaaaaaaaaaaaaaaaaaaaaaaaaaaaaaaaaaaaaaaaaaaaaaaaaaaaaugcaucccccccccccccccccccccccccccccccaaaggcucuuuucagagccaccagaauu

SEQ ID NO: 9786 - RNA, 1169 nt, Artificial Sequence
  mRNA product Design c-2 comprising derived and/or modified sequence from HRSV(A2)__P0DOE7.1__M (opt5)
gggagacuccugucgggcggaaguaggaggaguagaguuuaaaaacaguacucuuuuuccgguucgggacguaguugaagcaacgacaagccggauaaccgcucuugagacaggaagcuuaccauggagaccuacgugaacaagcugcacgaaggcagcacauauacggccgcuguccaguacaauguucucgagaaagacgaugaccccgccucccugaccaucugggugccuauguuccaaucuagcaugccggcggaucuucugauuaaggaacucgcuaacgugaauauccuggucaaacagauuuccacacccaaggggccuucucuuagagugaugaucaacagccgguccgccguucuggcccagaugcccucuaaauuuaccauuugcgcuaaugugagccucgacgagcgcuccaagcuggccuaugaugucacaaccccuugugaaaucaaggcuugcagccugacaugucucaaaucuaagaacaugcugaccacggugaaagaccuuaccaugaagacacugaaucccacccaugauaucauugcccucugcgaguucgagaacaucguuacauccaaaaaggugauuaucccuaccuaccugagaagcauuucuguccggaauaaggaccuuaacacgcuggaaaauaucacaaccacagaguuuaaaaacgcgauuaccaaugccaagaucaucccguauuccggacuccugcuggugauuaccgugacagauaacaaaggcgcuuucaaguacaucaaaccccagagccaauuuauugucgaccucggggccuaucuggaaaaggagucuaucuacuacguuacgaccaauuggaaacacacagcuacccgcuucgccauuaagccuauggaggauugaggacuaguggaagcauuuuccuggcugauuaaaagaaauuacucagcuauggucaucuguuccuguuagaaggcuaugcagcauauuauauacuaugcgcauguuaugaaaugcauaauaaaaaauuuuaaaaaaucuaaaagaucuaaaaaaaaaaaaaaaaaaaaaaaaaaaaaaaaaaaaaaaaaaaaaaaaaaaaaaaaaaaaaaaaugcaucccccccccccccccccccccccccccccccaaaggcucuuuucagagccaccagaauu

SEQ ID NO: 9787 - RNA, 1169 nt, Artificial Sequence
  mRNA product Design c-2 comprising derived and/or modified sequence from HRSV(A2)__P0DOE7.1__M (opt6)
gggagacuccugucgggcggaaguaggaggaguagaguuuaaaaacaguacucuuuuuccgguucgggacguaguugaagcaacgacaagccggauaaccgcucuugagacaggaagcuuaccauggaaacauacguaaacaaacuacacgaaggauccacauacacagcagcaguacaauacaacguacuagaaaaagacgacgacccagcaucuuuaaccauauggguaccaauguuccaaucaucaaugccagcagaccucuuaauaaaagaacuagcaaacguaaacauccuagucaaacaaauaucaacacccaaaggaccaucccucagaguaaugaucaacucaagaucagcaguacuagcacaaaugccaucaaaauucacaauaugcgccaacguuucuuuagacgaacgaucaaaauuagccuacgacguaacaacacccugcgaaauaaaagcaugcucacuaacaugccuaaaaucaaaaaacaugcucacuacaguaaaagaccuaaccaugaaaacacucaacccaacacacgacauaauagcccuaugcgaauuugaaaacauaguaacaucaaaaaaaguaauaaucccaacauacuuaagaucgaucucagucagaaacaaagaccuaaauacacucgaaaacauaacaacaacagaauuuaaaaacgcaauaacaaacgcaaaaauaauaccauacucaggacuacuccuaguaauaacaguaacagacaacaaaggagcauucaaauacauaaaaccacaaucacaauucaucguagaccucggagcauaccuagaaaaagaaucaauauacuacguaacaacaaacuggaaacacaccgccacaagauucgcaauaaaacccauggaagacuaaggacuaguggaagcauuuuccuggcugauuaaaagaaauuacucagcuauggucaucuguuccuguuagaaggcuaugcagcauauuauauacuaugcgcauguuaugaaaugcauaauaaaaaauuuuaaaaaaucuaaaagaucuaaaaaaaaaaaaaaaaaaaaaaaaaaaaaaaaaaaaaaaaaaaaaaaaaaaaaaaaaaaaaaaaugcaucccccccccccccccccccccccccccccccaaaggcucuuuucagagccaccagaauu

SEQ ID NO: 9788 - RNA, 1169 nt, Artificial Sequence
  mRNA product Design c-2 comprising derived and/or modified sequence from HRSV(A2)__P0DOE7.1__M (opt11)
gggagacuccugucgggcggaaguaggaggaguagaguuuaaaaacaguacucuuuuuccgguucgggacguaguugaagcaacgacaagccggauaaccgcucuugagacaggaagcuuaccauggaaaccuacgucaacaaacuacacgaaggcucaaccuacaccgccgccguccaauacaacguccucgaaaaagacgacgaccccgccucccuaaccaucuggguucccauguuccaaucauccaugcccgccgaccuccucauaaaagaacuagccaacgucaacauccuagucaaacaaaucagcacccccaaaggccccucccuccgcguaaugaucaacucccgcuccgccguccuagcccaaaugcccuccaaauuuacaaucugcgccaacgucucccucgacgaacgcucaaaacucgccuacgacgucaccacacccugcgaaaucaaagccugcucccucaccugccucaaaagcaaaaauaugcuaaccaccgucaaagaccuuaccaugaaaacccucaaccccacucacgacaucauagcccucugcgaauuugaaaacaucgucaccuccaaaaaagucaucauccccacauaccuccgcuccaucuccguccgcaacaaagaccucaacacccucgaaaacaucaccaccaccgaauuuaaaaacgccaucaccaacgccaaaaucauccccuacuccggccuccuccucgucaucaccguuaccgacaacaaaggcgccuucaaauacaucaaaccccaaucccaauucaucgucgaccucggagccuaccuugaaaaagaguccaucuacuacgucaccaccaacuggaaacacaccgccacccgauucgccaucaaacccauggaagacuaaggacuaguggaagcauuuuccuggcugauuaaaagaaauuacucagcuauggucaucuguuccuguuagaaggcuaugcagcauauuauauacuaugcgcauguuaugaaaugcauaauaaaaaauuuuaaaaaaucuaaaagaucuaaaaaaaaaaaaaaaaaaaaaaaaaaaaaaaaaaaaaaaaaaaaaaaaaaaaaaaaaaaaaaaaugcaucccccccccccccccccccccccccccccccaaaggcucuuuucagagccaccagaauu

SEQ ID NO: 9789 - RNA, 1146 nt, Artificial Sequence
  mRNA product Design c-3 comprising derived and/or modified sequence from HRSV(A2)__P0DOE7.1__M (wt)
gggagaguccgcucagccagguugcagaagcggcuuagcguguguccuaaucuucucucugcguguagguaggccugugccgcaaacaagcuuaccauggaaacauacgugaacaagcuucacgaaggcuccacauacacagcugcuguucaauacaaugucuuagaaaaagacgaugacccugcaucacuuacaauaugggugcccauguuccaaucaucuaugccagcagauuuacuuauaaaagaacuagcuaaugucaacauacuagugaaacaaauauccacacccaagggaccuucacuaagagucaugauaaacucaagaagugcagugcuagcacaaaugcccagcaaauuuaccauaugcgcuaauguguccuuggaugaaagaagcaaacuagcauaugauguaaccacacccugugaaaucaaggcauguagucuaacaugccuaaaaucaaaaaauauguugacuacaguuaaagaucucacuaugaagacacucaacccuacacaugauauuauugcuuuaugugaauuugaaaacauaguaacaucaaaaaaagucauaauaccaacauaccuaagauccaucagugucagaaauaaagaucugaacacacuugaaaauauaacaaccacugaauucaaaaaugcuaucacaaaugcaaaaaucaucccuuacucaggauuacuauuagucaucacagugacugacaacaaaggagcauucaaauacauaaagccacaaagucaauucauaguagaucuuggagcuuaccuagaaaaagaaaguauauauuauguuaccacaaauuggaagcacacagcuacacgauuugcaaucaaacccauggaagauuaaggacuaguacuggcugcaucucccuuuccucuguccuccauccuucucccaggauggugaagggggaccugguacccagugauccccaccccaggauccuaaaucaugacuuaccugcuaauaaaaacucauuggaaaagugagaagaucuaaaaaaaaaaaaaaaaaaaaaaaaaaaaaaaaaaaaaaaaaaaaaaaaaaaaaaaaaaaaaaaaugcaucccccccccccccccccccccccccccccccaaaggcucuuuucagagccaccagaauu

SEQ ID NO: 9790 - RNA, 1146 nt, Artificial Sequence
  mRNA product Design c-3 comprising derived and/or modified sequence from HRSV(A2)__P0DOE7.1__M (opt1)
gggagaguccgcucagccagguugcagaagcggcuuagcguguguccuaaucuucucucugcguguagguaggccugugccgcaaacaagcuuaccauggagaccuacgugaacaagcugcacgagggcagcaccuacacggccgccguccaguacaacgugcucgagaaggacgacgaccccgcgucccugaccaucugggugccgauguuccagagcuccaugcccgccgaccugcucaucaaggagcuggccaacgucaacauccuggugaagcagaucagcacccccaaggggcccucccuccgcgugaugaucaacagccgguccgccguccuggcccagaugccgagcaaguucaccaucugcgcgaacgugucccuggacgagcgcagcaagcucgccuacgacgugacgacccccugcgagaucaaggccugcucccugaccugccucaagagcaagaacaugcugaccacggucaaggaccugaccaugaagacccugaaccccacccacgacaucaucgcccucugcgaguucgagaacaucgugacguccaagaaggugaucauccccaccuaccugcggagcaucuccguccgcaacaaggaccugaacacccucgagaacaucaccacgaccgaguucaagaacgcgaucaccaacgccaagaucaucccguacagcggccugcugcucgugaucaccgugacggacaacaagggggccuucaaguacaucaagccccagucccaguucaucgucgaccugggcgccuaccuggagaaggagagcaucuacuacgugaccaccaacuggaagcacaccgccacgcgguucgcgaucaagcccauggaggacugaggacuaguacuggcugcaucucccuuuccucuguccuccauccuucucccaggauggugaagggggaccugguacccagugauccccaccccaggauccuaaaucaugacuuaccugcuaauaaaaacucauuggaaaagugagaagaucuaaaaaaaaaaaaaaaaaaaaaaaaaaaaaaaaaaaaaaaaaaaaaaaaaaaaaaaaaaaaaaaaugcaucccccccccccccccccccccccccccccccaaaggcucuuuucagagccaccagaauu

SEQ ID NO: 9791 - RNA, 1146 nt, Artificial Sequence
  mRNA product Design c-3 comprising derived and/or modified sequence from HRSV(A2)__P0DOE7.1__M (opt2)
gggagaguccgcucagccagguugcagaagcggcuuagcguguguccuaaucuucucucugcguguagguaggccugugccgcaaacaagcuuaccauggagaccuacgucaacaagcuccacgagggcuccaccuacaccgccgccguccaguacaacguccucgagaaggacgacgaccccgccucccucaccaucuggguccccauguuccaguccuccaugcccgccgaccuccucaucaaggagcucgccaacgucaacauccucgucaagcagaucuccacccccaagggccccucccuccgcgucaugaucaacucccgcuccgccguccucgcccagaugcccuccaaguucaccaucugcgccaacgucucccucgacgagcgcuccaagcucgccuacgacgucaccacccccugcgagaucaaggccugcucccucaccugccucaaguccaagaacaugcucaccaccgucaaggaccucaccaugaagacccucaaccccacccacgacaucaucgcccucugcgaguucgagaacaucgucaccuccaagaaggucaucauccccaccuaccuccgcuccaucuccguccgcaacaaggaccucaacacccucgagaacaucaccaccaccgaguucaagaacgccaucaccaacgccaagaucauccccuacuccggccuccuccucgucaucaccgucaccgacaacaagggcgccuucaaguacaucaagccccagucccaguucaucgucgaccucggcgccuaccucgagaaggaguccaucuacuacgucaccaccaacuggaagcacaccgccacccgcuucgccaucaagcccauggaggacugaggacuaguacuggcugcaucucccuuuccucuguccuccauccuucucccaggauggugaagggggaccugguacccagugauccccaccccaggauccuaaaucaugacuuaccugcuaauaaaaacucauuggaaaagugagaagaucuaaaaaaaaaaaaaaaaaaaaaaaaaaaaaaaaaaaaaaaaaaaaaaaaaaaaaaaaaaaaaaaaugcaucccccccccccccccccccccccccccccccaaaggcucuuuucagagccaccagaauu

SEQ ID NO: 9792 - RNA, 1146 nt, Artificial Sequence
  mRNA product Design c-3 comprising derived and/or modified sequence from HRSV(A2)__P0DOE7.1__M (opt3)
gggagaguccgcucagccagguugcagaagcggcuuagcguguguccuaaucuucucucugcguguagguaggccugugccgcaaacaagcuuaccauggagaccuacgugaacaagcugcacgaaggcagcacauauacugccgcuguccaguacaauguucucgagaaagacgaugaccccgcaucccuuacgaucugggugccuauguuccaaucuucaaugccagccgaucuguugauuaaggaauuagcgaacguaaauauacuggugaaacagaucaguaccccgaaggggcccagccuaagagucaugauuaacuccaggucugcugugcucgcccagaugccuucgaaauuuacaaucugcgcaaauguuucacuggacgagcggagcaaacuugccuaugaugugacuaccccaugugaaauuaaggcuugcagucugacauguuugaaguccaagaacaugcucaccacugucaaagaccugacaaugaagacccugaaucccacgcaugauaucauagcacucugcgaguucgagaacaucgugacuucuaaaaagguaauuaucccuaccuacuuacgcagcauuuccguucgaaauaaggaccugaacacacuugaaaauaucacuaccacagaguuuaaaaacgccauaaccaaugcuaagauuaucccauauucaggauugcugcuagugauuacggucacugauaacaaaggugccuucaaguacaucaaaccccagagucaauuuaucguggaccucggcgcguaucuggaaaaggagagcauuuacuacgugacaaccaauuggaaacacacugcaacacguuucgccauaaagccuauggaggauugaggacuaguacuggcugcaucucccuuuccucuguccuccauccuucucccaggauggugaagggggaccugguacccagugauccccaccccaggauccuaaaucaugacuuaccugcuaauaaaaacucauuggaaaagugagaagaucuaaaaaaaaaaaaaaaaaaaaaaaaaaaaaaaaaaaaaaaaaaaaaaaaaaaaaaaaaaaaaaaaugcaucccccccccccccccccccccccccccccccaaaggcucuuuucagagccaccagaauu

SEQ ID NO: 9793 - RNA, 1146 nt, Artificial Sequence
  mRNA product Design c-3 comprising derived and/or modified sequence from HRSV(A2)__P0DOE7.1__M (opt4)
gggagaguccgcucagccagguugcagaagcggcuuagcguguguccuaaucuucucucugcguguagguaggccugugccgcaaacaagcuuaccauggagaccuacgugaacaagcugcacgagggcagcaccuacaccgccgccgugcaguacaacgugcuggagaaggacgacgaccccgccagccugaccaucugggugcccauguuccagagcagcaugcccgccgaccugcugaucaaggagcuggccaacgugaacauccuggugaagcagaucagcacccccaagggccccagccugagagugaugaucaacagcagaagcgccgugcuggcccagaugcccagcaaguucaccaucugcgccaacgugagccuggacgagagaagcaagcuggccuacgacgugaccacccccugcgagaucaaggccugcagccugaccugccugaagagcaagaacaugcugaccaccgugaaggaccugaccaugaagacccugaaccccacccacgacaucaucgcccugugcgaguucgagaacaucgugaccagcaagaaggugaucauccccaccuaccugagaagcaucagcgugagaaacaaggaccugaacacccuggagaacaucaccaccaccgaguucaagaacgccaucaccaacgccaagaucauccccuacagcggccugcugcuggugaucaccgugaccgacaacaagggcgccuucaaguacaucaagccccagagccaguucaucguggaccugggcgccuaccuggagaaggagagcaucuacuacgugaccaccaacuggaagcacaccgccaccagauucgccaucaagcccauggaggacugaggacuaguacuggcugcaucucccuuuccucuguccuccauccuucucccaggauggugaagggggaccugguacccagugauccccaccccaggauccuaaaucaugacuuaccugcuaauaaaaacucauuggaaaagugagaagaucuaaaaaaaaaaaaaaaaaaaaaaaaaaaaaaaaaaaaaaaaaaaaaaaaaaaaaaaaaaaaaaaaugcaucccccccccccccccccccccccccccccccaaaggcucuuuucagagccaccagaauu

SEQ ID NO: 9794 - RNA, 1146 nt, Artificial Sequence
  mRNA product Design c-3 comprising derived and/or modified sequence from HRSV(A2)__P0DOE7.1__M (opt5)
gggagaguccgcucagccagguugcagaagcggcuuagcguguguccuaaucuucucucugcguguagguaggccugugccgcaaacaagcuuaccauggagaccuacgugaacaagcugcacgaaggcagcacauauacggccgcuguccaguacaauguucucgagaaagacgaugaccccgccucccugaccaucugggugccuauguuccaaucuagcaugccggcggaucuucugauuaaggaacucgcuaacgugaauauccuggucaaacagauuuccacacccaaggggccuucucuuagagugaugaucaacagccgguccgccguucuggcccagaugcccucuaaauuuaccauuugcgcuaaugugagccucgacgagcgcuccaagcuggccuaugaugucacaaccccuugugaaaucaaggcuugcagccugacaugucucaaaucuaagaacaugcugaccacggugaaagaccuuaccaugaagacacugaaucccacccaugauaucauugcccucugcgaguucgagaacaucguuacauccaaaaaggugauuaucccuaccuaccugagaagcauuucuguccggaauaaggaccuuaacacgcuggaaaauaucacaaccacagaguuuaaaaacgcgauuaccaaugccaagaucaucccguauuccggacuccugcuggugauuaccgugacagauaacaaaggcgcuuucaaguacaucaaaccccagagccaauuuauugucgaccucggggccuaucuggaaaaggagucuaucuacuacguuacgaccaauuggaaacacacagcuacccgcuucgccauuaagccuauggaggauugaggacuaguacuggcugcaucucccuuuccucuguccuccauccuucucccaggauggugaagggggaccugguacccagugauccccaccccaggauccuaaaucaugacuuaccugcuaauaaaaacucauuggaaaagugagaagaucuaaaaaaaaaaaaaaaaaaaaaaaaaaaaaaaaaaaaaaaaaaaaaaaaaaaaaaaaaaaaaaaaugcaucccccccccccccccccccccccccccccccaaaggcucuuuucagagccaccagaauu

SEQ ID NO: 9795 - RNA, 1146 nt, Artificial Sequence
  mRNA product Design c-3 comprising derived and/or modified sequence from HRSV(A2)__P0DOE7.1__M (opt6)
gggagaguccgcucagccagguugcagaagcggcuuagcguguguccuaaucuucucucugcguguagguaggccugugccgcaaacaagcuuaccauggaaacauacguaaacaaacuacacgaaggauccacauacacagcagcaguacaauacaacguacuagaaaaagacgacgacccagcaucuuuaaccauauggguaccaauguuccaaucaucaaugccagcagaccucuuaauaaaagaacuagcaaacguaaacauccuagucaaacaaauaucaacacccaaaggaccaucccucagaguaaugaucaacucaagaucagcaguacuagcacaaaugccaucaaaauucacaauaugcgccaacguuucuuuagacgaacgaucaaaauuagccuacgacguaacaacacccugcgaaauaaaagcaugcucacuaacaugccuaaaaucaaaaaacaugcucacuacaguaaaagaccuaaccaugaaaacacucaacccaacacacgacauaauagcccuaugcgaauuugaaaacauaguaacaucaaaaaaaguaauaaucccaacauacuuaagaucgaucucagucagaaacaaagaccuaaauacacucgaaaacauaacaacaacagaauuuaaaaacgcaauaacaaacgcaaaaauaauaccauacucaggacuacuccuaguaauaacaguaacagacaacaaaggagcauucaaauacauaaaaccacaaucacaauucaucguagaccucggagcauaccuagaaaaagaaucaauauacuacguaacaacaaacuggaaacacaccgccacaagauucgcaauaaaacccauggaagacuaaggacuaguacuggcugcaucucccuuuccucuguccuccauccuucucccaggauggugaagggggaccugguacccagugauccccaccccaggauccuaaaucaugacuuaccugcuaauaaaaacucauuggaaaagugagaagaucuaaaaaaaaaaaaaaaaaaaaaaaaaaaaaaaaaaaaaaaaaaaaaaaaaaaaaaaaaaaaaaaaugcaucccccccccccccccccccccccccccccccaaaggcucuuuucagagccaccagaauu

SEQ ID NO: 9796 - RNA, 1146 nt, Artificial Sequence
  mRNA product Design c-3 comprising derived and/or modified sequence from HRSV(A2)__P0DOE7.1__M (opt11)
gggagaguccgcucagccagguugcagaagcggcuuagcguguguccuaaucuucucucugcguguagguaggccugugccgcaaacaagcuuaccauggaaaccuacgucaacaaacuacacgaaggcucaaccuacaccgccgccguccaauacaacguccucgaaaaagacgacgaccccgccucccuaaccaucuggguucccauguuccaaucauccaugcccgccgaccuccucauaaaagaacuagccaacgucaacauccuagucaaacaaaucagcacccccaaaggccccucccuccgcguaaugaucaacucccgcuccgccguccuagcccaaaugcccuccaaauuuacaaucugcgccaacgucucccucgacgaacgcucaaaacucgccuacgacgucaccacacccugcgaaaucaaagccugcucccucaccugccucaaaagcaaaaauaugcuaaccaccgucaaagaccuuaccaugaaaacccucaaccccacucacgacaucauagcccucugcgaauuugaaaacaucgucaccuccaaaaaagucaucauccccacauaccuccgcuccaucuccguccgcaacaaagaccucaacacccucgaaaacaucaccaccaccgaauuuaaaaacgccaucaccaacgccaaaaucauccccuacuccggccuccuccucgucaucaccguuaccgacaacaaaggcgccuucaaauacaucaaaccccaaucccaauucaucgucgaccucggagccuaccuugaaaaagaguccaucuacuacgucaccaccaacuggaaacacaccgccacccgauucgccaucaaacccauggaagacuaaggacuaguacuggcugcaucucccuuuccucuguccuccauccuucucccaggauggugaagggggaccugguacccagugauccccaccccaggauccuaaaucaugacuuaccugcuaauaaaaacucauuggaaaagugagaagaucuaaaaaaaaaaaaaaaaaaaaaaaaaaaaaaaaaaaaaaaaaaaaaaaaaaaaaaaaaaaaaaaaugcaucccccccccccccccccccccccccccccccaaaggcucuuuucagagccaccagaauu

SEQ ID NO: 9797 - RNA, 1142 nt, Artificial Sequence
  mRNA product Design c-4 comprising derived and/or modified sequence from HRSV(A2)__P0DOE7.1__M (wt)
gggagaguccgcucagccagguugcagaagcggcuuagcguguguccuaaucuucucucugcguguagguaggccugugccgcaaacaagcuuaccauggaaacauacgugaacaagcuucacgaaggcuccacauacacagcugcuguucaauacaaugucuuagaaaaagacgaugacccugcaucacuuacaauaugggugcccauguuccaaucaucuaugccagcagauuuacuuauaaaagaacuagcuaaugucaacauacuagugaaacaaauauccacacccaagggaccuucacuaagagucaugauaaacucaagaagugcagugcuagcacaaaugcccagcaaauuuaccauaugcgcuaauguguccuuggaugaaagaagcaaacuagcauaugauguaaccacacccugugaaaucaaggcauguagucuaacaugccuaaaaucaaaaaauauguugacuacaguuaaagaucucacuaugaagacacucaacccuacacaugauauuauugcuuuaugugaauuugaaaacauaguaacaucaaaaaaagucauaauaccaacauaccuaagauccaucagugucagaaauaaagaucugaacacacuugaaaauauaacaaccacugaauucaaaaaugcuaucacaaaugcaaaaaucaucccuuacucaggauuacuauuagucaucacagugacugacaacaaaggagcauucaaauacauaaagccacaaagucaauucauaguagaucuuggagcuuaccuagaaaaagaaaguauauauuauguuaccacaaauuggaagcacacagcuacacgauuugcaaucaaacccauggaagauuaaggacuaguggaagcauuuuccuggcugauuaaaagaaauuacucagcuauggucaucuguuccuguuagaaggcuaugcagcauauuauauacuaugcgcauguuaugaaaugcauaauaaaaaauuuuaaaaaaucuaaaagaucuaaaaaaaaaaaaaaaaaaaaaaaaaaaaaaaaaaaaaaaaaaaaaaaaaaaaaaaaaaaaaaaaugcaucccccccccccccccccccccccccccccccaaaggcucuuuucagagccaccagaauu

SEQ ID NO: 9798 - RNA, 1142 nt, Artificial Sequence
  mRNA product Design c-4 comprising derived and/or modified sequence from HRSV(A2)__P0DOE7.1__M (opt1)
gggagaguccgcucagccagguugcagaagcggcuuagcguguguccuaaucuucucucugcguguagguaggccugugccgcaaacaagcuuaccauggagaccuacgugaacaagcugcacgagggcagcaccuacacggccgccguccaguacaacgugcucgagaaggacgacgaccccgcgucccugaccaucugggugccgauguuccagagcuccaugcccgccgaccugcucaucaaggagcuggccaacgucaacauccuggugaagcagaucagcacccccaaggggcccucccuccgcgugaugaucaacagccgguccgccguccuggcccagaugccgagcaaguucaccaucugcgcgaacgugucccuggacgagcgcagcaagcucgccuacgacgugacgacccccugcgagaucaaggccugcucccugaccugccucaagagcaagaacaugcugaccacggucaaggaccugaccaugaagacccugaaccccacccacgacaucaucgcccucugcgaguucgagaacaucgugacguccaagaaggugaucauccccaccuaccugcggagcaucuccguccgcaacaaggaccugaacacccucgagaacaucaccacgaccgaguucaagaacgcgaucaccaacgccaagaucaucccguacagcggccugcugcucgugaucaccgugacggacaacaagggggccuucaaguacaucaagccccagucccaguucaucgucgaccugggcgccuaccuggagaaggagagcaucuacuacgugaccaccaacuggaagcacaccgccacgcgguucgcgaucaagcccauggaggacugaggacuaguggaagcauuuuccuggcugauuaaaagaaauuacucagcuauggucaucuguuccuguuagaaggcuaugcagcauauuauauacuaugcgcauguuaugaaaugcauaauaaaaaauuuuaaaaaaucuaaaagaucuaaaaaaaaaaaaaaaaaaaaaaaaaaaaaaaaaaaaaaaaaaaaaaaaaaaaaaaaaaaaaaaaugcaucccccccccccccccccccccccccccccccaaaggcucuuuucagagccaccagaauu

SEQ ID NO: 9799 - RNA, 1142 nt, Artificial Sequence
  mRNA product Design c-4 comprising derived and/or modified sequence from HRSV(A2)__P0DOE7.1__M (opt2)
gggagaguccgcucagccagguugcagaagcggcuuagcguguguccuaaucuucucucugcguguagguaggccugugccgcaaacaagcuuaccauggagaccuacgucaacaagcuccacgagggcuccaccuacaccgccgccguccaguacaacguccucgagaaggacgacgaccccgccucccucaccaucuggguccccauguuccaguccuccaugcccgccgaccuccucaucaaggagcucgccaacgucaacauccucgucaagcagaucuccacccccaagggccccucccuccgcgucaugaucaacucccgcuccgccguccucgcccagaugcccuccaaguucaccaucugcgccaacgucucccucgacgagcgcuccaagcucgccuacgacgucaccacccccugcgagaucaaggccugcucccucaccugccucaaguccaagaacaugcucaccaccgucaaggaccucaccaugaagacccucaaccccacccacgacaucaucgcccucugcgaguucgagaacaucgucaccuccaagaaggucaucauccccaccuaccuccgcuccaucuccguccgcaacaaggaccucaacacccucgagaacaucaccaccaccgaguucaagaacgccaucaccaacgccaagaucauccccuacuccggccuccuccucgucaucaccgucaccgacaacaagggcgccuucaaguacaucaagccccagucccaguucaucgucgaccucggcgccuaccucgagaaggaguccaucuacuacgucaccaccaacuggaagcacaccgccacccgcuucgccaucaagcccauggaggacugaggacuaguggaagcauuuuccuggcugauuaaaagaaauuacucagcuauggucaucuguuccuguuagaaggcuaugcagcauauuauauacuaugcgcauguuaugaaaugcauaauaaaaaauuuuaaaaaaucuaaaagaucuaaaaaaaaaaaaaaaaaaaaaaaaaaaaaaaaaaaaaaaaaaaaaaaaaaaaaaaaaaaaaaaaugcaucccccccccccccccccccccccccccccccaaaggcucuuuucagagccaccagaauu

SEQ ID NO: 9800 - RNA, 1142 nt, Artificial Sequence
  mRNA product Design c-4 comprising derived and/or modified sequence from HRSV(A2)__P0DOE7.1__M (opt3)
gggagaguccgcucagccagguugcagaagcggcuuagcguguguccuaaucuucucucugcguguagguaggccugugccgcaaacaagcuuaccauggagaccuacgugaacaagcugcacgaaggcagcacauauacugccgcuguccaguacaauguucucgagaaagacgaugaccccgcaucccuuacgaucugggugccuauguuccaaucuucaaugccagccgaucuguugauuaaggaauuagcgaacguaaauauacuggugaaacagaucaguaccccgaaggggcccagccuaagagucaugauuaacuccaggucugcugugcucgcccagaugccuucgaaauuuacaaucugcgcaaauguuucacuggacgagcggagcaaacuugccuaugaugugacuaccccaugugaaauuaaggcuugcagucugacauguuugaaguccaagaacaugcucaccacugucaaagaccugacaaugaagacccugaaucccacgcaugauaucauagcacucugcgaguucgagaacaucgugacuucuaaaaagguaauuaucccuaccuacuuacgcagcauuuccguucgaaauaaggaccugaacacacuugaaaauaucacuaccacagaguuuaaaaacgccauaaccaaugcuaagauuaucccauauucaggauugcugcuagugauuacggucacugauaacaaaggugccuucaaguacaucaaaccccagagucaauuuaucguggaccucggcgcguaucuggaaaaggagagcauuuacuacgugacaaccaauuggaaacacacugcaacacguuucgccauaaagccuauggaggauugaggacuaguggaagcauuuuccuggcugauuaaaagaaauuacucagcuauggucaucuguuccuguuagaaggcuaugcagcauauuauauacuaugcgcauguuaugaaaugcauaauaaaaaauuuuaaaaaaucuaaaagaucuaaaaaaaaaaaaaaaaaaaaaaaaaaaaaaaaaaaaaaaaaaaaaaaaaaaaaaaaaaaaaaaaugcaucccccccccccccccccccccccccccccccaaaggcucuuuucagagccaccagaauu

SEQ ID NO: 9801 - RNA, 1142 nt, Artificial Sequence
  mRNA product Design c-4 comprising derived and/or modified sequence from HRSV(A2)__P0DOE7.1__M (opt4)
gggagaguccgcucagccagguugcagaagcggcuuagcguguguccuaaucuucucucugcguguagguaggccugugccgcaaacaagcuuaccauggagaccuacgugaacaagcugcacgagggcagcaccuacaccgccgccgugcaguacaacgugcuggagaaggacgacgaccccgccagccugaccaucugggugcccauguuccagagcagcaugcccgccgaccugcugaucaaggagcuggccaacgugaacauccuggugaagcagaucagcacccccaagggccccagccugagagugaugaucaacagcagaagcgccgugcuggcccagaugcccagcaaguucaccaucugcgccaacgugagccuggacgagagaagcaagcuggccuacgacgugaccacccccugcgagaucaaggccugcagccugaccugccugaagagcaagaacaugcugaccaccgugaaggaccugaccaugaagacccugaaccccacccacgacaucaucgcccugugcgaguucgagaacaucgugaccagcaagaaggugaucauccccaccuaccugagaagcaucagcgugagaaacaaggaccugaacacccuggagaacaucaccaccaccgaguucaagaacgccaucaccaacgccaagaucauccccuacagcggccugcugcuggugaucaccgugaccgacaacaagggcgccuucaaguacaucaagccccagagccaguucaucguggaccugggcgccuaccuggagaaggagagcaucuacuacgugaccaccaacuggaagcacaccgccaccagauucgccaucaagcccauggaggacugaggacuaguggaagcauuuuccuggcugauuaaaagaaauuacucagcuauggucaucuguuccuguuagaaggcuaugcagcauauuauauacuaugcgcauguuaugaaaugcauaauaaaaaauuuuaaaaaaucuaaaagaucuaaaaaaaaaaaaaaaaaaaaaaaaaaaaaaaaaaaaaaaaaaaaaaaaaaaaaaaaaaaaaaaaugcaucccccccccccccccccccccccccccccccaaaggcucuuuucagagccaccagaauu

SEQ ID NO: 9802 - RNA, 1142 nt, Artificial Sequence
  mRNA product Design c-4 comprising derived and/or modified sequence from HRSV(A2)__P0DOE7.1__M (opt5)
gggagaguccgcucagccagguugcagaagcggcuuagcguguguccuaaucuucucucugcguguagguaggccugugccgcaaacaagcuuaccauggagaccuacgugaacaagcugcacgaaggcagcacauauacggccgcuguccaguacaauguucucgagaaagacgaugaccccgccucccugaccaucugggugccuauguuccaaucuagcaugccggcggaucuucugauuaaggaacucgcuaacgugaauauccuggucaaacagauuuccacacccaaggggccuucucuuagagugaugaucaacagccgguccgccguucuggcccagaugcccucuaaauuuaccauuugcgcuaaugugagccucgacgagcgcuccaagcuggccuaugaugucacaaccccuugugaaaucaaggcuugcagccugacaugucucaaaucuaagaacaugcugaccacggugaaagaccuuaccaugaagacacugaaucccacccaugauaucauugcccucugcgaguucgagaacaucguuacauccaaaaaggugauuaucccuaccuaccugagaagcauuucuguccggaauaaggaccuuaacacgcuggaaaauaucacaaccacagaguuuaaaaacgcgauuaccaaugccaagaucaucccguauuccggacuccugcuggugauuaccgugacagauaacaaaggcgcuuucaaguacaucaaaccccagagccaauuuauugucgaccucggggccuaucuggaaaaggagucuaucuacuacguuacgaccaauuggaaacacacagcuacccgcuucgccauuaagccuauggaggauugaggacuaguggaagcauuuuccuggcugauuaaaagaaauuacucagcuauggucaucuguuccuguuagaaggcuaugcagcauauuauauacuaugcgcauguuaugaaaugcauaauaaaaaauuuuaaaaaaucuaaaagaucuaaaaaaaaaaaaaaaaaaaaaaaaaaaaaaaaaaaaaaaaaaaaaaaaaaaaaaaaaaaaaaaaugcaucccccccccccccccccccccccccccccccaaaggcucuuuucagagccaccagaauu

SEQ ID NO: 9803 - RNA, 1142 nt, Artificial Sequence
  mRNA product Design c-4 comprising derived and/or modified sequence from HRSV(A2)__P0DOE7.1__M (opt6)
gggagaguccgcucagccagguugcagaagcggcuuagcguguguccuaaucuucucucugcguguagguaggccugugccgcaaacaagcuuaccauggaaacauacguaaacaaacuacacgaaggauccacauacacagcagcaguacaauacaacguacuagaaaaagacgacgacccagcaucuuuaaccauauggguaccaauguuccaaucaucaaugccagcagaccucuuaauaaaagaacuagcaaacguaaacauccuagucaaacaaauaucaacacccaaaggaccaucccucagaguaaugaucaacucaagaucagcaguacuagcacaaaugccaucaaaauucacaauaugcgccaacguuucuuuagacgaacgaucaaaauuagccuacgacguaacaacacccugcgaaauaaaagcaugcucacuaacaugccuaaaaucaaaaaacaugcucacuacaguaaaagaccuaaccaugaaaacacucaacccaacacacgacauaauagcccuaugcgaauuugaaaacauaguaacaucaaaaaaaguaauaaucccaacauacuuaagaucgaucucagucagaaacaaagaccuaaauacacucgaaaacauaacaacaacagaauuuaaaaacgcaauaacaaacgcaaaaauaauaccauacucaggacuacuccuaguaauaacaguaacagacaacaaaggagcauucaaauacauaaaaccacaaucacaauucaucguagaccucggagcauaccuagaaaaagaaucaauauacuacguaacaacaaacuggaaacacaccgccacaagauucgcaauaaaacccauggaagacuaaggacuaguggaagcauuuuccuggcugauuaaaagaaauuacucagcuauggucaucuguuccuguuagaaggcuaugcagcauauuauauacuaugcgcauguuaugaaaugcauaauaaaaaauuuuaaaaaaucuaaaagaucuaaaaaaaaaaaaaaaaaaaaaaaaaaaaaaaaaaaaaaaaaaaaaaaaaaaaaaaaaaaaaaaaugcaucccccccccccccccccccccccccccccccaaaggcucuuuucagagccaccagaauu

SEQ ID NO: 9804 - RNA, 1142 nt, Artificial Sequence
  mRNA product Design c-4 comprising derived and/or modified sequence from HRSV(A2)__P0DOE7.1__M (opt11)
gggagaguccgcucagccagguugcagaagcggcuuagcguguguccuaaucuucucucugcguguagguaggccugugccgcaaacaagcuuaccauggaaaccuacgucaacaaacuacacgaaggcucaaccuacaccgccgccguccaauacaacguccucgaaaaagacgacgaccccgccucccuaaccaucuggguucccauguuccaaucauccaugcccgccgaccuccucauaaaagaacuagccaacgucaacauccuagucaaacaaaucagcacccccaaaggccccucccuccgcguaaugaucaacucccgcuccgccguccuagcccaaaugcccuccaaauuuacaaucugcgccaacgucucccucgacgaacgcucaaaacucgccuacgacgucaccacacccugcgaaaucaaagccugcucccucaccugccucaaaagcaaaaauaugcuaaccaccgucaaagaccuuaccaugaaaacccucaaccccacucacgacaucauagcccucugcgaauuugaaaacaucgucaccuccaaaaaagucaucauccccacauaccuccgcuccaucuccguccgcaacaaagaccucaacacccucgaaaacaucaccaccaccgaauuuaaaaacgccaucaccaacgccaaaaucauccccuacuccggccuccuccucgucaucaccguuaccgacaacaaaggcgccuucaaauacaucaaaccccaaucccaauucaucgucgaccucggagccuaccuugaaaaagaguccaucuacuacgucaccaccaacuggaaacacaccgccacccgauucgccaucaaacccauggaagacuaaggacuaguggaagcauuuuccuggcugauuaaaagaaauuacucagcuauggucaucuguuccuguuagaaggcuaugcagcauauuauauacuaugcgcauguuaugaaaugcauaauaaaaaauuuuaaaaaaucuaaaagaucuaaaaaaaaaaaaaaaaaaaaaaaaaaaaaaaaaaaaaaaaaaaaaaaaaaaaaaaaaaaaaaaaugcaucccccccccccccccccccccccccccccccaaaggcucuuuucagagccaccagaauu

SEQ ID NO: 9805 - RNA, 1060 nt, Artificial Sequence
  mRNA product Design c-5 comprising derived and/or modified sequence from HRSV(A2)__P0DOE7.1__M (wt)
gggagagcggcucggccauuuugucccagucaguccggaggcugcggcugcagaaguaccgccugcggaguaacugcaaagaagcuuaccauggaaacauacgugaacaagcuucacgaaggcuccacauacacagcugcuguucaauacaaugucuuagaaaaagacgaugacccugcaucacuuacaauaugggugcccauguuccaaucaucuaugccagcagauuuacuuauaaaagaacuagcuaaugucaacauacuagugaaacaaauauccacacccaagggaccuucacuaagagucaugauaaacucaagaagugcagugcuagcacaaaugcccagcaaauuuaccauaugcgcuaauguguccuuggaugaaagaagcaaacuagcauaugauguaaccacacccugugaaaucaaggcauguagucuaacaugccuaaaaucaaaaaauauguugacuacaguuaaagaucucacuaugaagacacucaacccuacacaugauauuauugcuuuaugugaauuugaaaacauaguaacaucaaaaaaagucauaauaccaacauaccuaagauccaucagugucagaaauaaagaucugaacacacuugaaaauauaacaaccacugaauucaaaaaugcuaucacaaaugcaaaaaucaucccuuacucaggauuacuauuagucaucacagugacugacaacaaaggagcauucaaauacauaaagccacaaagucaauucauaguagaucuuggagcuuaccuagaaaaagaaaguauauauuauguuaccacaaauuggaagcacacagcuacacgauuugcaaucaaacccauggaagauuaaggacuagucccuguucccagagcccacuuuuuuuucuuuuuuugaaauaaaauagccugucuuucagaucuaaaaaaaaaaaaaaaaaaaaaaaaaaaaaaaaaaaaaaaaaaaaaaaaaaaaaaaaaaaaaaaaugcaucccccccccccccccccccccccccccccccaaaggcucuuuucagagccaccagaauu

SEQ ID NO: 9806 - RNA, 1060 nt, Artificial Sequence
  mRNA product Design c-5 comprising derived and/or modified sequence from HRSV(A2)__P0DOE7.1__M (opt1)
gggagagcggcucggccauuuugucccagucaguccggaggcugcggcugcagaaguaccgccugcggaguaacugcaaagaagcuuaccauggagaccuacgugaacaagcugcacgagggcagcaccuacacggccgccguccaguacaacgugcucgagaaggacgacgaccccgcgucccugaccaucugggugccgauguuccagagcuccaugcccgccgaccugcucaucaaggagcuggccaacgucaacauccuggugaagcagaucagcacccccaaggggcccucccuccgcgugaugaucaacagccgguccgccguccuggcccagaugccgagcaaguucaccaucugcgcgaacgugucccuggacgagcgcagcaagcucgccuacgacgugacgacccccugcgagaucaaggccugcucccugaccugccucaagagcaagaacaugcugaccacggucaaggaccugaccaugaagacccugaaccccacccacgacaucaucgcccucugcgaguucgagaacaucgugacguccaagaaggugaucauccccaccuaccugcggagcaucuccguccgcaacaaggaccugaacacccucgagaacaucaccacgaccgaguucaagaacgcgaucaccaacgccaagaucaucccguacagcggccugcugcucgugaucaccgugacggacaacaagggggccuucaaguacaucaagccccagucccaguucaucgucgaccugggcgccuaccuggagaaggagagcaucuacuacgugaccaccaacuggaagcacaccgccacgcgguucgcgaucaagcccauggaggacugaggacuagucccuguucccagagcccacuuuuuuuucuuuuuuugaaauaaaauagccugucuuucagaucuaaaaaaaaaaaaaaaaaaaaaaaaaaaaaaaaaaaaaaaaaaaaaaaaaaaaaaaaaaaaaaaaugcaucccccccccccccccccccccccccccccccaaaggcucuuuucagagccaccagaauu

SEQ ID NO: 9807 - RNA, 1060 nt, Artificial Sequence
  mRNA product Design c-5 comprising derived and/or modified sequence from HRSV(A2)__P0DOE7.1__M (opt2)
gggagagcggcucggccauuuugucccagucaguccggaggcugcggcugcagaaguaccgccugcggaguaacugcaaagaagcuuaccauggagaccuacgucaacaagcuccacgagggcuccaccuacaccgccgccguccaguacaacguccucgagaaggacgacgaccccgccucccucaccaucuggguccccauguuccaguccuccaugcccgccgaccuccucaucaaggagcucgccaacgucaacauccucgucaagcagaucuccacccccaagggccccucccuccgcgucaugaucaacucccgcuccgccguccucgcccagaugcccuccaaguucaccaucugcgccaacgucucccucgacgagcgcuccaagcucgccuacgacgucaccacccccugcgagaucaaggccugcucccucaccugccucaaguccaagaacaugcucaccaccgucaaggaccucaccaugaagacccucaaccccacccacgacaucaucgcccucugcgaguucgagaacaucgucaccuccaagaaggucaucauccccaccuaccuccgcuccaucuccguccgcaacaaggaccucaacacccucgagaacaucaccaccaccgaguucaagaacgccaucaccaacgccaagaucauccccuacuccggccuccuccucgucaucaccgucaccgacaacaagggcgccuucaaguacaucaagccccagucccaguucaucgucgaccucggcgccuaccucgagaaggaguccaucuacuacgucaccaccaacuggaagcacaccgccacccgcuucgccaucaagcccauggaggacugaggacuagucccuguucccagagcccacuuuuuuuucuuuuuuugaaauaaaauagccugucuuucagaucuaaaaaaaaaaaaaaaaaaaaaaaaaaaaaaaaaaaaaaaaaaaaaaaaaaaaaaaaaaaaaaaaugcaucccccccccccccccccccccccccccccccaaaggcucuuuucagagccaccagaauu

SEQ ID NO: 9808 - RNA, 1060 nt, Artificial Sequence
  mRNA product Design c-5 comprising derived and/or modified sequence from HRSV(A2)__P0DOE7.1__M (opt3)
gggagagcggcucggccauuuugucccagucaguccggaggcugcggcugcagaaguaccgccugcggaguaacugcaaagaagcuuaccauggagaccuacgugaacaagcugcacgaaggcagcacauauacugccgcuguccaguacaauguucucgagaaagacgaugaccccgcaucccuuacgaucugggugccuauguuccaaucuucaaugccagccgaucuguugauuaaggaauuagcgaacguaaauauacuggugaaacagaucaguaccccgaaggggcccagccuaagagucaugauuaacuccaggucugcugugcucgcccagaugccuucgaaauuuacaaucugcgcaaauguuucacuggacgagcggagcaaacuugccuaugaugugacuaccccaugugaaauuaaggcuugcagucugacauguuugaaguccaagaacaugcucaccacugucaaagaccugacaaugaagacccugaaucccacgcaugauaucauagcacucugcgaguucgagaacaucgugacuucuaaaaagguaauuaucccuaccuacuuacgcagcauuuccguucgaaauaaggaccugaacacacuugaaaauaucacuaccacagaguuuaaaaacgccauaaccaaugcuaagauuaucccauauucaggauugcugcuagugauuacggucacugauaacaaaggugccuucaaguacaucaaaccccagagucaauuuaucguggaccucggcgcguaucuggaaaaggagagcauuuacuacgugacaaccaauuggaaacacacugcaacacguuucgccauaaagccuauggaggauugaggacuagucccuguucccagagcccacuuuuuuuucuuuuuuugaaauaaaauagccugucuuucagaucuaaaaaaaaaaaaaaaaaaaaaaaaaaaaaaaaaaaaaaaaaaaaaaaaaaaaaaaaaaaaaaaaugcaucccccccccccccccccccccccccccccccaaaggcucuuuucagagccaccagaauu

SEQ ID NO: 9809 - RNA, 1060 nt, Artificial Sequence
  mRNA product Design c-5 comprising derived and/or modified sequence from HRSV(A2)__P0DOE7.1__M (opt4)
gggagagcggcucggccauuuugucccagucaguccggaggcugcggcugcagaaguaccgccugcggaguaacugcaaagaagcuuaccauggagaccuacgugaacaagcugcacgagggcagcaccuacaccgccgccgugcaguacaacgugcuggagaaggacgacgaccccgccagccugaccaucugggugcccauguuccagagcagcaugcccgccgaccugcugaucaaggagcuggccaacgugaacauccuggugaagcagaucagcacccccaagggccccagccugagagugaugaucaacagcagaagcgccgugcuggcccagaugcccagcaaguucaccaucugcgccaacgugagccuggacgagagaagcaagcuggccuacgacgugaccacccccugcgagaucaaggccugcagccugaccugccugaagagcaagaacaugcugaccaccgugaaggaccugaccaugaagacccugaaccccacccacgacaucaucgcccugugcgaguucgagaacaucgugaccagcaagaaggugaucauccccaccuaccugagaagcaucagcgugagaaacaaggaccugaacacccuggagaacaucaccaccaccgaguucaagaacgccaucaccaacgccaagaucauccccuacagcggccugcugcuggugaucaccgugaccgacaacaagggcgccuucaaguacaucaagccccagagccaguucaucguggaccugggcgccuaccuggagaaggagagcaucuacuacgugaccaccaacuggaagcacaccgccaccagauucgccaucaagcccauggaggacugaggacuagucccuguucccagagcccacuuuuuuuucuuuuuuugaaauaaaauagccugucuuucagaucuaaaaaaaaaaaaaaaaaaaaaaaaaaaaaaaaaaaaaaaaaaaaaaaaaaaaaaaaaaaaaaaaugcaucccccccccccccccccccccccccccccccaaaggcucuuuucagagccaccagaauu

SEQ ID NO: 9810 - RNA, 1060 nt, Artificial Sequence
  mRNA product Design c-5 comprising derived and/or modified sequence from HRSV(A2)__P0DOE7.1__M (opt5)
gggagagcggcucggccauuuugucccagucaguccggaggcugcggcugcagaaguaccgccugcggaguaacugcaaagaagcuuaccauggagaccuacgugaacaagcugcacgaaggcagcacauauacggccgcuguccaguacaauguucucgagaaagacgaugaccccgccucccugaccaucugggugccuauguuccaaucuagcaugccggcggaucuucugauuaaggaacucgcuaacgugaauauccuggucaaacagauuuccacacccaaggggccuucucuuagagugaugaucaacagccgguccgccguucuggcccagaugcccucuaaauuuaccauuugcgcuaaugugagccucgacgagcgcuccaagcuggccuaugaugucacaaccccuugugaaaucaaggcuugcagccugacaugucucaaaucuaagaacaugcugaccacggugaaagaccuuaccaugaagacacugaaucccacccaugauaucauugcccucugcgaguucgagaacaucguuacauccaaaaaggugauuaucccuaccuaccugagaagcauuucuguccggaauaaggaccuuaacacgcuggaaaauaucacaaccacagaguuuaaaaacgcgauuaccaaugccaagaucaucccguauuccggacuccugcuggugauuaccgugacagauaacaaaggcgcuuucaaguacaucaaaccccagagccaauuuauugucgaccucggggccuaucuggaaaaggagucuaucuacuacguuacgaccaauuggaaacacacagcuacccgcuucgccauuaagccuauggaggauugaggacuagucccuguucccagagcccacuuuuuuuucuuuuuuugaaauaaaauagccugucuuucagaucuaaaaaaaaaaaaaaaaaaaaaaaaaaaaaaaaaaaaaaaaaaaaaaaaaaaaaaaaaaaaaaaaugcaucccccccccccccccccccccccccccccccaaaggcucuuuucagagccaccagaauu

SEQ ID NO: 9811 - RNA, 1060 nt, Artificial Sequence
  mRNA product Design c-5 comprising derived and/or modified sequence from HRSV(A2)__P0DOE7.1__M (opt6)
gggagagcggcucggccauuuugucccagucaguccggaggcugcggcugcagaaguaccgccugcggaguaacugcaaagaagcuuaccauggaaacauacguaaacaaacuacacgaaggauccacauacacagcagcaguacaauacaacguacuagaaaaagacgacgacccagcaucuuuaaccauauggguaccaauguuccaaucaucaaugccagcagaccucuuaauaaaagaacuagcaaacguaaacauccuagucaaacaaauaucaacacccaaaggaccaucccucagaguaaugaucaacucaagaucagcaguacuagcacaaaugccaucaaaauucacaauaugcgccaacguuucuuuagacgaacgaucaaaauuagccuacgacguaacaacacccugcgaaauaaaagcaugcucacuaacaugccuaaaaucaaaaaacaugcucacuacaguaaaagaccuaaccaugaaaacacucaacccaacacacgacauaauagcccuaugcgaauuugaaaacauaguaacaucaaaaaaaguaauaaucccaacauacuuaagaucgaucucagucagaaacaaagaccuaaauacacucgaaaacauaacaacaacagaauuuaaaaacgcaauaacaaacgcaaaaauaauaccauacucaggacuacuccuaguaauaacaguaacagacaacaaaggagcauucaaauacauaaaaccacaaucacaauucaucguagaccucggagcauaccuagaaaaagaaucaauauacuacguaacaacaaacuggaaacacaccgccacaagauucgcaauaaaacccauggaagacuaaggacuagucccuguucccagagcccacuuuuuuuucuuuuuuugaaauaaaauagccugucuuucagaucuaaaaaaaaaaaaaaaaaaaaaaaaaaaaaaaaaaaaaaaaaaaaaaaaaaaaaaaaaaaaaaaaugcaucccccccccccccccccccccccccccccccaaaggcucuuuucagagccaccagaauu

SEQ ID NO: 9812 - RNA, 1060 nt, Artificial Sequence
  mRNA product Design c-5 comprising derived and/or modified sequence from HRSV(A2)__P0DOE7.1__M (opt11)
gggagagcggcucggccauuuugucccagucaguccggaggcugcggcugcagaaguaccgccugcggaguaacugcaaagaagcuuaccauggaaaccuacgucaacaaacuacacgaaggcucaaccuacaccgccgccguccaauacaacguccucgaaaaagacgacgaccccgccucccuaaccaucuggguucccauguuccaaucauccaugcccgccgaccuccucauaaaagaacuagccaacgucaacauccuagucaaacaaaucagcacccccaaaggccccucccuccgcguaaugaucaacucccgcuccgccguccuagcccaaaugcccuccaaauuuacaaucugcgccaacgucucccucgacgaacgcucaaaacucgccuacgacgucaccacacccugcgaaaucaaagccugcucccucaccugccucaaaagcaaaaauaugcuaaccaccgucaaagaccuuaccaugaaaacccucaaccccacucacgacaucauagcccucugcgaauuugaaaacaucgucaccuccaaaaaagucaucauccccacauaccuccgcuccaucuccguccgcaacaaagaccucaacacccucgaaaacaucaccaccaccgaauuuaaaaacgccaucaccaacgccaaaaucauccccuacuccggccuccuccucgucaucaccguuaccgacaacaaaggcgccuucaaauacaucaaaccccaaucccaauucaucgucgaccucggagccuaccuugaaaaagaguccaucuacuacgucaccaccaacuggaaacacaccgccacccgauucgccaucaaacccauggaagacuaaggacuagucccuguucccagagcccacuuuuuuuucuuuuuuugaaauaaaauagccugucuuucagaucuaaaaaaaaaaaaaaaaaaaaaaaaaaaaaaaaaaaaaaaaaaaaaaaaaaaaaaaaaaaaaaaaugcaucccccccccccccccccccccccccccccccaaaggcucuuuucagagccaccagaauu

SEQ ID NO: 9813 - RNA, 1069 nt, Artificial Sequence
  mRNA product Design d-1 comprising derived and/or modified sequence from HRSV(A2)__P0DOE7.1__M (wt)
gggagacccgugacccggaaguuguacggcuacgcgacuuucccucccacaaacccucgcgcccuuccuuuccuacuugggcccggcagaaagcuuaccauggaaacauacgugaacaagcuucacgaaggcuccacauacacagcugcuguucaauacaaugucuuagaaaaagacgaugacccugcaucacuuacaauaugggugcccauguuccaaucaucuaugccagcagauuuacuuauaaaagaacuagcuaaugucaacauacuagugaaacaaauauccacacccaagggaccuucacuaagagucaugauaaacucaagaagugcagugcuagcacaaaugcccagcaaauuuaccauaugcgcuaauguguccuuggaugaaagaagcaaacuagcauaugauguaaccacacccugugaaaucaaggcauguagucuaacaugccuaaaaucaaaaaauauguugacuacaguuaaagaucucacuaugaagacacucaacccuacacaugauauuauugcuuuaugugaauuugaaaacauaguaacaucaaaaaaagucauaauaccaacauaccuaagauccaucagugucagaaauaaagaucugaacacacuugaaaauauaacaaccacugaauucaaaaaugcuaucacaaaugcaaaaaucaucccuuacucaggauuacuauuagucaucacagugacugacaacaaaggagcauucaaauacauaaagccacaaagucaauucauaguagaucuuggagcuuaccuagaaaaagaaaguauauauuauguuaccacaaauuggaagcacacagcuacacgauuugcaaucaaacccauggaagauuaaggacuagucccuguucccagagcccacuuuuuuuucuuuuuuugaaauaaaauagccugucuuucagaucuaaaaaaaaaaaaaaaaaaaaaaaaaaaaaaaaaaaaaaaaaaaaaaaaaaaaaaaaaaaaaaaaugcaucccccccccccccccccccccccccccccccaaaggcucuuuucagagccaccagaauu

SEQ ID NO: 9814 - RNA, 1069 nt, Artificial Sequence
  mRNA product Design d-1 comprising derived and/or modified sequence from HRSV(A2)__P0DOE7.1__M (opt1)
gggagacccgugacccggaaguuguacggcuacgcgacuuucccucccacaaacccucgcgcccuuccuuuccuacuugggcccggcagaaagcuuaccauggagaccuacgugaacaagcugcacgagggcagcaccuacacggccgccguccaguacaacgugcucgagaaggacgacgaccccgcgucccugaccaucugggugccgauguuccagagcuccaugcccgccgaccugcucaucaaggagcuggccaacgucaacauccuggugaagcagaucagcacccccaaggggcccucccuccgcgugaugaucaacagccgguccgccguccuggcccagaugccgagcaaguucaccaucugcgcgaacgugucccuggacgagcgcagcaagcucgccuacgacgugacgacccccugcgagaucaaggccugcucccugaccugccucaagagcaagaacaugcugaccacggucaaggaccugaccaugaagacccugaaccccacccacgacaucaucgcccucugcgaguucgagaacaucgugacguccaagaaggugaucauccccaccuaccugcggagcaucuccguccgcaacaaggaccugaacacccucgagaacaucaccacgaccgaguucaagaacgcgaucaccaacgccaagaucaucccguacagcggccugcugcucgugaucaccgugacggacaacaagggggccuucaaguacaucaagccccagucccaguucaucgucgaccugggcgccuaccuggagaaggagagcaucuacuacgugaccaccaacuggaagcacaccgccacgcgguucgcgaucaagcccauggaggacugaggacuagucccuguucccagagcccacuuuuuuuucuuuuuuugaaauaaaauagccugucuuucagaucuaaaaaaaaaaaaaaaaaaaaaaaaaaaaaaaaaaaaaaaaaaaaaaaaaaaaaaaaaaaaaaaaugcaucccccccccccccccccccccccccccccccaaaggcucuuuucagagccaccagaauu

SEQ ID NO: 9815 - RNA, 1069 nt, Artificial Sequence
  mRNA product Design d-1 comprising derived and/or modified sequence from HRSV(A2)__P0DOE7.1__M (opt2)
gggagacccgugacccggaaguuguacggcuacgcgacuuucccucccacaaacccucgcgcccuuccuuuccuacuugggcccggcagaaagcuuaccauggagaccuacgucaacaagcuccacgagggcuccaccuacaccgccgccguccaguacaacguccucgagaaggacgacgaccccgccucccucaccaucuggguccccauguuccaguccuccaugcccgccgaccuccucaucaaggagcucgccaacgucaacauccucgucaagcagaucuccacccccaagggccccucccuccgcgucaugaucaacucccgcuccgccguccucgcccagaugcccuccaaguucaccaucugcgccaacgucucccucgacgagcgcuccaagcucgccuacgacgucaccacccccugcgagaucaaggccugcucccucaccugccucaaguccaagaacaugcucaccaccgucaaggaccucaccaugaagacccucaaccccacccacgacaucaucgcccucugcgaguucgagaacaucgucaccuccaagaaggucaucauccccaccuaccuccgcuccaucuccguccgcaacaaggaccucaacacccucgagaacaucaccaccaccgaguucaagaacgccaucaccaacgccaagaucauccccuacuccggccuccuccucgucaucaccgucaccgacaacaagggcgccuucaaguacaucaagccccagucccaguucaucgucgaccucggcgccuaccucgagaaggaguccaucuacuacgucaccaccaacuggaagcacaccgccacccgcuucgccaucaagcccauggaggacugaggacuagucccuguucccagagcccacuuuuuuuucuuuuuuugaaauaaaauagccugucuuucagaucuaaaaaaaaaaaaaaaaaaaaaaaaaaaaaaaaaaaaaaaaaaaaaaaaaaaaaaaaaaaaaaaaugcaucccccccccccccccccccccccccccccccaaaggcucuuuucagagccaccagaauu

SEQ ID NO: 9816 - RNA, 1069 nt, Artificial Sequence
  mRNA product Design d-1 comprising derived and/or modified sequence from HRSV(A2)__P0DOE7.1__M (opt3)
gggagacccgugacccggaaguuguacggcuacgcgacuuucccucccacaaacccucgcgcccuuccuuuccuacuugggcccggcagaaagcuuaccauggagaccuacgugaacaagcugcacgaaggcagcacauauacugccgcuguccaguacaauguucucgagaaagacgaugaccccgcaucccuuacgaucugggugccuauguuccaaucuucaaugccagccgaucuguugauuaaggaauuagcgaacguaaauauacuggugaaacagaucaguaccccgaaggggcccagccuaagagucaugauuaacuccaggucugcugugcucgcccagaugccuucgaaauuuacaaucugcgcaaauguuucacuggacgagcggagcaaacuugccuaugaugugacuaccccaugugaaauuaaggcuugcagucugacauguuugaaguccaagaacaugcucaccacugucaaagaccugacaaugaagacccugaaucccacgcaugauaucauagcacucugcgaguucgagaacaucgugacuucuaaaaagguaauuaucccuaccuacuuacgcagcauuuccguucgaaauaaggaccugaacacacuugaaaauaucacuaccacagaguuuaaaaacgccauaaccaaugcuaagauuaucccauauucaggauugcugcuagugauuacggucacugauaacaaaggugccuucaaguacaucaaaccccagagucaauuuaucguggaccucggcgcguaucuggaaaaggagagcauuuacuacgugacaaccaauuggaaacacacugcaacacguuucgccauaaagccuauggaggauugaggacuagucccuguucccagagcccacuuuuuuuucuuuuuuugaaauaaaauagccugucuuucagaucuaaaaaaaaaaaaaaaaaaaaaaaaaaaaaaaaaaaaaaaaaaaaaaaaaaaaaaaaaaaaaaaaugcaucccccccccccccccccccccccccccccccaaaggcucuuuucagagccaccagaauu

SEQ ID NO: 9817 - RNA, 1069 nt, Artificial Sequence
  mRNA product Design d-1 comprising derived and/or modified sequence from HRSV(A2)__P0DOE7.1__M (opt4)
gggagacccgugacccggaaguuguacggcuacgcgacuuucccucccacaaacccucgcgcccuuccuuuccuacuugggcccggcagaaagcuuaccauggagaccuacgugaacaagcugcacgagggcagcaccuacaccgccgccgugcaguacaacgugcuggagaaggacgacgaccccgccagccugaccaucugggugcccauguuccagagcagcaugcccgccgaccugcugaucaaggagcuggccaacgugaacauccuggugaagcagaucagcacccccaagggccccagccugagagugaugaucaacagcagaagcgccgugcuggcccagaugcccagcaaguucaccaucugcgccaacgugagccuggacgagagaagcaagcuggccuacgacgugaccacccccugcgagaucaaggccugcagccugaccugccugaagagcaagaacaugcugaccaccgugaaggaccugaccaugaagacccugaaccccacccacgacaucaucgcccugugcgaguucgagaacaucgugaccagcaagaaggugaucauccccaccuaccugagaagcaucagcgugagaaacaaggaccugaacacccuggagaacaucaccaccaccgaguucaagaacgccaucaccaacgccaagaucauccccuacagcggccugcugcuggugaucaccgugaccgacaacaagggcgccuucaaguacaucaagccccagagccaguucaucguggaccugggcgccuaccuggagaaggagagcaucuacuacgugaccaccaacuggaagcacaccgccaccagauucgccaucaagcccauggaggacugaggacuagucccuguucccagagcccacuuuuuuuucuuuuuuugaaauaaaauagccugucuuucagaucuaaaaaaaaaaaaaaaaaaaaaaaaaaaaaaaaaaaaaaaaaaaaaaaaaaaaaaaaaaaaaaaaugcaucccccccccccccccccccccccccccccccaaaggcucuuuucagagccaccagaauu

SEQ ID NO: 9818 - RNA, 1069 nt, Artificial Sequence
  mRNA product Design d-1 comprising derived and/or modified sequence from HRSV(A2)__P0DOE7.1__M (opt5)
gggagacccgugacccggaaguuguacggcuacgcgacuuucccucccacaaacccucgcgcccuuccuuuccuacuugggcccggcagaaagcuuaccauggagaccuacgugaacaagcugcacgaaggcagcacauauacggccgcuguccaguacaauguucucgagaaagacgaugaccccgccucccugaccaucugggugccuauguuccaaucuagcaugccggcggaucuucugauuaaggaacucgcuaacgugaauauccuggucaaacagauuuccacacccaaggggccuucucuuagagugaugaucaacagccgguccgccguucuggcccagaugcccucuaaauuuaccauuugcgcuaaugugagccucgacgagcgcuccaagcuggccuaugaugucacaaccccuugugaaaucaaggcuugcagccugacaugucucaaaucuaagaacaugcugaccacggugaaagaccuuaccaugaagacacugaaucccacccaugauaucauugcccucugcgaguucgagaacaucguuacauccaaaaaggugauuaucccuaccuaccugagaagcauuucuguccggaauaaggaccuuaacacgcuggaaaauaucacaaccacagaguuuaaaaacgcgauuaccaaugccaagaucaucccguauuccggacuccugcuggugauuaccgugacagauaacaaaggcgcuuucaaguacaucaaaccccagagccaauuuauugucgaccucggggccuaucuggaaaaggagucuaucuacuacguuacgaccaauuggaaacacacagcuacccgcuucgccauuaagccuauggaggauugaggacuagucccuguucccagagcccacuuuuuuuucuuuuuuugaaauaaaauagccugucuuucagaucuaaaaaaaaaaaaaaaaaaaaaaaaaaaaaaaaaaaaaaaaaaaaaaaaaaaaaaaaaaaaaaaaugcaucccccccccccccccccccccccccccccccaaaggcucuuuucagagccaccagaauu

SEQ ID NO: 9819 - RNA, 1069 nt, Artificial Sequence
  mRNA product Design d-1 comprising derived and/or modified sequence from HRSV(A2)__P0DOE7.1__M (opt6)
gggagacccgugacccggaaguuguacggcuacgcgacuuucccucccacaaacccucgcgcccuuccuuuccuacuugggcccggcagaaagcuuaccauggaaacauacguaaacaaacuacacgaaggauccacauacacagcagcaguacaauacaacguacuagaaaaagacgacgacccagcaucuuuaaccauauggguaccaauguuccaaucaucaaugccagcagaccucuuaauaaaagaacuagcaaacguaaacauccuagucaaacaaauaucaacacccaaaggaccaucccucagaguaaugaucaacucaagaucagcaguacuagcacaaaugccaucaaaauucacaauaugcgccaacguuucuuuagacgaacgaucaaaauuagccuacgacguaacaacacccugcgaaauaaaagcaugcucacuaacaugccuaaaaucaaaaaacaugcucacuacaguaaaagaccuaaccaugaaaacacucaacccaacacacgacauaauagcccuaugcgaauuugaaaacauaguaacaucaaaaaaaguaauaaucccaacauacuuaagaucgaucucagucagaaacaaagaccuaaauacacucgaaaacauaacaacaacagaauuuaaaaacgcaauaacaaacgcaaaaauaauaccauacucaggacuacuccuaguaauaacaguaacagacaacaaaggagcauucaaauacauaaaaccacaaucacaauucaucguagaccucggagcauaccuagaaaaagaaucaauauacuacguaacaacaaacuggaaacacaccgccacaagauucgcaauaaaacccauggaagacuaaggacuagucccuguucccagagcccacuuuuuuuucuuuuuuugaaauaaaauagccugucuuucagaucuaaaaaaaaaaaaaaaaaaaaaaaaaaaaaaaaaaaaaaaaaaaaaaaaaaaaaaaaaaaaaaaaugcaucccccccccccccccccccccccccccccccaaaggcucuuuucagagccaccagaauu

SEQ ID NO: 9820 - RNA, 1069 nt, Artificial Sequence
  mRNA product Design d-1 comprising derived and/or modified sequence from HRSV(A2)__P0DOE7.1__M (opt11)
gggagacccgugacccggaaguuguacggcuacgcgacuuucccucccacaaacccucgcgcccuuccuuuccuacuugggcccggcagaaagcuuaccauggaaaccuacgucaacaaacuacacgaaggcucaaccuacaccgccgccguccaauacaacguccucgaaaaagacgacgaccccgccucccuaaccaucuggguucccauguuccaaucauccaugcccgccgaccuccucauaaaagaacuagccaacgucaacauccuagucaaacaaaucagcacccccaaaggccccucccuccgcguaaugaucaacucccgcuccgccguccuagcccaaaugcccuccaaauuuacaaucugcgccaacgucucccucgacgaacgcucaaaacucgccuacgacgucaccacacccugcgaaaucaaagccugcucccucaccugccucaaaagcaaaaauaugcuaaccaccgucaaagaccuuaccaugaaaacccucaaccccacucacgacaucauagcccucugcgaauuugaaaacaucgucaccuccaaaaaagucaucauccccacauaccuccgcuccaucuccguccgcaacaaagaccucaacacccucgaaaacaucaccaccaccgaauuuaaaaacgccaucaccaacgccaaaaucauccccuacuccggccuccuccucgucaucaccguuaccgacaacaaaggcgccuucaaauacaucaaaccccaaucccaauucaucgucgaccucggagccuaccuugaaaaagaguccaucuacuacgucaccaccaacuggaaacacaccgccacccgauucgccaucaaacccauggaagacuaaggacuagucccuguucccagagcccacuuuuuuuucuuuuuuugaaauaaaauagccugucuuucagaucuaaaaaaaaaaaaaaaaaaaaaaaaaaaaaaaaaaaaaaaaaaaaaaaaaaaaaaaaaaaaaaaaugcaucccccccccccccccccccccccccccccccaaaggcucuuuucagagccaccagaauu

SEQ ID NO: 9821 - RNA, 1124 nt, Artificial Sequence
  mRNA product Design d-2 comprising derived and/or modified sequence from HRSV(A2)__P0DOE7.1__M (wt)
gggagagcggcucggccauuuugucccagucaguccggaggcugcggcugcagaaguaccgccugcggaguaacugcaaagaagcuuaccauggaaacauacgugaacaagcuucacgaaggcuccacauacacagcugcuguucaauacaaugucuuagaaaaagacgaugacccugcaucacuuacaauaugggugcccauguuccaaucaucuaugccagcagauuuacuuauaaaagaacuagcuaaugucaacauacuagugaaacaaauauccacacccaagggaccuucacuaagagucaugauaaacucaagaagugcagugcuagcacaaaugcccagcaaauuuaccauaugcgcuaauguguccuuggaugaaagaagcaaacuagcauaugauguaaccacacccugugaaaucaaggcauguagucuaacaugccuaaaaucaaaaaauauguugacuacaguuaaagaucucacuaugaagacacucaacccuacacaugauauuauugcuuuaugugaauuugaaaacauaguaacaucaaaaaaagucauaauaccaacauaccuaagauccaucagugucagaaauaaagaucugaacacacuugaaaauauaacaaccacugaauucaaaaaugcuaucacaaaugcaaaaaucaucccuuacucaggauuacuauuagucaucacagugacugacaacaaaggagcauucaaauacauaaagccacaaagucaauucauaguagaucuuggagcuuaccuagaaaaagaaaguauauauuauguuaccacaaauuggaagcacacagcuacacgauuugcaaucaaacccauggaagauuaaggacuaguaauaaggaaacuguaugaaugucugugggcaggaagugaagagauccuucuguaaagguuuuuggaauuaugucugcugaauaauaaacuuuuuugaaauaauaaaucugguagaaaaaugagaucuaaaaaaaaaaaaaaaaaaaaaaaaaaaaaaaaaaaaaaaaaaaaaaaaaaaaaaaaaaaaaaaaugcaucccccccccccccccccccccccccccccccaaaggcucuuuucagagccaccagaauu

SEQ ID NO: 9822 - RNA, 1124 nt, Artificial Sequence
  mRNA product Design d-2 comprising derived and/or modified sequence from HRSV(A2)__P0DOE7.1__M (opt1)
gggagagcggcucggccauuuugucccagucaguccggaggcugcggcugcagaaguaccgccugcggaguaacugcaaagaagcuuaccauggagaccuacgugaacaagcugcacgagggcagcaccuacacggccgccguccaguacaacgugcucgagaaggacgacgaccccgcgucccugaccaucugggugccgauguuccagagcuccaugcccgccgaccugcucaucaaggagcuggccaacgucaacauccuggugaagcagaucagcacccccaaggggcccucccuccgcgugaugaucaacagccgguccgccguccuggcccagaugccgagcaaguucaccaucugcgcgaacgugucccuggacgagcgcagcaagcucgccuacgacgugacgacccccugcgagaucaaggccugcucccugaccugccucaagagcaagaacaugcugaccacggucaaggaccugaccaugaagacccugaaccccacccacgacaucaucgcccucugcgaguucgagaacaucgugacguccaagaaggugaucauccccaccuaccugcggagcaucuccguccgcaacaaggaccugaacacccucgagaacaucaccacgaccgaguucaagaacgcgaucaccaacgccaagaucaucccguacagcggccugcugcucgugaucaccgugacggacaacaagggggccuucaaguacaucaagccccagucccaguucaucgucgaccugggcgccuaccuggagaaggagagcaucuacuacgugaccaccaacuggaagcacaccgccacgcgguucgcgaucaagcccauggaggacugaggacuaguaauaaggaaacuguaugaaugucugugggcaggaagugaagagauccuucuguaaagguuuuuggaauuaugucugcugaauaauaaacuuuuuugaaauaauaaaucugguagaaaaaugagaucuaaaaaaaaaaaaaaaaaaaaaaaaaaaaaaaaaaaaaaaaaaaaaaaaaaaaaaaaaaaaaaaaugcaucccccccccccccccccccccccccccccccaaaggcucuuuucagagccaccagaauu

SEQ ID NO: 9823 - RNA, 1124 nt, Artificial Sequence
  mRNA product Design d-2 comprising derived and/or modified sequence from HRSV(A2)__P0DOE7.1__M (opt2)
gggagagcggcucggccauuuugucccagucaguccggaggcugcggcugcagaaguaccgccugcggaguaacugcaaagaagcuuaccauggagaccuacgucaacaagcuccacgagggcuccaccuacaccgccgccguccaguacaacguccucgagaaggacgacgaccccgccucccucaccaucuggguccccauguuccaguccuccaugcccgccgaccuccucaucaaggagcucgccaacgucaacauccucgucaagcagaucuccacccccaagggccccucccuccgcgucaugaucaacucccgcuccgccguccucgcccagaugcccuccaaguucaccaucugcgccaacgucucccucgacgagcgcuccaagcucgccuacgacgucaccacccccugcgagaucaaggccugcucccucaccugccucaaguccaagaacaugcucaccaccgucaaggaccucaccaugaagacccucaaccccacccacgacaucaucgcccucugcgaguucgagaacaucgucaccuccaagaaggucaucauccccaccuaccuccgcuccaucuccguccgcaacaaggaccucaacacccucgagaacaucaccaccaccgaguucaagaacgccaucaccaacgccaagaucauccccuacuccggccuccuccucgucaucaccgucaccgacaacaagggcgccuucaaguacaucaagccccagucccaguucaucgucgaccucggcgccuaccucgagaaggaguccaucuacuacgucaccaccaacuggaagcacaccgccacccgcuucgccaucaagcccauggaggacugaggacuaguaauaaggaaacuguaugaaugucugugggcaggaagugaagagauccuucuguaaagguuuuuggaauuaugucugcugaauaauaaacuuuuuugaaauaauaaaucugguagaaaaaugagaucuaaaaaaaaaaaaaaaaaaaaaaaaaaaaaaaaaaaaaaaaaaaaaaaaaaaaaaaaaaaaaaaaugcaucccccccccccccccccccccccccccccccaaaggcucuuuucagagccaccagaauu

SEQ ID NO: 9824 - RNA, 1124 nt, Artificial Sequence
  mRNA product Design d-2 comprising derived and/or modified sequence from HRSV(A2)__P0DOE7.1__M (opt3)
gggagagcggcucggccauuuugucccagucaguccggaggcugcggcugcagaaguaccgccugcggaguaacugcaaagaagcuuaccauggagaccuacgugaacaagcugcacgaaggcagcacauauacugccgcuguccaguacaauguucucgagaaagacgaugaccccgcaucccuuacgaucugggugccuauguuccaaucuucaaugccagccgaucuguugauuaaggaauuagcgaacguaaauauacuggugaaacagaucaguaccccgaaggggcccagccuaagagucaugauuaacuccaggucugcugugcucgcccagaugccuucgaaauuuacaaucugcgcaaauguuucacuggacgagcggagcaaacuugccuaugaugugacuaccccaugugaaauuaaggcuugcagucugacauguuugaaguccaagaacaugcucaccacugucaaagaccugacaaugaagacccugaaucccacgcaugauaucauagcacucugcgaguucgagaacaucgugacuucuaaaaagguaauuaucccuaccuacuuacgcagcauuuccguucgaaauaaggaccugaacacacuugaaaauaucacuaccacagaguuuaaaaacgccauaaccaaugcuaagauuaucccauauucaggauugcugcuagugauuacggucacugauaacaaaggugccuucaaguacaucaaaccccagagucaauuuaucguggaccucggcgcguaucuggaaaaggagagcauuuacuacgugacaaccaauuggaaacacacugcaacacguuucgccauaaagccuauggaggauugaggacuaguaauaaggaaacuguaugaaugucugugggcaggaagugaagagauccuucuguaaagguuuuuggaauuaugucugcugaauaauaaacuuuuuugaaauaauaaaucugguagaaaaaugagaucuaaaaaaaaaaaaaaaaaaaaaaaaaaaaaaaaaaaaaaaaaaaaaaaaaaaaaaaaaaaaaaaaugcaucccccccccccccccccccccccccccccccaaaggcucuuuucagagccaccagaauu

SEQ ID NO: 9825 - RNA, 1124 nt, Artificial Sequence
  mRNA product Design d-2 comprising derived and/or modified sequence from HRSV(A2)__P0DOE7.1__M (opt4)
gggagagcggcucggccauuuugucccagucaguccggaggcugcggcugcagaaguaccgccugcggaguaacugcaaagaagcuuaccauggagaccuacgugaacaagcugcacgagggcagcaccuacaccgccgccgugcaguacaacgugcuggagaaggacgacgaccccgccagccugaccaucugggugcccauguuccagagcagcaugcccgccgaccugcugaucaaggagcuggccaacgugaacauccuggugaagcagaucagcacccccaagggccccagccugagagugaugaucaacagcagaagcgccgugcuggcccagaugcccagcaaguucaccaucugcgccaacgugagccuggacgagagaagcaagcuggccuacgacgugaccacccccugcgagaucaaggccugcagccugaccugccugaagagcaagaacaugcugaccaccgugaaggaccugaccaugaagacccugaaccccacccacgacaucaucgcccugugcgaguucgagaacaucgugaccagcaagaaggugaucauccccaccuaccugagaagcaucagcgugagaaacaaggaccugaacacccuggagaacaucaccaccaccgaguucaagaacgccaucaccaacgccaagaucauccccuacagcggccugcugcuggugaucaccgugaccgacaacaagggcgccuucaaguacaucaagccccagagccaguucaucguggaccugggcgccuaccuggagaaggagagcaucuacuacgugaccaccaacuggaagcacaccgccaccagauucgccaucaagcccauggaggacugaggacuaguaauaaggaaacuguaugaaugucugugggcaggaagugaagagauccuucuguaaagguuuuuggaauuaugucugcugaauaauaaacuuuuuugaaauaauaaaucugguagaaaaaugagaucuaaaaaaaaaaaaaaaaaaaaaaaaaaaaaaaaaaaaaaaaaaaaaaaaaaaaaaaaaaaaaaaaugcaucccccccccccccccccccccccccccccccaaaggcucuuuucagagccaccagaauu

SEQ ID NO: 9826 - RNA, 1124 nt, Artificial Sequence
  mRNA product Design d-2 comprising derived and/or modified sequence from HRSV(A2)__P0DOE7.1__M (opt5)
gggagagcggcucggccauuuugucccagucaguccggaggcugcggcugcagaaguaccgccugcggaguaacugcaaagaagcuuaccauggagaccuacgugaacaagcugcacgaaggcagcacauauacggccgcuguccaguacaauguucucgagaaagacgaugaccccgccucccugaccaucugggugccuauguuccaaucuagcaugccggcggaucuucugauuaaggaacucgcuaacgugaauauccuggucaaacagauuuccacacccaaggggccuucucuuagagugaugaucaacagccgguccgccguucuggcccagaugcccucuaaauuuaccauuugcgcuaaugugagccucgacgagcgcuccaagcuggccuaugaugucacaaccccuugugaaaucaaggcuugcagccugacaugucucaaaucuaagaacaugcugaccacggugaaagaccuuaccaugaagacacugaaucccacccaugauaucauugcccucugcgaguucgagaacaucguuacauccaaaaaggugauuaucccuaccuaccugagaagcauuucuguccggaauaaggaccuuaacacgcuggaaaauaucacaaccacagaguuuaaaaacgcgauuaccaaugccaagaucaucccguauuccggacuccugcuggugauuaccgugacagauaacaaaggcgcuuucaaguacaucaaaccccagagccaauuuauugucgaccucggggccuaucuggaaaaggagucuaucuacuacguuacgaccaauuggaaacacacagcuacccgcuucgccauuaagccuauggaggauugaggacuaguaauaaggaaacuguaugaaugucugugggcaggaagugaagagauccuucuguaaagguuuuuggaauuaugucugcugaauaauaaacuuuuuugaaauaauaaaucugguagaaaaaugagaucuaaaaaaaaaaaaaaaaaaaaaaaaaaaaaaaaaaaaaaaaaaaaaaaaaaaaaaaaaaaaaaaaugcaucccccccccccccccccccccccccccccccaaaggcucuuuucagagccaccagaauu

SEQ ID NO: 9827 - RNA, 1124 nt, Artificial Sequence
  mRNA product Design d-2 comprising derived and/or modified sequence from HRSV(A2)__P0DOE7.1__M (opt6)
gggagagcggcucggccauuuugucccagucaguccggaggcugcggcugcagaaguaccgccugcggaguaacugcaaagaagcuuaccauggaaacauacguaaacaaacuacacgaaggauccacauacacagcagcaguacaauacaacguacuagaaaaagacgacgacccagcaucuuuaaccauauggguaccaauguuccaaucaucaaugccagcagaccucuuaauaaaagaacuagcaaacguaaacauccuagucaaacaaauaucaacacccaaaggaccaucccucagaguaaugaucaacucaagaucagcaguacuagcacaaaugccaucaaaauucacaauaugcgccaacguuucuuuagacgaacgaucaaaauuagccuacgacguaacaacacccugcgaaauaaaagcaugcucacuaacaugccuaaaaucaaaaaacaugcucacuacaguaaaagaccuaaccaugaaaacacucaacccaacacacgacauaauagcccuaugcgaauuugaaaacauaguaacaucaaaaaaaguaauaaucccaacauacuuaagaucgaucucagucagaaacaaagaccuaaauacacucgaaaacauaacaacaacagaauuuaaaaacgcaauaacaaacgcaaaaauaauaccauacucaggacuacuccuaguaauaacaguaacagacaacaaaggagcauucaaauacauaaaaccacaaucacaauucaucguagaccucggagcauaccuagaaaaagaaucaauauacuacguaacaacaaacuggaaacacaccgccacaagauucgcaauaaaacccauggaagacuaaggacuaguaauaaggaaacuguaugaaugucugugggcaggaagugaagagauccuucuguaaagguuuuuggaauuaugucugcugaauaauaaacuuuuuugaaauaauaaaucugguagaaaaaugagaucuaaaaaaaaaaaaaaaaaaaaaaaaaaaaaaaaaaaaaaaaaaaaaaaaaaaaaaaaaaaaaaaaugcaucccccccccccccccccccccccccccccccaaaggcucuuuucagagccaccagaauu

SEQ ID NO: 9828 - RNA, 1124 nt, Artificial Sequence
  mRNA product Design d-2 comprising derived and/or modified sequence from HRSV(A2)__P0DOE7.1__M (opt11)
gggagagcggcucggccauuuugucccagucaguccggaggcugcggcugcagaaguaccgccugcggaguaacugcaaagaagcuuaccauggaaaccuacgucaacaaacuacacgaaggcucaaccuacaccgccgccguccaauacaacguccucgaaaaagacgacgaccccgccucccuaaccaucuggguucccauguuccaaucauccaugcccgccgaccuccucauaaaagaacuagccaacgucaacauccuagucaaacaaaucagcacccccaaaggccccucccuccgcguaaugaucaacucccgcuccgccguccuagcccaaaugcccuccaaauuuacaaucugcgccaacgucucccucgacgaacgcucaaaacucgccuacgacgucaccacacccugcgaaaucaaagccugcucccucaccugccucaaaagcaaaaauaugcuaaccaccgucaaagaccuuaccaugaaaacccucaaccccacucacgacaucauagcccucugcgaauuugaaaacaucgucaccuccaaaaaagucaucauccccacauaccuccgcuccaucuccguccgcaacaaagaccucaacacccucgaaaacaucaccaccaccgaauuuaaaaacgccaucaccaacgccaaaaucauccccuacuccggccuccuccucgucaucaccguuaccgacaacaaaggcgccuucaaauacaucaaaccccaaucccaauucaucgucgaccucggagccuaccuugaaaaagaguccaucuacuacgucaccaccaacuggaaacacaccgccacccgauucgccaucaaacccauggaagacuaaggacuaguaauaaggaaacuguaugaaugucugugggcaggaagugaagagauccuucuguaaagguuuuuggaauuaugucugcugaauaauaaacuuuuuugaaauaauaaaucugguagaaaaaugagaucuaaaaaaaaaaaaaaaaaaaaaaaaaaaaaaaaaaaaaaaaaaaaaaaaaaaaaaaaaaaaaaaaugcaucccccccccccccccccccccccccccccccaaaggcucuuuucagagccaccagaauu

SEQ ID NO: 9829 - RNA, 1440 nt, Artificial Sequence
  mRNA product Design d-3 comprising derived and/or modified sequence from HRSV(A2)__P0DOE7.1__M (wt)
gggagagggcgcuuggcuugcaaggacccugagcugcggcauugaagcacacccaacccaacucgacugaagucagccucacugaaccggaucugagaaucuucucucucugggcuugccagggcucuccgaaccuagcuagcauccucuucaauuccaacuagaaagcuuaccauggaaacauacgugaacaagcuucacgaaggcuccacauacacagcugcuguucaauacaaugucuuagaaaaagacgaugacccugcaucacuuacaauaugggugcccauguuccaaucaucuaugccagcagauuuacuuauaaaagaacuagcuaaugucaacauacuagugaaacaaauauccacacccaagggaccuucacuaagagucaugauaaacucaagaagugcagugcuagcacaaaugcccagcaaauuuaccauaugcgcuaauguguccuuggaugaaagaagcaaacuagcauaugauguaaccacacccugugaaaucaaggcauguagucuaacaugccuaaaaucaaaaaauauguugacuacaguuaaagaucucacuaugaagacacucaacccuacacaugauauuauugcuuuaugugaauuugaaaacauaguaacaucaaaaaaagucauaauaccaacauaccuaagauccaucagugucagaaauaaagaucugaacacacuugaaaauauaacaaccacugaauucaaaaaugcuaucacaaaugcaaaaaucaucccuuacucaggauuacuauuagucaucacagugacugacaacaaaggagcauucaaauacauaaagccacaaagucaauucauaguagaucuuggagcuuaccuagaaaaagaaaguauauauuauguuaccacaaauuggaagcacacagcuacacgauuugcaaucaaacccauggaagauuaaggacuagugaagggaacacccaaauuuaauucagccuuaagcacaauuaauuaagagugaaacguaauuguacaagcaguuggucacccaccauagggcaugaucaacaccgcaaccuuuccuuuuucccccagugauucugaaaaaccccucuucccuucagcuugcuuagauguuccaaauuuaguaagcuuaaggcggccuacagaagaaaaagaaaaaaaaggccacaaaaguucccucucacuuucaguaaauaaaauaaaagcagcaacagaaauaaagaaauaaaugaaauucaaaaugaaauaaauauuguguugugcagcauuaaaaaaucaauaaaaauuaaaaaugagcaagaucuaaaaaaaaaaaaaaaaaaaaaaaaaaaaaaaaaaaaaaaaaaaaaaaaaaaaaaaaaaaaaaaaugcaucccccccccccccccccccccccccccccccaaaggcucuuuucagagccaccagaauu

SEQ ID NO: 9830 - RNA, 1440 nt, Artificial Sequence
  mRNA product Design d-3 comprising derived and/or modified sequence from HRSV(A2)__P0DOE7.1__M (opt1)
gggagagggcgcuuggcuugcaaggacccugagcugcggcauugaagcacacccaacccaacucgacugaagucagccucacugaaccggaucugagaaucuucucucucugggcuugccagggcucuccgaaccuagcuagcauccucuucaauuccaacuagaaagcuuaccauggagaccuacgugaacaagcugcacgagggcagcaccuacacggccgccguccaguacaacgugcucgagaaggacgacgaccccgcgucccugaccaucugggugccgauguuccagagcuccaugcccgccgaccugcucaucaaggagcuggccaacgucaacauccuggugaagcagaucagcacccccaaggggcccucccuccgcgugaugaucaacagccgguccgccguccuggcccagaugccgagcaaguucaccaucugcgcgaacgugucccuggacgagcgcagcaagcucgccuacgacgugacgacccccugcgagaucaaggccugcucccugaccugccucaagagcaagaacaugcugaccacggucaaggaccugaccaugaagacccugaaccccacccacgacaucaucgcccucugcgaguucgagaacaucgugacguccaagaaggugaucauccccaccuaccugcggagcaucuccguccgcaacaaggaccugaacacccucgagaacaucaccacgaccgaguucaagaacgcgaucaccaacgccaagaucaucccguacagcggccugcugcucgugaucaccgugacggacaacaagggggccuucaaguacaucaagccccagucccaguucaucgucgaccugggcgccuaccuggagaaggagagcaucuacuacgugaccaccaacuggaagcacaccgccacgcgguucgcgaucaagcccauggaggacugaggacuagugaagggaacacccaaauuuaauucagccuuaagcacaauuaauuaagagugaaacguaauuguacaagcaguuggucacccaccauagggcaugaucaacaccgcaaccuuuccuuuuucccccagugauucugaaaaaccccucuucccuucagcuugcuuagauguuccaaauuuaguaagcuuaaggcggccuacagaagaaaaagaaaaaaaaggccacaaaaguucccucucacuuucaguaaauaaaauaaaagcagcaacagaaauaaagaaauaaaugaaauucaaaaugaaauaaauauuguguugugcagcauuaaaaaaucaauaaaaauuaaaaaugagcaagaucuaaaaaaaaaaaaaaaaaaaaaaaaaaaaaaaaaaaaaaaaaaaaaaaaaaaaaaaaaaaaaaaaugcaucccccccccccccccccccccccccccccccaaaggcucuuuucagagccaccagaauu

SEQ ID NO: 9831 - RNA, 1440 nt, Artificial Sequence
  mRNA product Design d-3 comprising derived and/or modified sequence from HRSV(A2)__P0DOE7.1__M (opt2)
gggagagggcgcuuggcuugcaaggacccugagcugcggcauugaagcacacccaacccaacucgacugaagucagccucacugaaccggaucugagaaucuucucucucugggcuugccagggcucuccgaaccuagcuagcauccucuucaauuccaacuagaaagcuuaccauggagaccuacgucaacaagcuccacgagggcuccaccuacaccgccgccguccaguacaacguccucgagaaggacgacgaccccgccucccucaccaucuggguccccauguuccaguccuccaugcccgccgaccuccucaucaaggagcucgccaacgucaacauccucgucaagcagaucuccacccccaagggccccucccuccgcgucaugaucaacucccgcuccgccguccucgcccagaugcccuccaaguucaccaucugcgccaacgucucccucgacgagcgcuccaagcucgccuacgacgucaccacccccugcgagaucaaggccugcucccucaccugccucaaguccaagaacaugcucaccaccgucaaggaccucaccaugaagacccucaaccccacccacgacaucaucgcccucugcgaguucgagaacaucgucaccuccaagaaggucaucauccccaccuaccuccgcuccaucuccguccgcaacaaggaccucaacacccucgagaacaucaccaccaccgaguucaagaacgccaucaccaacgccaagaucauccccuacuccggccuccuccucgucaucaccgucaccgacaacaagggcgccuucaaguacaucaagccccagucccaguucaucgucgaccucggcgccuaccucgagaaggaguccaucuacuacgucaccaccaacuggaagcacaccgccacccgcuucgccaucaagcccauggaggacugaggacuagugaagggaacacccaaauuuaauucagccuuaagcacaauuaauuaagagugaaacguaauuguacaagcaguuggucacccaccauagggcaugaucaacaccgcaaccuuuccuuuuucccccagugauucugaaaaaccccucuucccuucagcuugcuuagauguuccaaauuuaguaagcuuaaggcggccuacagaagaaaaagaaaaaaaaggccacaaaaguucccucucacuuucaguaaauaaaauaaaagcagcaacagaaauaaagaaauaaaugaaauucaaaaugaaauaaauauuguguugugcagcauuaaaaaaucaauaaaaauuaaaaaugagcaagaucuaaaaaaaaaaaaaaaaaaaaaaaaaaaaaaaaaaaaaaaaaaaaaaaaaaaaaaaaaaaaaaaaugcaucccccccccccccccccccccccccccccccaaaggcucuuuucagagccaccagaauu

SEQ ID NO: 9832 - RNA, 1440 nt, Artificial Sequence
  mRNA product Design d-3 comprising derived and/or modified sequence from HRSV(A2)__P0DOE7.1__M (opt3)
gggagagggcgcuuggcuugcaaggacccugagcugcggcauugaagcacacccaacccaacucgacugaagucagccucacugaaccggaucugagaaucuucucucucugggcuugccagggcucuccgaaccuagcuagcauccucuucaauuccaacuagaaagcuuaccauggagaccuacgugaacaagcugcacgaaggcagcacauauacugccgcuguccaguacaauguucucgagaaagacgaugaccccgcaucccuuacgaucugggugccuauguuccaaucuucaaugccagccgaucuguugauuaaggaauuagcgaacguaaauauacuggugaaacagaucaguaccccgaaggggcccagccuaagagucaugauuaacuccaggucugcugugcucgcccagaugccuucgaaauuuacaaucugcgcaaauguuucacuggacgagcggagcaaacuugccuaugaugugacuaccccaugugaaauuaaggcuugcagucugacauguuugaaguccaagaacaugcucaccacugucaaagaccugacaaugaagacccugaaucccacgcaugauaucauagcacucugcgaguucgagaacaucgugacuucuaaaaagguaauuaucccuaccuacuuacgcagcauuuccguucgaaauaaggaccugaacacacuugaaaauaucacuaccacagaguuuaaaaacgccauaaccaaugcuaagauuaucccauauucaggauugcugcuagugauuacggucacugauaacaaaggugccuucaaguacaucaaaccccagagucaauuuaucguggaccucggcgcguaucuggaaaaggagagcauuuacuacgugacaaccaauuggaaacacacugcaacacguuucgccauaaagccuauggaggauugaggacuagugaagggaacacccaaauuuaauucagccuuaagcacaauuaauuaagagugaaacguaauuguacaagcaguuggucacccaccauagggcaugaucaacaccgcaaccuuuccuuuuucccccagugauucugaaaaaccccucuucccuucagcuugcuuagauguuccaaauuuaguaagcuuaaggcggccuacagaagaaaaagaaaaaaaaggccacaaaaguucccucucacuuucaguaaauaaaauaaaagcagcaacagaaauaaagaaauaaaugaaauucaaaaugaaauaaauauuguguugugcagcauuaaaaaaucaauaaaaauuaaaaaugagcaagaucuaaaaaaaaaaaaaaaaaaaaaaaaaaaaaaaaaaaaaaaaaaaaaaaaaaaaaaaaaaaaaaaaugcaucccccccccccccccccccccccccccccccaaaggcucuuuucagagccaccagaauu

SEQ ID NO: 9833 - RNA, 1440 nt, Artificial Sequence
  mRNA product Design d-3 comprising derived and/or modified sequence from HRSV(A2)__P0DOE7.1__M (opt4)
gggagagggcgcuuggcuugcaaggacccugagcugcggcauugaagcacacccaacccaacucgacugaagucagccucacugaaccggaucugagaaucuucucucucugggcuugccagggcucuccgaaccuagcuagcauccucuucaauuccaacuagaaagcuuaccauggagaccuacgugaacaagcugcacgagggcagcaccuacaccgccgccgugcaguacaacgugcuggagaaggacgacgaccccgccagccugaccaucugggugcccauguuccagagcagcaugcccgccgaccugcugaucaaggagcuggccaacgugaacauccuggugaagcagaucagcacccccaagggccccagccugagagugaugaucaacagcagaagcgccgugcuggcccagaugcccagcaaguucaccaucugcgccaacgugagccuggacgagagaagcaagcuggccuacgacgugaccacccccugcgagaucaaggccugcagccugaccugccugaagagcaagaacaugcugaccaccgugaaggaccugaccaugaagacccugaaccccacccacgacaucaucgcccugugcgaguucgagaacaucgugaccagcaagaaggugaucauccccaccuaccugagaagcaucagcgugagaaacaaggaccugaacacccuggagaacaucaccaccaccgaguucaagaacgccaucaccaacgccaagaucauccccuacagcggccugcugcuggugaucaccgugaccgacaacaagggcgccuucaaguacaucaagccccagagccaguucaucguggaccugggcgccuaccuggagaaggagagcaucuacuacgugaccaccaacuggaagcacaccgccaccagauucgccaucaagcccauggaggacugaggacuagugaagggaacacccaaauuuaauucagccuuaagcacaauuaauuaagagugaaacguaauuguacaagcaguuggucacccaccauagggcaugaucaacaccgcaaccuuuccuuuuucccccagugauucugaaaaaccccucuucccuucagcuugcuuagauguuccaaauuuaguaagcuuaaggcggccuacagaagaaaaagaaaaaaaaggccacaaaaguucccucucacuuucaguaaauaaaauaaaagcagcaacagaaauaaagaaauaaaugaaauucaaaaugaaauaaauauuguguugugcagcauuaaaaaaucaauaaaaauuaaaaaugagcaagaucuaaaaaaaaaaaaaaaaaaaaaaaaaaaaaaaaaaaaaaaaaaaaaaaaaaaaaaaaaaaaaaaaugcaucccccccccccccccccccccccccccccccaaaggcucuuuucagagccaccagaauu

SEQ ID NO: 9834 - RNA, 1440 nt, Artificial Sequence
  mRNA product Design d-3 comprising derived and/or modified sequence from HRSV(A2)__P0DOE7.1__M (opt5)
gggagagggcgcuuggcuugcaaggacccugagcugcggcauugaagcacacccaacccaacucgacugaagucagccucacugaaccggaucugagaaucuucucucucugggcuugccagggcucuccgaaccuagcuagcauccucuucaauuccaacuagaaagcuuaccauggagaccuacgugaacaagcugcacgaaggcagcacauauacggccgcuguccaguacaauguucucgagaaagacgaugaccccgccucccugaccaucugggugccuauguuccaaucuagcaugccggcggaucuucugauuaaggaacucgcuaacgugaauauccuggucaaacagauuuccacacccaaggggccuucucuuagagugaugaucaacagccgguccgccguucuggcccagaugcccucuaaauuuaccauuugcgcuaaugugagccucgacgagcgcuccaagcuggccuaugaugucacaaccccuugugaaaucaaggcuugcagccugacaugucucaaaucuaagaacaugcugaccacggugaaagaccuuaccaugaagacacugaaucccacccaugauaucauugcccucugcgaguucgagaacaucguuacauccaaaaaggugauuaucccuaccuaccugagaagcauuucuguccggaauaaggaccuuaacacgcuggaaaauaucacaaccacagaguuuaaaaacgcgauuaccaaugccaagaucaucccguauuccggacuccugcuggugauuaccgugacagauaacaaaggcgcuuucaaguacaucaaaccccagagccaauuuauugucgaccucggggccuaucuggaaaaggagucuaucuacuacguuacgaccaauuggaaacacacagcuacccgcuucgccauuaagccuauggaggauugaggacuagugaagggaacacccaaauuuaauucagccuuaagcacaauuaauuaagagugaaacguaauuguacaagcaguuggucacccaccauagggcaugaucaacaccgcaaccuuuccuuuuucccccagugauucugaaaaaccccucuucccuucagcuugcuuagauguuccaaauuuaguaagcuuaaggcggccuacagaagaaaaagaaaaaaaaggccacaaaaguucccucucacuuucaguaaauaaaauaaaagcagcaacagaaauaaagaaauaaaugaaauucaaaaugaaauaaauauuguguugugcagcauuaaaaaaucaauaaaaauuaaaaaugagcaagaucuaaaaaaaaaaaaaaaaaaaaaaaaaaaaaaaaaaaaaaaaaaaaaaaaaaaaaaaaaaaaaaaaugcaucccccccccccccccccccccccccccccccaaaggcucuuuucagagccaccagaauu

SEQ ID NO: 9835 - RNA, 1440 nt, Artificial Sequence
  mRNA product Design d-3 comprising derived and/or modified sequence from HRSV(A2)__P0DOE7.1__M (opt6)
gggagagggcgcuuggcuugcaaggacccugagcugcggcauugaagcacacccaacccaacucgacugaagucagccucacugaaccggaucugagaaucuucucucucugggcuugccagggcucuccgaaccuagcuagcauccucuucaauuccaacuagaaagcuuaccauggaaacauacguaaacaaacuacacgaaggauccacauacacagcagcaguacaauacaacguacuagaaaaagacgacgacccagcaucuuuaaccauauggguaccaauguuccaaucaucaaugccagcagaccucuuaauaaaagaacuagcaaacguaaacauccuagucaaacaaauaucaacacccaaaggaccaucccucagaguaaugaucaacucaagaucagcaguacuagcacaaaugccaucaaaauucacaauaugcgccaacguuucuuuagacgaacgaucaaaauuagccuacgacguaacaacacccugcgaaauaaaagcaugcucacuaacaugccuaaaaucaaaaaacaugcucacuacaguaaaagaccuaaccaugaaaacacucaacccaacacacgacauaauagcccuaugcgaauuugaaaacauaguaacaucaaaaaaaguaauaaucccaacauacuuaagaucgaucucagucagaaacaaagaccuaaauacacucgaaaacauaacaacaacagaauuuaaaaacgcaauaacaaacgcaaaaauaauaccauacucaggacuacuccuaguaauaacaguaacagacaacaaaggagcauucaaauacauaaaaccacaaucacaauucaucguagaccucggagcauaccuagaaaaagaaucaauauacuacguaacaacaaacuggaaacacaccgccacaagauucgcaauaaaacccauggaagacuaaggacuagugaagggaacacccaaauuuaauucagccuuaagcacaauuaauuaagagugaaacguaauuguacaagcaguuggucacccaccauagggcaugaucaacaccgcaaccuuuccuuuuucccccagugauucugaaaaaccccucuucccuucagcuugcuuagauguuccaaauuuaguaagcuuaaggcggccuacagaagaaaaagaaaaaaaaggccacaaaaguucccucucacuuucaguaaauaaaauaaaagcagcaacagaaauaaagaaauaaaugaaauucaaaaugaaauaaauauuguguugugcagcauuaaaaaaucaauaaaaauuaaaaaugagcaagaucuaaaaaaaaaaaaaaaaaaaaaaaaaaaaaaaaaaaaaaaaaaaaaaaaaaaaaaaaaaaaaaaaugcaucccccccccccccccccccccccccccccccaaaggcucuuuucagagccaccagaauu

SEQ ID NO: 9836 - RNA, 1440 nt, Artificial Sequence
  mRNA product Design d-3 comprising derived and/or modified sequence from HRSV(A2)__P0DOE7.1__M (opt11)
gggagagggcgcuuggcuugcaaggacccugagcugcggcauugaagcacacccaacccaacucgacugaagucagccucacugaaccggaucugagaaucuucucucucugggcuugccagggcucuccgaaccuagcuagcauccucuucaauuccaacuagaaagcuuaccauggaaaccuacgucaacaaacuacacgaaggcucaaccuacaccgccgccguccaauacaacguccucgaaaaagacgacgaccccgccucccuaaccaucuggguucccauguuccaaucauccaugcccgccgaccuccucauaaaagaacuagccaacgucaacauccuagucaaacaaaucagcacccccaaaggccccucccuccgcguaaugaucaacucccgcuccgccguccuagcccaaaugcccuccaaauuuacaaucugcgccaacgucucccucgacgaacgcucaaaacucgccuacgacgucaccacacccugcgaaaucaaagccugcucccucaccugccucaaaagcaaaaauaugcuaaccaccgucaaagaccuuaccaugaaaacccucaaccccacucacgacaucauagcccucugcgaauuugaaaacaucgucaccuccaaaaaagucaucauccccacauaccuccgcuccaucuccguccgcaacaaagaccucaacacccucgaaaacaucaccaccaccgaauuuaaaaacgccaucaccaacgccaaaaucauccccuacuccggccuccuccucgucaucaccguuaccgacaacaaaggcgccuucaaauacaucaaaccccaaucccaauucaucgucgaccucggagccuaccuugaaaaagaguccaucuacuacgucaccaccaacuggaaacacaccgccacccgauucgccaucaaacccauggaagacuaaggacuagugaagggaacacccaaauuuaauucagccuuaagcacaauuaauuaagagugaaacguaauuguacaagcaguuggucacccaccauagggcaugaucaacaccgcaaccuuuccuuuuucccccagugauucugaaaaaccccucuucccuucagcuugcuuagauguuccaaauuuaguaagcuuaaggcggccuacagaagaaaaagaaaaaaaaggccacaaaaguucccucucacuuucaguaaauaaaauaaaagcagcaacagaaauaaagaaauaaaugaaauucaaaaugaaauaaauauuguguugugcagcauuaaaaaaucaauaaaaauuaaaaaugagcaagaucuaaaaaaaaaaaaaaaaaaaaaaaaaaaaaaaaaaaaaaaaaaaaaaaaaaaaaaaaaaaaaaaaugcaucccccccccccccccccccccccccccccccaaaggcucuuuucagagccaccagaauu

SEQ ID NO: 9837 - RNA, 1123 nt, Artificial Sequence
  mRNA product Design d-4 comprising derived and/or modified sequence from HRSV(A2)__P0DOE7.1__M (wt)
gggagagucccgcagucggcguccagcggcucugcuuguucgugugugugucguugcaggccuuauucaagcuuaccauggaaacauacgugaacaagcuucacgaaggcuccacauacacagcugcuguucaauacaaugucuuagaaaaagacgaugacccugcaucacuuacaauaugggugcccauguuccaaucaucuaugccagcagauuuacuuauaaaagaacuagcuaaugucaacauacuagugaaacaaauauccacacccaagggaccuucacuaagagucaugauaaacucaagaagugcagugcuagcacaaaugcccagcaaauuuaccauaugcgcuaauguguccuuggaugaaagaagcaaacuagcauaugauguaaccacacccugugaaaucaaggcauguagucuaacaugccuaaaaucaaaaaauauguugacuacaguuaaagaucucacuaugaagacacucaacccuacacaugauauuauugcuuuaugugaauuugaaaacauaguaacaucaaaaaaagucauaauaccaacauaccuaagauccaucagugucagaaauaaagaucugaacacacuugaaaauauaacaaccacugaauucaaaaaugcuaucacaaaugcaaaaaucaucccuuacucaggauuacuauuagucaucacagugacugacaacaaaggagcauucaaauacauaaagccacaaagucaauucauaguagaucuuggagcuuaccuagaaaaagaaaguauauauuauguuaccacaaauuggaagcacacagcuacacgauuugcaaucaaacccauggaagauuaaggacuaguggaagcauuuuccuggcugauuaaaagaaauuacucagcuauggucaucuguuccuguuagaaggcuaugcagcauauuauauacuaugcgcauguuaugaaaugcauaauaaaaaauuuuaaaaaaucuaaaagaucuaaaaaaaaaaaaaaaaaaaaaaaaaaaaaaaaaaaaaaaaaaaaaaaaaaaaaaaaaaaaaaaaugcaucccccccccccccccccccccccccccccccaaaggcucuuuucagagccaccagaauu

SEQ ID NO: 9838 - RNA, 1123 nt, Artificial Sequence
  mRNA product Design d-4 comprising derived and/or modified sequence from HRSV(A2)__P0DOE7.1__M (opt1)
gggagagucccgcagucggcguccagcggcucugcuuguucgugugugugucguugcaggccuuauucaagcuuaccauggagaccuacgugaacaagcugcacgagggcagcaccuacacggccgccguccaguacaacgugcucgagaaggacgacgaccccgcgucccugaccaucugggugccgauguuccagagcuccaugcccgccgaccugcucaucaaggagcuggccaacgucaacauccuggugaagcagaucagcacccccaaggggcccucccuccgcgugaugaucaacagccgguccgccguccuggcccagaugccgagcaaguucaccaucugcgcgaacgugucccuggacgagcgcagcaagcucgccuacgacgugacgacccccugcgagaucaaggccugcucccugaccugccucaagagcaagaacaugcugaccacggucaaggaccugaccaugaagacccugaaccccacccacgacaucaucgcccucugcgaguucgagaacaucgugacguccaagaaggugaucauccccaccuaccugcggagcaucuccguccgcaacaaggaccugaacacccucgagaacaucaccacgaccgaguucaagaacgcgaucaccaacgccaagaucaucccguacagcggccugcugcucgugaucaccgugacggacaacaagggggccuucaaguacaucaagccccagucccaguucaucgucgaccugggcgccuaccuggagaaggagagcaucuacuacgugaccaccaacuggaagcacaccgccacgcgguucgcgaucaagcccauggaggacugaggacuaguggaagcauuuuccuggcugauuaaaagaaauuacucagcuauggucaucuguuccuguuagaaggcuaugcagcauauuauauacuaugcgcauguuaugaaaugcauaauaaaaaauuuuaaaaaaucuaaaagaucuaaaaaaaaaaaaaaaaaaaaaaaaaaaaaaaaaaaaaaaaaaaaaaaaaaaaaaaaaaaaaaaaugcaucccccccccccccccccccccccccccccccaaaggcucuuuucagagccaccagaauu

SEQ ID NO: 9839 - RNA, 1123 nt, Artificial Sequence
  mRNA product Design d-4 comprising derived and/or modified sequence from HRSV(A2)__P0DOE7.1__M (opt2)
gggagagucccgcagucggcguccagcggcucugcuuguucgugugugugucguugcaggccuuauucaagcuuaccauggagaccuacgucaacaagcuccacgagggcuccaccuacaccgccgccguccaguacaacguccucgagaaggacgacgaccccgccucccucaccaucuggguccccauguuccaguccuccaugcccgccgaccuccucaucaaggagcucgccaacgucaacauccucgucaagcagaucuccacccccaagggccccucccuccgcgucaugaucaacucccgcuccgccguccucgcccagaugcccuccaaguucaccaucugcgccaacgucucccucgacgagcgcuccaagcucgccuacgacgucaccacccccugcgagaucaaggccugcucccucaccugccucaaguccaagaacaugcucaccaccgucaaggaccucaccaugaagacccucaaccccacccacgacaucaucgcccucugcgaguucgagaacaucgucaccuccaagaaggucaucauccccaccuaccuccgcuccaucuccguccgcaacaaggaccucaacacccucgagaacaucaccaccaccgaguucaagaacgccaucaccaacgccaagaucauccccuacuccggccuccuccucgucaucaccgucaccgacaacaagggcgccuucaaguacaucaagccccagucccaguucaucgucgaccucggcgccuaccucgagaaggaguccaucuacuacgucaccaccaacuggaagcacaccgccacccgcuucgccaucaagcccauggaggacugaggacuaguggaagcauuuuccuggcugauuaaaagaaauuacucagcuauggucaucuguuccuguuagaaggcuaugcagcauauuauauacuaugcgcauguuaugaaaugcauaauaaaaaauuuuaaaaaaucuaaaagaucuaaaaaaaaaaaaaaaaaaaaaaaaaaaaaaaaaaaaaaaaaaaaaaaaaaaaaaaaaaaaaaaaugcaucccccccccccccccccccccccccccccccaaaggcucuuuucagagccaccagaauu

SEQ ID NO: 9840 - RNA, 1123 nt, Artificial Sequence
  mRNA product Design d-4 comprising derived and/or modified sequence from HRSV(A2)__P0DOE7.1__M (opt3)
gggagagucccgcagucggcguccagcggcucugcuuguucgugugugugucguugcaggccuuauucaagcuuaccauggagaccuacgugaacaagcugcacgaaggcagcacauauacugccgcuguccaguacaauguucucgagaaagacgaugaccccgcaucccuuacgaucugggugccuauguuccaaucuucaaugccagccgaucuguugauuaaggaauuagcgaacguaaauauacuggugaaacagaucaguaccccgaaggggcccagccuaagagucaugauuaacuccaggucugcugugcucgcccagaugccuucgaaauuuacaaucugcgcaaauguuucacuggacgagcggagcaaacuugccuaugaugugacuaccccaugugaaauuaaggcuugcagucugacauguuugaaguccaagaacaugcucaccacugucaaagaccugacaaugaagacccugaaucccacgcaugauaucauagcacucugcgaguucgagaacaucgugacuucuaaaaagguaauuaucccuaccuacuuacgcagcauuuccguucgaaauaaggaccugaacacacuugaaaauaucacuaccacagaguuuaaaaacgccauaaccaaugcuaagauuaucccauauucaggauugcugcuagugauuacggucacugauaacaaaggugccuucaaguacaucaaaccccagagucaauuuaucguggaccucggcgcguaucuggaaaaggagagcauuuacuacgugacaaccaauuggaaacacacugcaacacguuucgccauaaagccuauggaggauugaggacuaguggaagcauuuuccuggcugauuaaaagaaauuacucagcuauggucaucuguuccuguuagaaggcuaugcagcauauuauauacuaugcgcauguuaugaaaugcauaauaaaaaauuuuaaaaaaucuaaaagaucuaaaaaaaaaaaaaaaaaaaaaaaaaaaaaaaaaaaaaaaaaaaaaaaaaaaaaaaaaaaaaaaaugcaucccccccccccccccccccccccccccccccaaaggcucuuuucagagccaccagaauu

SEQ ID NO: 9841 - RNA, 1123 nt, Artificial Sequence
  mRNA product Design d-4 comprising derived and/or modified sequence from HRSV(A2)__P0DOE7.1__M (opt4)
gggagagucccgcagucggcguccagcggcucugcuuguucgugugugugucguugcaggccuuauucaagcuuaccauggagaccuacgugaacaagcugcacgagggcagcaccuacaccgccgccgugcaguacaacgugcuggagaaggacgacgaccccgccagccugaccaucugggugcccauguuccagagcagcaugcccgccgaccugcugaucaaggagcuggccaacgugaacauccuggugaagcagaucagcacccccaagggccccagccugagagugaugaucaacagcagaagcgccgugcuggcccagaugcccagcaaguucaccaucugcgccaacgugagccuggacgagagaagcaagcuggccuacgacgugaccacccccugcgagaucaaggccugcagccugaccugccugaagagcaagaacaugcugaccaccgugaaggaccugaccaugaagacccugaaccccacccacgacaucaucgcccugugcgaguucgagaacaucgugaccagcaagaaggugaucauccccaccuaccugagaagcaucagcgugagaaacaaggaccugaacacccuggagaacaucaccaccaccgaguucaagaacgccaucaccaacgccaagaucauccccuacagcggccugcugcuggugaucaccgugaccgacaacaagggcgccuucaaguacaucaagccccagagccaguucaucguggaccugggcgccuaccuggagaaggagagcaucuacuacgugaccaccaacuggaagcacaccgccaccagauucgccaucaagcccauggaggacugaggacuaguggaagcauuuuccuggcugauuaaaagaaauuacucagcuauggucaucuguuccuguuagaaggcuaugcagcauauuauauacuaugcgcauguuaugaaaugcauaauaaaaaauuuuaaaaaaucuaaaagaucuaaaaaaaaaaaaaaaaaaaaaaaaaaaaaaaaaaaaaaaaaaaaaaaaaaaaaaaaaaaaaaaaugcaucccccccccccccccccccccccccccccccaaaggcucuuuucagagccaccagaauu

SEQ ID NO: 9842 - RNA, 1123 nt, Artificial Sequence
  mRNA product Design d-4 comprising derived and/or modified sequence from HRSV(A2)__P0DOE7.1__M (opt5)
gggagagucccgcagucggcguccagcggcucugcuuguucgugugugugucguugcaggccuuauucaagcuuaccauggagaccuacgugaacaagcugcacgaaggcagcacauauacggccgcuguccaguacaauguucucgagaaagacgaugaccccgccucccugaccaucugggugccuauguuccaaucuagcaugccggcggaucuucugauuaaggaacucgcuaacgugaauauccuggucaaacagauuuccacacccaaggggccuucucuuagagugaugaucaacagccgguccgccguucuggcccagaugcccucuaaauuuaccauuugcgcuaaugugagccucgacgagcgcuccaagcuggccuaugaugucacaaccccuugugaaaucaaggcuugcagccugacaugucucaaaucuaagaacaugcugaccacggugaaagaccuuaccaugaagacacugaaucccacccaugauaucauugcccucugcgaguucgagaacaucguuacauccaaaaaggugauuaucccuaccuaccugagaagcauuucuguccggaauaaggaccuuaacacgcuggaaaauaucacaaccacagaguuuaaaaacgcgauuaccaaugccaagaucaucccguauuccggacuccugcuggugauuaccgugacagauaacaaaggcgcuuucaaguacaucaaaccccagagccaauuuauugucgaccucggggccuaucuggaaaaggagucuaucuacuacguuacgaccaauuggaaacacacagcuacccgcuucgccauuaagccuauggaggauugaggacuaguggaagcauuuuccuggcugauuaaaagaaauuacucagcuauggucaucuguuccuguuagaaggcuaugcagcauauuauauacuaugcgcauguuaugaaaugcauaauaaaaaauuuuaaaaaaucuaaaagaucuaaaaaaaaaaaaaaaaaaaaaaaaaaaaaaaaaaaaaaaaaaaaaaaaaaaaaaaaaaaaaaaaugcaucccccccccccccccccccccccccccccccaaaggcucuuuucagagccaccagaauu

SEQ ID NO: 9843 - RNA, 1123 nt, Artificial Sequence
  mRNA product Design d-4 comprising derived and/or modified sequence from HRSV(A2)__P0DOE7.1__M (opt6)
gggagagucccgcagucggcguccagcggcucugcuuguucgugugugugucguugcaggccuuauucaagcuuaccauggaaacauacguaaacaaacuacacgaaggauccacauacacagcagcaguacaauacaacguacuagaaaaagacgacgacccagcaucuuuaaccauauggguaccaauguuccaaucaucaaugccagcagaccucuuaauaaaagaacuagcaaacguaaacauccuagucaaacaaauaucaacacccaaaggaccaucccucagaguaaugaucaacucaagaucagcaguacuagcacaaaugccaucaaaauucacaauaugcgccaacguuucuuuagacgaacgaucaaaauuagccuacgacguaacaacacccugcgaaauaaaagcaugcucacuaacaugccuaaaaucaaaaaacaugcucacuacaguaaaagaccuaaccaugaaaacacucaacccaacacacgacauaauagcccuaugcgaauuugaaaacauaguaacaucaaaaaaaguaauaaucccaacauacuuaagaucgaucucagucagaaacaaagaccuaaauacacucgaaaacauaacaacaacagaauuuaaaaacgcaauaacaaacgcaaaaauaauaccauacucaggacuacuccuaguaauaacaguaacagacaacaaaggagcauucaaauacauaaaaccacaaucacaauucaucguagaccucggagcauaccuagaaaaagaaucaauauacuacguaacaacaaacuggaaacacaccgccacaagauucgcaauaaaacccauggaagacuaaggacuaguggaagcauuuuccuggcugauuaaaagaaauuacucagcuauggucaucuguuccuguuagaaggcuaugcagcauauuauauacuaugcgcauguuaugaaaugcauaauaaaaaauuuuaaaaaaucuaaaagaucuaaaaaaaaaaaaaaaaaaaaaaaaaaaaaaaaaaaaaaaaaaaaaaaaaaaaaaaaaaaaaaaaugcaucccccccccccccccccccccccccccccccaaaggcucuuuucagagccaccagaauu

SEQ ID NO: 9844 - RNA, 1123 nt, Artificial Sequence
  mRNA product Design d-4 comprising derived and/or modified sequence from HRSV(A2)__P0DOE7.1__M (opt11)
gggagagucccgcagucggcguccagcggcucugcuuguucgugugugugucguugcaggccuuauucaagcuuaccauggaaaccuacgucaacaaacuacacgaaggcucaaccuacaccgccgccguccaauacaacguccucgaaaaagacgacgaccccgccucccuaaccaucuggguucccauguuccaaucauccaugcccgccgaccuccucauaaaagaacuagccaacgucaacauccuagucaaacaaaucagcacccccaaaggccccucccuccgcguaaugaucaacucccgcuccgccguccuagcccaaaugcccuccaaauuuacaaucugcgccaacgucucccucgacgaacgcucaaaacucgccuacgacgucaccacacccugcgaaaucaaagccugcucccucaccugccucaaaagcaaaaauaugcuaaccaccgucaaagaccuuaccaugaaaacccucaaccccacucacgacaucauagcccucugcgaauuugaaaacaucgucaccuccaaaaaagucaucauccccacauaccuccgcuccaucuccguccgcaacaaagaccucaacacccucgaaaacaucaccaccaccgaauuuaaaaacgccaucaccaacgccaaaaucauccccuacuccggccuccuccucgucaucaccguuaccgacaacaaaggcgccuucaaauacaucaaaccccaaucccaauucaucgucgaccucggagccuaccuugaaaaagaguccaucuacuacgucaccaccaacuggaaacacaccgccacccgauucgccaucaaacccauggaagacuaaggacuaguggaagcauuuuccuggcugauuaaaagaaauuacucagcuauggucaucuguuccuguuagaaggcuaugcagcauauuauauacuaugcgcauguuaugaaaugcauaauaaaaaauuuuaaaaaaucuaaaagaucuaaaaaaaaaaaaaaaaaaaaaaaaaaaaaaaaaaaaaaaaaaaaaaaaaaaaaaaaaaaaaaaaugcaucccccccccccccccccccccccccccccccaaaggcucuuuucagagccaccagaauu

SEQ ID NO: 9845 - RNA, 1220 nt, Artificial Sequence
  mRNA product Design d-5 comprising derived and/or modified sequence from HRSV(A2)__P0DOE7.1__M (wt)
gggagagggcgcuuggcuugcaaggacccugagcugcggcauugaagcacacccaacccaacucgacugaagucagccucacugaaccggaucugagaaucuucucucucugggcuugccagggcucuccgaaccuagcuagcauccucuucaauuccaacuagaaagcuuaccauggaaacauacgugaacaagcuucacgaaggcuccacauacacagcugcuguucaauacaaugucuuagaaaaagacgaugacccugcaucacuuacaauaugggugcccauguuccaaucaucuaugccagcagauuuacuuauaaaagaacuagcuaaugucaacauacuagugaaacaaauauccacacccaagggaccuucacuaagagucaugauaaacucaagaagugcagugcuagcacaaaugcccagcaaauuuaccauaugcgcuaauguguccuuggaugaaagaagcaaacuagcauaugauguaaccacacccugugaaaucaaggcauguagucuaacaugccuaaaaucaaaaaauauguugacuacaguuaaagaucucacuaugaagacacucaacccuacacaugauauuauugcuuuaugugaauuugaaaacauaguaacaucaaaaaaagucauaauaccaacauaccuaagauccaucagugucagaaauaaagaucugaacacacuugaaaauauaacaaccacugaauucaaaaaugcuaucacaaaugcaaaaaucaucccuuacucaggauuacuauuagucaucacagugacugacaacaaaggagcauucaaauacauaaagccacaaagucaauucauaguagaucuuggagcuuaccuagaaaaagaaaguauauauuauguuaccacaaauuggaagcacacagcuacacgauuugcaaucaaacccauggaagauuaaggacuaguggaagcauuuuccuggcugauuaaaagaaauuacucagcuauggucaucuguuccuguuagaaggcuaugcagcauauuauauacuaugcgcauguuaugaaaugcauaauaaaaaauuuuaaaaaaucuaaaagaucuaaaaaaaaaaaaaaaaaaaaaaaaaaaaaaaaaaaaaaaaaaaaaaaaaaaaaaaaaaaaaaaaugcaucccccccccccccccccccccccccccccccaaaggcucuuuucagagccaccagaauu

SEQ ID NO: 9846 - RNA, 1220 nt, Artificial Sequence
  mRNA product Design d-5 comprising derived and/or modified sequence from HRSV(A2)__P0DOE7.1__M (opt1)
gggagagggcgcuuggcuugcaaggacccugagcugcggcauugaagcacacccaacccaacucgacugaagucagccucacugaaccggaucugagaaucuucucucucugggcuugccagggcucuccgaaccuagcuagcauccucuucaauuccaacuagaaagcuuaccauggagaccuacgugaacaagcugcacgagggcagcaccuacacggccgccguccaguacaacgugcucgagaaggacgacgaccccgcgucccugaccaucugggugccgauguuccagagcuccaugcccgccgaccugcucaucaaggagcuggccaacgucaacauccuggugaagcagaucagcacccccaaggggcccucccuccgcgugaugaucaacagccgguccgccguccuggcccagaugccgagcaaguucaccaucugcgcgaacgugucccuggacgagcgcagcaagcucgccuacgacgugacgacccccugcgagaucaaggccugcucccugaccugccucaagagcaagaacaugcugaccacggucaaggaccugaccaugaagacccugaaccccacccacgacaucaucgcccucugcgaguucgagaacaucgugacguccaagaaggugaucauccccaccuaccugcggagcaucuccguccgcaacaaggaccugaacacccucgagaacaucaccacgaccgaguucaagaacgcgaucaccaacgccaagaucaucccguacagcggccugcugcucgugaucaccgugacggacaacaagggggccuucaaguacaucaagccccagucccaguucaucgucgaccugggcgccuaccuggagaaggagagcaucuacuacgugaccaccaacuggaagcacaccgccacgcgguucgcgaucaagcccauggaggacugaggacuaguggaagcauuuuccuggcugauuaaaagaaauuacucagcuauggucaucuguuccuguuagaaggcuaugcagcauauuauauacuaugcgcauguuaugaaaugcauaauaaaaaauuuuaaaaaaucuaaaagaucuaaaaaaaaaaaaaaaaaaaaaaaaaaaaaaaaaaaaaaaaaaaaaaaaaaaaaaaaaaaaaaaaugcaucccccccccccccccccccccccccccccccaaaggcucuuuucagagccaccagaauu

SEQ ID NO: 9847 - RNA, 1220 nt, Artificial Sequence
  mRNA product Design d-5 comprising derived and/or modified sequence from HRSV(A2)__P0DOE7.1__M (opt2)
gggagagggcgcuuggcuugcaaggacccugagcugcggcauugaagcacacccaacccaacucgacugaagucagccucacugaaccggaucugagaaucuucucucucugggcuugccagggcucuccgaaccuagcuagcauccucuucaauuccaacuagaaagcuuaccauggagaccuacgucaacaagcuccacgagggcuccaccuacaccgccgccguccaguacaacguccucgagaaggacgacgaccccgccucccucaccaucuggguccccauguuccaguccuccaugcccgccgaccuccucaucaaggagcucgccaacgucaacauccucgucaagcagaucuccacccccaagggccccucccuccgcgucaugaucaacucccgcuccgccguccucgcccagaugcccuccaaguucaccaucugcgccaacgucucccucgacgagcgcuccaagcucgccuacgacgucaccacccccugcgagaucaaggccugcucccucaccugccucaaguccaagaacaugcucaccaccgucaaggaccucaccaugaagacccucaaccccacccacgacaucaucgcccucugcgaguucgagaacaucgucaccuccaagaaggucaucauccccaccuaccuccgcuccaucuccguccgcaacaaggaccucaacacccucgagaacaucaccaccaccgaguucaagaacgccaucaccaacgccaagaucauccccuacuccggccuccuccucgucaucaccgucaccgacaacaagggcgccuucaaguacaucaagccccagucccaguucaucgucgaccucggcgccuaccucgagaaggaguccaucuacuacgucaccaccaacuggaagcacaccgccacccgcuucgccaucaagcccauggaggacugaggacuaguggaagcauuuuccuggcugauuaaaagaaauuacucagcuauggucaucuguuccuguuagaaggcuaugcagcauauuauauacuaugcgcauguuaugaaaugcauaauaaaaaauuuuaaaaaaucuaaaagaucuaaaaaaaaaaaaaaaaaaaaaaaaaaaaaaaaaaaaaaaaaaaaaaaaaaaaaaaaaaaaaaaaugcaucccccccccccccccccccccccccccccccaaaggcucuuuucagagccaccagaauu

SEQ ID NO: 9848 - RNA, 1220 nt, Artificial Sequence
  mRNA product Design d-5 comprising derived and/or modified sequence from HRSV(A2)__P0DOE7.1__M (opt3)
gggagagggcgcuuggcuugcaaggacccugagcugcggcauugaagcacacccaacccaacucgacugaagucagccucacugaaccggaucugagaaucuucucucucugggcuugccagggcucuccgaaccuagcuagcauccucuucaauuccaacuagaaagcuuaccauggagaccuacgugaacaagcugcacgaaggcagcacauauacugccgcuguccaguacaauguucucgagaaagacgaugaccccgcaucccuuacgaucugggugccuauguuccaaucuucaaugccagccgaucuguugauuaaggaauuagcgaacguaaauauacuggugaaacagaucaguaccccgaaggggcccagccuaagagucaugauuaacuccaggucugcugugcucgcccagaugccuucgaaauuuacaaucugcgcaaauguuucacuggacgagcggagcaaacuugccuaugaugugacuaccccaugugaaauuaaggcuugcagucugacauguuugaaguccaagaacaugcucaccacugucaaagaccugacaaugaagacccugaaucccacgcaugauaucauagcacucugcgaguucgagaacaucgugacuucuaaaaagguaauuaucccuaccuacuuacgcagcauuuccguucgaaauaaggaccugaacacacuugaaaauaucacuaccacagaguuuaaaaacgccauaaccaaugcuaagauuaucccauauucaggauugcugcuagugauuacggucacugauaacaaaggugccuucaaguacaucaaaccccagagucaauuuaucguggaccucggcgcguaucuggaaaaggagagcauuuacuacgugacaaccaauuggaaacacacugcaacacguuucgccauaaagccuauggaggauugaggacuaguggaagcauuuuccuggcugauuaaaagaaauuacucagcuauggucaucuguuccuguuagaaggcuaugcagcauauuauauacuaugcgcauguuaugaaaugcauaauaaaaaauuuuaaaaaaucuaaaagaucuaaaaaaaaaaaaaaaaaaaaaaaaaaaaaaaaaaaaaaaaaaaaaaaaaaaaaaaaaaaaaaaaugcaucccccccccccccccccccccccccccccccaaaggcucuuuucagagccaccagaauu

SEQ ID NO: 9849 - RNA, 1220 nt, Artificial Sequence
  mRNA product Design d-5 comprising derived and/or modified sequence from HRSV(A2)__P0DOE7.1__M (opt4)
gggagagggcgcuuggcuugcaaggacccugagcugcggcauugaagcacacccaacccaacucgacugaagucagccucacugaaccggaucugagaaucuucucucucugggcuugccagggcucuccgaaccuagcuagcauccucuucaauuccaacuagaaagcuuaccauggagaccuacgugaacaagcugcacgagggcagcaccuacaccgccgccgugcaguacaacgugcuggagaaggacgacgaccccgccagccugaccaucugggugcccauguuccagagcagcaugcccgccgaccugcugaucaaggagcuggccaacgugaacauccuggugaagcagaucagcacccccaagggccccagccugagagugaugaucaacagcagaagcgccgugcuggcccagaugcccagcaaguucaccaucugcgccaacgugagccuggacgagagaagcaagcuggccuacgacgugaccacccccugcgagaucaaggccugcagccugaccugccugaagagcaagaacaugcugaccaccgugaaggaccugaccaugaagacccugaaccccacccacgacaucaucgcccugugcgaguucgagaacaucgugaccagcaagaaggugaucauccccaccuaccugagaagcaucagcgugagaaacaaggaccugaacacccuggagaacaucaccaccaccgaguucaagaacgccaucaccaacgccaagaucauccccuacagcggccugcugcuggugaucaccgugaccgacaacaagggcgccuucaaguacaucaagccccagagccaguucaucguggaccugggcgccuaccuggagaaggagagcaucuacuacgugaccaccaacuggaagcacaccgccaccagauucgccaucaagcccauggaggacugaggacuaguggaagcauuuuccuggcugauuaaaagaaauuacucagcuauggucaucuguuccuguuagaaggcuaugcagcauauuauauacuaugcgcauguuaugaaaugcauaauaaaaaauuuuaaaaaaucuaaaagaucuaaaaaaaaaaaaaaaaaaaaaaaaaaaaaaaaaaaaaaaaaaaaaaaaaaaaaaaaaaaaaaaaugcaucccccccccccccccccccccccccccccccaaaggcucuuuucagagccaccagaauu

SEQ ID NO: 9850 - RNA, 1220 nt, Artificial Sequence
  mRNA product Design d-5 comprising derived and/or modified sequence from HRSV(A2)__P0DOE7.1__M (opt5)
gggagagggcgcuuggcuugcaaggacccugagcugcggcauugaagcacacccaacccaacucgacugaagucagccucacugaaccggaucugagaaucuucucucucugggcuugccagggcucuccgaaccuagcuagcauccucuucaauuccaacuagaaagcuuaccauggagaccuacgugaacaagcugcacgaaggcagcacauauacggccgcuguccaguacaauguucucgagaaagacgaugaccccgccucccugaccaucugggugccuauguuccaaucuagcaugccggcggaucuucugauuaaggaacucgcuaacgugaauauccuggucaaacagauuuccacacccaaggggccuucucuuagagugaugaucaacagccgguccgccguucuggcccagaugcccucuaaauuuaccauuugcgcuaaugugagccucgacgagcgcuccaagcuggccuaugaugucacaaccccuugugaaaucaaggcuugcagccugacaugucucaaaucuaagaacaugcugaccacggugaaagaccuuaccaugaagacacugaaucccacccaugauaucauugcccucugcgaguucgagaacaucguuacauccaaaaaggugauuaucccuaccuaccugagaagcauuucuguccggaauaaggaccuuaacacgcuggaaaauaucacaaccacagaguuuaaaaacgcgauuaccaaugccaagaucaucccguauuccggacuccugcuggugauuaccgugacagauaacaaaggcgcuuucaaguacaucaaaccccagagccaauuuauugucgaccucggggccuaucuggaaaaggagucuaucuacuacguuacgaccaauuggaaacacacagcuacccgcuucgccauuaagccuauggaggauugaggacuaguggaagcauuuuccuggcugauuaaaagaaauuacucagcuauggucaucuguuccuguuagaaggcuaugcagcauauuauauacuaugcgcauguuaugaaaugcauaauaaaaaauuuuaaaaaaucuaaaagaucuaaaaaaaaaaaaaaaaaaaaaaaaaaaaaaaaaaaaaaaaaaaaaaaaaaaaaaaaaaaaaaaaugcaucccccccccccccccccccccccccccccccaaaggcucuuuucagagccaccagaauu

SEQ ID NO: 9851 - RNA, 1220 nt, Artificial Sequence
  mRNA product Design d-5 comprising derived and/or modified sequence from HRSV(A2)__P0DOE7.1__M (opt6)
gggagagggcgcuuggcuugcaaggacccugagcugcggcauugaagcacacccaacccaacucgacugaagucagccucacugaaccggaucugagaaucuucucucucugggcuugccagggcucuccgaaccuagcuagcauccucuucaauuccaacuagaaagcuuaccauggaaacauacguaaacaaacuacacgaaggauccacauacacagcagcaguacaauacaacguacuagaaaaagacgacgacccagcaucuuuaaccauauggguaccaauguuccaaucaucaaugccagcagaccucuuaauaaaagaacuagcaaacguaaacauccuagucaaacaaauaucaacacccaaaggaccaucccucagaguaaugaucaacucaagaucagcaguacuagcacaaaugccaucaaaauucacaauaugcgccaacguuucuuuagacgaacgaucaaaauuagccuacgacguaacaacacccugcgaaauaaaagcaugcucacuaacaugccuaaaaucaaaaaacaugcucacuacaguaaaagaccuaaccaugaaaacacucaacccaacacacgacauaauagcccuaugcgaauuugaaaacauaguaacaucaaaaaaaguaauaaucccaacauacuuaagaucgaucucagucagaaacaaagaccuaaauacacucgaaaacauaacaacaacagaauuuaaaaacgcaauaacaaacgcaaaaauaauaccauacucaggacuacuccuaguaauaacaguaacagacaacaaaggagcauucaaauacauaaaaccacaaucacaauucaucguagaccucggagcauaccuagaaaaagaaucaauauacuacguaacaacaaacuggaaacacaccgccacaagauucgcaauaaaacccauggaagacuaaggacuaguggaagcauuuuccuggcugauuaaaagaaauuacucagcuauggucaucuguuccuguuagaaggcuaugcagcauauuauauacuaugcgcauguuaugaaaugcauaauaaaaaauuuuaaaaaaucuaaaagaucuaaaaaaaaaaaaaaaaaaaaaaaaaaaaaaaaaaaaaaaaaaaaaaaaaaaaaaaaaaaaaaaaugcaucccccccccccccccccccccccccccccccaaaggcucuuuucagagccaccagaauu

SEQ ID NO: 9852 - RNA, 1220 nt, Artificial Sequence
  mRNA product Design d-5 comprising derived and/or modified sequence from HRSV(A2)__P0DOE7.1__M (opt11)
gggagagggcgcuuggcuugcaaggacccugagcugcggcauugaagcacacccaacccaacucgacugaagucagccucacugaaccggaucugagaaucuucucucucugggcuugccagggcucuccgaaccuagcuagcauccucuucaauuccaacuagaaagcuuaccauggaaaccuacgucaacaaacuacacgaaggcucaaccuacaccgccgccguccaauacaacguccucgaaaaagacgacgaccccgccucccuaaccaucuggguucccauguuccaaucauccaugcccgccgaccuccucauaaaagaacuagccaacgucaacauccuagucaaacaaaucagcacccccaaaggccccucccuccgcguaaugaucaacucccgcuccgccguccuagcccaaaugcccuccaaauuuacaaucugcgccaacgucucccucgacgaacgcucaaaacucgccuacgacgucaccacacccugcgaaaucaaagccugcucccucaccugccucaaaagcaaaaauaugcuaaccaccgucaaagaccuuaccaugaaaacccucaaccccacucacgacaucauagcccucugcgaauuugaaaacaucgucaccuccaaaaaagucaucauccccacauaccuccgcuccaucuccguccgcaacaaagaccucaacacccucgaaaacaucaccaccaccgaauuuaaaaacgccaucaccaacgccaaaaucauccccuacuccggccuccuccucgucaucaccguuaccgacaacaaaggcgccuucaaauacaucaaaccccaaucccaauucaucgucgaccucggagccuaccuugaaaaagaguccaucuacuacgucaccaccaacuggaaacacaccgccacccgauucgccaucaaacccauggaagacuaaggacuaguggaagcauuuuccuggcugauuaaaagaaauuacucagcuauggucaucuguuccuguuagaaggcuaugcagcauauuauauacuaugcgcauguuaugaaaugcauaauaaaaaauuuuaaaaaaucuaaaagaucuaaaaaaaaaaaaaaaaaaaaaaaaaaaaaaaaaaaaaaaaaaaaaaaaaaaaaaaaaaaaaaaaugcaucccccccccccccccccccccccccccccccaaaggcucuuuucagagccaccagaauu

SEQ ID NO: 9853 - RNA, 1100 nt, Artificial Sequence
  mRNA product Design e-1 comprising derived and/or modified sequence from HRSV(A2)__P0DOE7.1__M (wt)
gggagaauauaagcguuggcggagcgucgguuguagcacucugcgcgcccgcucuucugcugcuguuugucuacuuccuccugcuuccccgccgccgccgccgccaucaagcuuaccauggaaacauacgugaacaagcuucacgaaggcuccacauacacagcugcuguucaauacaaugucuuagaaaaagacgaugacccugcaucacuuacaauaugggugcccauguuccaaucaucuaugccagcagauuuacuuauaaaagaacuagcuaaugucaacauacuagugaaacaaauauccacacccaagggaccuucacuaagagucaugauaaacucaagaagugcagugcuagcacaaaugcccagcaaauuuaccauaugcgcuaauguguccuuggaugaaagaagcaaacuagcauaugauguaaccacacccugugaaaucaaggcauguagucuaacaugccuaaaaucaaaaaauauguugacuacaguuaaagaucucacuaugaagacacucaacccuacacaugauauuauugcuuuaugugaauuugaaaacauaguaacaucaaaaaaagucauaauaccaacauaccuaagauccaucagugucagaaauaaagaucugaacacacuugaaaauauaacaaccacugaauucaaaaaugcuaucacaaaugcaaaaaucaucccuuacucaggauuacuauuagucaucacagugacugacaacaaaggagcauucaaauacauaaagccacaaagucaauucauaguagaucuuggagcuuaccuagaaaaagaaaguauauauuauguuaccacaaauuggaagcacacagcuacacgauuugcaaucaaacccauggaagauuaaggacuaguguccaccugucccuccugggcugcuggauugucucguuuuccugccaaauaaacaggaucagcgcuuuacagaucuaaaaaaaaaaaaaaaaaaaaaaaaaaaaaaaaaaaaaaaaaaaaaaaaaaaaaaaaaaaaaaaaugcaucccccccccccccccccccccccccccccccaaaggcucuuuucagagccaccagaauu

SEQ ID NO: 9854 - RNA, 1100 nt, Artificial Sequence
  mRNA product Design e-1 comprising derived and/or modified sequence from HRSV(A2)__P0DOE7.1__M (opt1)
gggagaauauaagcguuggcggagcgucgguuguagcacucugcgcgcccgcucuucugcugcuguuugucuacuuccuccugcuuccccgccgccgccgccgccaucaagcuuaccauggagaccuacgugaacaagcugcacgagggcagcaccuacacggccgccguccaguacaacgugcucgagaaggacgacgaccccgcgucccugaccaucugggugccgauguuccagagcuccaugcccgccgaccugcucaucaaggagcuggccaacgucaacauccuggugaagcagaucagcacccccaaggggcccucccuccgcgugaugaucaacagccgguccgccguccuggcccagaugccgagcaaguucaccaucugcgcgaacgugucccuggacgagcgcagcaagcucgccuacgacgugacgacccccugcgagaucaaggccugcucccugaccugccucaagagcaagaacaugcugaccacggucaaggaccugaccaugaagacccugaaccccacccacgacaucaucgcccucugcgaguucgagaacaucgugacguccaagaaggugaucauccccaccuaccugcggagcaucuccguccgcaacaaggaccugaacacccucgagaacaucaccacgaccgaguucaagaacgcgaucaccaacgccaagaucaucccguacagcggccugcugcucgugaucaccgugacggacaacaagggggccuucaaguacaucaagccccagucccaguucaucgucgaccugggcgccuaccuggagaaggagagcaucuacuacgugaccaccaacuggaagcacaccgccacgcgguucgcgaucaagcccauggaggacugaggacuaguguccaccugucccuccugggcugcuggauugucucguuuuccugccaaauaaacaggaucagcgcuuuacagaucuaaaaaaaaaaaaaaaaaaaaaaaaaaaaaaaaaaaaaaaaaaaaaaaaaaaaaaaaaaaaaaaaugcaucccccccccccccccccccccccccccccccaaaggcucuuuucagagccaccagaauu

SEQ ID NO: 9855 - RNA, 1100 nt, Artificial Sequence
  mRNA product Design e-1 comprising derived and/or modified sequence from HRSV(A2)__P0DOE7.1__M (opt2)
gggagaauauaagcguuggcggagcgucgguuguagcacucugcgcgcccgcucuucugcugcuguuugucuacuuccuccugcuuccccgccgccgccgccgccaucaagcuuaccauggagaccuacgucaacaagcuccacgagggcuccaccuacaccgccgccguccaguacaacguccucgagaaggacgacgaccccgccucccucaccaucuggguccccauguuccaguccuccaugcccgccgaccuccucaucaaggagcucgccaacgucaacauccucgucaagcagaucuccacccccaagggccccucccuccgcgucaugaucaacucccgcuccgccguccucgcccagaugcccuccaaguucaccaucugcgccaacgucucccucgacgagcgcuccaagcucgccuacgacgucaccacccccugcgagaucaaggccugcucccucaccugccucaaguccaagaacaugcucaccaccgucaaggaccucaccaugaagacccucaaccccacccacgacaucaucgcccucugcgaguucgagaacaucgucaccuccaagaaggucaucauccccaccuaccuccgcuccaucuccguccgcaacaaggaccucaacacccucgagaacaucaccaccaccgaguucaagaacgccaucaccaacgccaagaucauccccuacuccggccuccuccucgucaucaccgucaccgacaacaagggcgccuucaaguacaucaagccccagucccaguucaucgucgaccucggcgccuaccucgagaaggaguccaucuacuacgucaccaccaacuggaagcacaccgccacccgcuucgccaucaagcccauggaggacugaggacuaguguccaccugucccuccugggcugcuggauugucucguuuuccugccaaauaaacaggaucagcgcuuuacagaucuaaaaaaaaaaaaaaaaaaaaaaaaaaaaaaaaaaaaaaaaaaaaaaaaaaaaaaaaaaaaaaaaugcaucccccccccccccccccccccccccccccccaaaggcucuuuucagagccaccagaauu

SEQ ID NO: 9856 - RNA, 1100 nt, Artificial Sequence
  mRNA product Design e-1 comprising derived and/or modified sequence from HRSV(A2)__P0DOE7.1__M (opt3)
gggagaauauaagcguuggcggagcgucgguuguagcacucugcgcgcccgcucuucugcugcuguuugucuacuuccuccugcuuccccgccgccgccgccgccaucaagcuuaccauggagaccuacgugaacaagcugcacgaaggcagcacauauacugccgcuguccaguacaauguucucgagaaagacgaugaccccgcaucccuuacgaucugggugccuauguuccaaucuucaaugccagccgaucuguugauuaaggaauuagcgaacguaaauauacuggugaaacagaucaguaccccgaaggggcccagccuaagagucaugauuaacuccaggucugcugugcucgcccagaugccuucgaaauuuacaaucugcgcaaauguuucacuggacgagcggagcaaacuugccuaugaugugacuaccccaugugaaauuaaggcuugcagucugacauguuugaaguccaagaacaugcucaccacugucaaagaccugacaaugaagacccugaaucccacgcaugauaucauagcacucugcgaguucgagaacaucgugacuucuaaaaagguaauuaucccuaccuacuuacgcagcauuuccguucgaaauaaggaccugaacacacuugaaaauaucacuaccacagaguuuaaaaacgccauaaccaaugcuaagauuaucccauauucaggauugcugcuagugauuacggucacugauaacaaaggugccuucaaguacaucaaaccccagagucaauuuaucguggaccucggcgcguaucuggaaaaggagagcauuuacuacgugacaaccaauuggaaacacacugcaacacguuucgccauaaagccuauggaggauugaggacuaguguccaccugucccuccugggcugcuggauugucucguuuuccugccaaauaaacaggaucagcgcuuuacagaucuaaaaaaaaaaaaaaaaaaaaaaaaaaaaaaaaaaaaaaaaaaaaaaaaaaaaaaaaaaaaaaaaugcaucccccccccccccccccccccccccccccccaaaggcucuuuucagagccaccagaauu

SEQ ID NO: 9857 - RNA, 1100 nt, Artificial Sequence
  mRNA product Design e-1 comprising derived and/or modified sequence from HRSV(A2)__P0DOE7.1__M (opt4)
gggagaauauaagcguuggcggagcgucgguuguagcacucugcgcgcccgcucuucugcugcuguuugucuacuuccuccugcuuccccgccgccgccgccgccaucaagcuuaccauggagaccuacgugaacaagcugcacgagggcagcaccuacaccgccgccgugcaguacaacgugcuggagaaggacgacgaccccgccagccugaccaucugggugcccauguuccagagcagcaugcccgccgaccugcugaucaaggagcuggccaacgugaacauccuggugaagcagaucagcacccccaagggccccagccugagagugaugaucaacagcagaagcgccgugcuggcccagaugcccagcaaguucaccaucugcgccaacgugagccuggacgagagaagcaagcuggccuacgacgugaccacccccugcgagaucaaggccugcagccugaccugccugaagagcaagaacaugcugaccaccgugaaggaccugaccaugaagacccugaaccccacccacgacaucaucgcccugugcgaguucgagaacaucgugaccagcaagaaggugaucauccccaccuaccugagaagcaucagcgugagaaacaaggaccugaacacccuggagaacaucaccaccaccgaguucaagaacgccaucaccaacgccaagaucauccccuacagcggccugcugcuggugaucaccgugaccgacaacaagggcgccuucaaguacaucaagccccagagccaguucaucguggaccugggcgccuaccuggagaaggagagcaucuacuacgugaccaccaacuggaagcacaccgccaccagauucgccaucaagcccauggaggacugaggacuaguguccaccugucccuccugggcugcuggauugucucguuuuccugccaaauaaacaggaucagcgcuuuacagaucuaaaaaaaaaaaaaaaaaaaaaaaaaaaaaaaaaaaaaaaaaaaaaaaaaaaaaaaaaaaaaaaaugcaucccccccccccccccccccccccccccccccaaaggcucuuuucagagccaccagaauu

SEQ ID NO: 9858 - RNA, 1100 nt, Artificial Sequence
  mRNA product Design e-1 comprising derived and/or modified sequence from HRSV(A2)__P0DOE7.1__M (opt5)
gggagaauauaagcguuggcggagcgucgguuguagcacucugcgcgcccgcucuucugcugcuguuugucuacuuccuccugcuuccccgccgccgccgccgccaucaagcuuaccauggagaccuacgugaacaagcugcacgaaggcagcacauauacggccgcuguccaguacaauguucucgagaaagacgaugaccccgccucccugaccaucugggugccuauguuccaaucuagcaugccggcggaucuucugauuaaggaacucgcuaacgugaauauccuggucaaacagauuuccacacccaaggggccuucucuuagagugaugaucaacagccgguccgccguucuggcccagaugcccucuaaauuuaccauuugcgcuaaugugagccucgacgagcgcuccaagcuggccuaugaugucacaaccccuugugaaaucaaggcuugcagccugacaugucucaaaucuaagaacaugcugaccacggugaaagaccuuaccaugaagacacugaaucccacccaugauaucauugcccucugcgaguucgagaacaucguuacauccaaaaaggugauuaucccuaccuaccugagaagcauuucuguccggaauaaggaccuuaacacgcuggaaaauaucacaaccacagaguuuaaaaacgcgauuaccaaugccaagaucaucccguauuccggacuccugcuggugauuaccgugacagauaacaaaggcgcuuucaaguacaucaaaccccagagccaauuuauugucgaccucggggccuaucuggaaaaggagucuaucuacuacguuacgaccaauuggaaacacacagcuacccgcuucgccauuaagccuauggaggauugaggacuaguguccaccugucccuccugggcugcuggauugucucguuuuccugccaaauaaacaggaucagcgcuuuacagaucuaaaaaaaaaaaaaaaaaaaaaaaaaaaaaaaaaaaaaaaaaaaaaaaaaaaaaaaaaaaaaaaaugcaucccccccccccccccccccccccccccccccaaaggcucuuuucagagccaccagaauu

SEQ ID NO: 9859 - RNA, 1100 nt, Artificial Sequence
  mRNA product Design e-1 comprising derived and/or modified sequence from HRSV(A2)__P0DOE7.1__M (opt6)
gggagaauauaagcguuggcggagcgucgguuguagcacucugcgcgcccgcucuucugcugcuguuugucuacuuccuccugcuuccccgccgccgccgccgccaucaagcuuaccauggaaacauacguaaacaaacuacacgaaggauccacauacacagcagcaguacaauacaacguacuagaaaaagacgacgacccagcaucuuuaaccauauggguaccaauguuccaaucaucaaugccagcagaccucuuaauaaaagaacuagcaaacguaaacauccuagucaaacaaauaucaacacccaaaggaccaucccucagaguaaugaucaacucaagaucagcaguacuagcacaaaugccaucaaaauucacaauaugcgccaacguuucuuuagacgaacgaucaaaauuagccuacgacguaacaacacccugcgaaauaaaagcaugcucacuaacaugccuaaaaucaaaaaacaugcucacuacaguaaaagaccuaaccaugaaaacacucaacccaacacacgacauaauagcccuaugcgaauuugaaaacauaguaacaucaaaaaaaguaauaaucccaacauacuuaagaucgaucucagucagaaacaaagaccuaaauacacucgaaaacauaacaacaacagaauuuaaaaacgcaauaacaaacgcaaaaauaauaccauacucaggacuacuccuaguaauaacaguaacagacaacaaaggagcauucaaauacauaaaaccacaaucacaauucaucguagaccucggagcauaccuagaaaaagaaucaauauacuacguaacaacaaacuggaaacacaccgccacaagauucgcaauaaaacccauggaagacuaaggacuaguguccaccugucccuccugggcugcuggauugucucguuuuccugccaaauaaacaggaucagcgcuuuacagaucuaaaaaaaaaaaaaaaaaaaaaaaaaaaaaaaaaaaaaaaaaaaaaaaaaaaaaaaaaaaaaaaaugcaucccccccccccccccccccccccccccccccaaaggcucuuuucagagccaccagaauu

SEQ ID NO: 9860 - RNA, 1100 nt, Artificial Sequence
  mRNA product Design e-1 comprising derived and/or modified sequence from HRSV(A2)__P0DOE7.1__M (opt11)
gggagaauauaagcguuggcggagcgucgguuguagcacucugcgcgcccgcucuucugcugcuguuugucuacuuccuccugcuuccccgccgccgccgccgccaucaagcuuaccauggaaaccuacgucaacaaacuacacgaaggcucaaccuacaccgccgccguccaauacaacguccucgaaaaagacgacgaccccgccucccuaaccaucuggguucccauguuccaaucauccaugcccgccgaccuccucauaaaagaacuagccaacgucaacauccuagucaaacaaaucagcacccccaaaggccccucccuccgcguaaugaucaacucccgcuccgccguccuagcccaaaugcccuccaaauuuacaaucugcgccaacgucucccucgacgaacgcucaaaacucgccuacgacgucaccacacccugcgaaaucaaagccugcucccucaccugccucaaaagcaaaaauaugcuaaccaccgucaaagaccuuaccaugaaaacccucaaccccacucacgacaucauagcccucugcgaauuugaaaacaucgucaccuccaaaaaagucaucauccccacauaccuccgcuccaucuccguccgcaacaaagaccucaacacccucgaaaacaucaccaccaccgaauuuaaaaacgccaucaccaacgccaaaaucauccccuacuccggccuccuccucgucaucaccguuaccgacaacaaaggcgccuucaaauacaucaaaccccaaucccaauucaucgucgaccucggagccuaccuugaaaaagaguccaucuacuacgucaccaccaacuggaaacacaccgccacccgauucgccaucaaacccauggaagacuaaggacuaguguccaccugucccuccugggcugcuggauugucucguuuuccugccaaauaaacaggaucagcgcuuuacagaucuaaaaaaaaaaaaaaaaaaaaaaaaaaaaaaaaaaaaaaaaaaaaaaaaaaaaaaaaaaaaaaaaugcaucccccccccccccccccccccccccccccccaaaggcucuuuucagagccaccagaauu

SEQ ID NO: 9861 - RNA, 1082 nt, Artificial Sequence
  mRNA product Design e-2 comprising derived and/or modified sequence from HRSV(A2)__P0DOE7.1__M (wt)
gggagacccgugacccggaaguuguacggcuacgcgacuuucccucccacaaacccucgcgcccuuccuuuccuacuugggcccggcagaaagcuuaccauggaaacauacgugaacaagcuucacgaaggcuccacauacacagcugcuguucaauacaaugucuuagaaaaagacgaugacccugcaucacuuacaauaugggugcccauguuccaaucaucuaugccagcagauuuacuuauaaaagaacuagcuaaugucaacauacuagugaaacaaauauccacacccaagggaccuucacuaagagucaugauaaacucaagaagugcagugcuagcacaaaugcccagcaaauuuaccauaugcgcuaauguguccuuggaugaaagaagcaaacuagcauaugauguaaccacacccugugaaaucaaggcauguagucuaacaugccuaaaaucaaaaaauauguugacuacaguuaaagaucucacuaugaagacacucaacccuacacaugauauuauugcuuuaugugaauuugaaaacauaguaacaucaaaaaaagucauaauaccaacauaccuaagauccaucagugucagaaauaaagaucugaacacacuugaaaauauaacaaccacugaauucaaaaaugcuaucacaaaugcaaaaaucaucccuuacucaggauuacuauuagucaucacagugacugacaacaaaggagcauucaaauacauaaagccacaaagucaauucauaguagaucuuggagcuuaccuagaaaaagaaaguauauauuauguuaccacaaauuggaagcacacagcuacacgauuugcaaucaaacccauggaagauuaaggacuaguguccaccugucccuccugggcugcuggauugucucguuuuccugccaaauaaacaggaucagcgcuuuacagaucuaaaaaaaaaaaaaaaaaaaaaaaaaaaaaaaaaaaaaaaaaaaaaaaaaaaaaaaaaaaaaaaaugcaucccccccccccccccccccccccccccccccaaaggcucuuuucagagccaccagaauu

SEQ ID NO: 9862 - RNA, 1082 nt, Artificial Sequence
  mRNA product Design e-2 comprising derived and/or modified sequence from HRSV(A2)__P0DOE7.1__M (opt1)
gggagacccgugacccggaaguuguacggcuacgcgacuuucccucccacaaacccucgcgcccuuccuuuccuacuugggcccggcagaaagcuuaccauggagaccuacgugaacaagcugcacgagggcagcaccuacacggccgccguccaguacaacgugcucgagaaggacgacgaccccgcgucccugaccaucugggugccgauguuccagagcuccaugcccgccgaccugcucaucaaggagcuggccaacgucaacauccuggugaagcagaucagcacccccaaggggcccucccuccgcgugaugaucaacagccgguccgccguccuggcccagaugccgagcaaguucaccaucugcgcgaacgugucccuggacgagcgcagcaagcucgccuacgacgugacgacccccugcgagaucaaggccugcucccugaccugccucaagagcaagaacaugcugaccacggucaaggaccugaccaugaagacccugaaccccacccacgacaucaucgcccucugcgaguucgagaacaucgugacguccaagaaggugaucauccccaccuaccugcggagcaucuccguccgcaacaaggaccugaacacccucgagaacaucaccacgaccgaguucaagaacgcgaucaccaacgccaagaucaucccguacagcggccugcugcucgugaucaccgugacggacaacaagggggccuucaaguacaucaagccccagucccaguucaucgucgaccugggcgccuaccuggagaaggagagcaucuacuacgugaccaccaacuggaagcacaccgccacgcgguucgcgaucaagcccauggaggacugaggacuaguguccaccugucccuccugggcugcuggauugucucguuuuccugccaaauaaacaggaucagcgcuuuacagaucuaaaaaaaaaaaaaaaaaaaaaaaaaaaaaaaaaaaaaaaaaaaaaaaaaaaaaaaaaaaaaaaaugcaucccccccccccccccccccccccccccccccaaaggcucuuuucagagccaccagaauu

SEQ ID NO: 9863 - RNA, 1082 nt, Artificial Sequence
  mRNA product Design e-2 comprising derived and/or modified sequence from HRSV(A2)__P0DOE7.1__M (opt2)
gggagacccgugacccggaaguuguacggcuacgcgacuuucccucccacaaacccucgcgcccuuccuuuccuacuugggcccggcagaaagcuuaccauggagaccuacgucaacaagcuccacgagggcuccaccuacaccgccgccguccaguacaacguccucgagaaggacgacgaccccgccucccucaccaucuggguccccauguuccaguccuccaugcccgccgaccuccucaucaaggagcucgccaacgucaacauccucgucaagcagaucuccacccccaagggccccucccuccgcgucaugaucaacucccgcuccgccguccucgcccagaugcccuccaaguucaccaucugcgccaacgucucccucgacgagcgcuccaagcucgccuacgacgucaccacccccugcgagaucaaggccugcucccucaccugccucaaguccaagaacaugcucaccaccgucaaggaccucaccaugaagacccucaaccccacccacgacaucaucgcccucugcgaguucgagaacaucgucaccuccaagaaggucaucauccccaccuaccuccgcuccaucuccguccgcaacaaggaccucaacacccucgagaacaucaccaccaccgaguucaagaacgccaucaccaacgccaagaucauccccuacuccggccuccuccucgucaucaccgucaccgacaacaagggcgccuucaaguacaucaagccccagucccaguucaucgucgaccucggcgccuaccucgagaaggaguccaucuacuacgucaccaccaacuggaagcacaccgccacccgcuucgccaucaagcccauggaggacugaggacuaguguccaccugucccuccugggcugcuggauugucucguuuuccugccaaauaaacaggaucagcgcuuuacagaucuaaaaaaaaaaaaaaaaaaaaaaaaaaaaaaaaaaaaaaaaaaaaaaaaaaaaaaaaaaaaaaaaugcaucccccccccccccccccccccccccccccccaaaggcucuuuucagagccaccagaauu

SEQ ID NO: 9864 - RNA, 1082 nt, Artificial Sequence
  mRNA product Design e-2 comprising derived and/or modified sequence from HRSV(A2)__P0DOE7.1__M (opt3)
gggagacccgugacccggaaguuguacggcuacgcgacuuucccucccacaaacccucgcgcccuuccuuuccuacuugggcccggcagaaagcuuaccauggagaccuacgugaacaagcugcacgaaggcagcacauauacugccgcuguccaguacaauguucucgagaaagacgaugaccccgcaucccuuacgaucugggugccuauguuccaaucuucaaugccagccgaucuguugauuaaggaauuagcgaacguaaauauacuggugaaacagaucaguaccccgaaggggcccagccuaagagucaugauuaacuccaggucugcugugcucgcccagaugccuucgaaauuuacaaucugcgcaaauguuucacuggacgagcggagcaaacuugccuaugaugugacuaccccaugugaaauuaaggcuugcagucugacauguuugaaguccaagaacaugcucaccacugucaaagaccugacaaugaagacccugaaucccacgcaugauaucauagcacucugcgaguucgagaacaucgugacuucuaaaaagguaauuaucccuaccuacuuacgcagcauuuccguucgaaauaaggaccugaacacacuugaaaauaucacuaccacagaguuuaaaaacgccauaaccaaugcuaagauuaucccauauucaggauugcugcuagugauuacggucacugauaacaaaggugccuucaaguacaucaaaccccagagucaauuuaucguggaccucggcgcguaucuggaaaaggagagcauuuacuacgugacaaccaauuggaaacacacugcaacacguuucgccauaaagccuauggaggauugaggacuaguguccaccugucccuccugggcugcuggauugucucguuuuccugccaaauaaacaggaucagcgcuuuacagaucuaaaaaaaaaaaaaaaaaaaaaaaaaaaaaaaaaaaaaaaaaaaaaaaaaaaaaaaaaaaaaaaaugcaucccccccccccccccccccccccccccccccaaaggcucuuuucagagccaccagaauu

SEQ ID NO: 9865 - RNA, 1082 nt, Artificial Sequence
  mRNA product Design e-2 comprising derived and/or modified sequence from HRSV(A2)__P0DOE7.1__M (opt4)
gggagacccgugacccggaaguuguacggcuacgcgacuuucccucccacaaacccucgcgcccuuccuuuccuacuugggcccggcagaaagcuuaccauggagaccuacgugaacaagcugcacgagggcagcaccuacaccgccgccgugcaguacaacgugcuggagaaggacgacgaccccgccagccugaccaucugggugcccauguuccagagcagcaugcccgccgaccugcugaucaaggagcuggccaacgugaacauccuggugaagcagaucagcacccccaagggccccagccugagagugaugaucaacagcagaagcgccgugcuggcccagaugcccagcaaguucaccaucugcgccaacgugagccuggacgagagaagcaagcuggccuacgacgugaccacccccugcgagaucaaggccugcagccugaccugccugaagagcaagaacaugcugaccaccgugaaggaccugaccaugaagacccugaaccccacccacgacaucaucgcccugugcgaguucgagaacaucgugaccagcaagaaggugaucauccccaccuaccugagaagcaucagcgugagaaacaaggaccugaacacccuggagaacaucaccaccaccgaguucaagaacgccaucaccaacgccaagaucauccccuacagcggccugcugcuggugaucaccgugaccgacaacaagggcgccuucaaguacaucaagccccagagccaguucaucguggaccugggcgccuaccuggagaaggagagcaucuacuacgugaccaccaacuggaagcacaccgccaccagauucgccaucaagcccauggaggacugaggacuaguguccaccugucccuccugggcugcuggauugucucguuuuccugccaaauaaacaggaucagcgcuuuacagaucuaaaaaaaaaaaaaaaaaaaaaaaaaaaaaaaaaaaaaaaaaaaaaaaaaaaaaaaaaaaaaaaaugcaucccccccccccccccccccccccccccccccaaaggcucuuuucagagccaccagaauu

SEQ ID NO: 9866 - RNA, 1082 nt, Artificial Sequence
  mRNA product Design e-2 comprising derived and/or modified sequence from HRSV(A2)__P0DOE7.1__M (opt5)
gggagacccgugacccggaaguuguacggcuacgcgacuuucccucccacaaacccucgcgcccuuccuuuccuacuugggcccggcagaaagcuuaccauggagaccuacgugaacaagcugcacgaaggcagcacauauacggccgcuguccaguacaauguucucgagaaagacgaugaccccgccucccugaccaucugggugccuauguuccaaucuagcaugccggcggaucuucugauuaaggaacucgcuaacgugaauauccuggucaaacagauuuccacacccaaggggccuucucuuagagugaugaucaacagccgguccgccguucuggcccagaugcccucuaaauuuaccauuugcgcuaaugugagccucgacgagcgcuccaagcuggccuaugaugucacaaccccuugugaaaucaaggcuugcagccugacaugucucaaaucuaagaacaugcugaccacggugaaagaccuuaccaugaagacacugaaucccacccaugauaucauugcccucugcgaguucgagaacaucguuacauccaaaaaggugauuaucccuaccuaccugagaagcauuucuguccggaauaaggaccuuaacacgcuggaaaauaucacaaccacagaguuuaaaaacgcgauuaccaaugccaagaucaucccguauuccggacuccugcuggugauuaccgugacagauaacaaaggcgcuuucaaguacaucaaaccccagagccaauuuauugucgaccucggggccuaucuggaaaaggagucuaucuacuacguuacgaccaauuggaaacacacagcuacccgcuucgccauuaagccuauggaggauugaggacuaguguccaccugucccuccugggcugcuggauugucucguuuuccugccaaauaaacaggaucagcgcuuuacagaucuaaaaaaaaaaaaaaaaaaaaaaaaaaaaaaaaaaaaaaaaaaaaaaaaaaaaaaaaaaaaaaaaugcaucccccccccccccccccccccccccccccccaaaggcucuuuucagagccaccagaauu

SEQ ID NO: 9867 - RNA, 1082 nt, Artificial Sequence
  mRNA product Design e-2 comprising derived and/or modified sequence from HRSV(A2)__P0DOE7.1__M (opt6)
gggagacccgugacccggaaguuguacggcuacgcgacuuucccucccacaaacccucgcgcccuuccuuuccuacuugggcccggcagaaagcuuaccauggaaacauacguaaacaaacuacacgaaggauccacauacacagcagcaguacaauacaacguacuagaaaaagacgacgacccagcaucuuuaaccauauggguaccaauguuccaaucaucaaugccagcagaccucuuaauaaaagaacuagcaaacguaaacauccuagucaaacaaauaucaacacccaaaggaccaucccucagaguaaugaucaacucaagaucagcaguacuagcacaaaugccaucaaaauucacaauaugcgccaacguuucuuuagacgaacgaucaaaauuagccuacgacguaacaacacccugcgaaauaaaagcaugcucacuaacaugccuaaaaucaaaaaacaugcucacuacaguaaaagaccuaaccaugaaaacacucaacccaacacacgacauaauagcccuaugcgaauuugaaaacauaguaacaucaaaaaaaguaauaaucccaacauacuuaagaucgaucucagucagaaacaaagaccuaaauacacucgaaaacauaacaacaacagaauuuaaaaacgcaauaacaaacgcaaaaauaauaccauacucaggacuacuccuaguaauaacaguaacagacaacaaaggagcauucaaauacauaaaaccacaaucacaauucaucguagaccucggagcauaccuagaaaaagaaucaauauacuacguaacaacaaacuggaaacacaccgccacaagauucgcaauaaaacccauggaagacuaaggacuaguguccaccugucccuccugggcugcuggauugucucguuuuccugccaaauaaacaggaucagcgcuuuacagaucuaaaaaaaaaaaaaaaaaaaaaaaaaaaaaaaaaaaaaaaaaaaaaaaaaaaaaaaaaaaaaaaaugcaucccccccccccccccccccccccccccccccaaaggcucuuuucagagccaccagaauu

SEQ ID NO: 9868 - RNA, 1082 nt, Artificial Sequence
  mRNA product Design e-2 comprising derived and/or modified sequence from HRSV(A2)__P0DOE7.1__M (opt11)
gggagacccgugacccggaaguuguacggcuacgcgacuuucccucccacaaacccucgcgcccuuccuuuccuacuugggcccggcagaaagcuuaccauggaaaccuacgucaacaaacuacacgaaggcucaaccuacaccgccgccguccaauacaacguccucgaaaaagacgacgaccccgccucccuaaccaucuggguucccauguuccaaucauccaugcccgccgaccuccucauaaaagaacuagccaacgucaacauccuagucaaacaaaucagcacccccaaaggccccucccuccgcguaaugaucaacucccgcuccgccguccuagcccaaaugcccuccaaauuuacaaucugcgccaacgucucccucgacgaacgcucaaaacucgccuacgacgucaccacacccugcgaaaucaaagccugcucccucaccugccucaaaagcaaaaauaugcuaaccaccgucaaagaccuuaccaugaaaacccucaaccccacucacgacaucauagcccucugcgaauuugaaaacaucgucaccuccaaaaaagucaucauccccacauaccuccgcuccaucuccguccgcaacaaagaccucaacacccucgaaaacaucaccaccaccgaauuuaaaaacgccaucaccaacgccaaaaucauccccuacuccggccuccuccucgucaucaccguuaccgacaacaaaggcgccuucaaauacaucaaaccccaaucccaauucaucgucgaccucggagccuaccuugaaaaagaguccaucuacuacgucaccaccaacuggaaacacaccgccacccgauucgccaucaaacccauggaagacuaaggacuaguguccaccugucccuccugggcugcuggauugucucguuuuccugccaaauaaacaggaucagcgcuuuacagaucuaaaaaaaaaaaaaaaaaaaaaaaaaaaaaaaaaaaaaaaaaaaaaaaaaaaaaaaaaaaaaaaaugcaucccccccccccccccccccccccccccccccaaaggcucuuuucagagccaccagaauu

SEQ ID NO: 9869 - RNA, 1052 nt, Artificial Sequence
  mRNA product Design e-3 comprising derived and/or modified sequence from HRSV(A2)__P0DOE7.1__M (wt)
gggagacuuucccauucuguagcagaauuugguguugccuguggucuuggucccgcggagaagcuuaccauggaaacauacgugaacaagcuucacgaaggcuccacauacacagcugcuguucaauacaaugucuuagaaaaagacgaugacccugcaucacuuacaauaugggugcccauguuccaaucaucuaugccagcagauuuacuuauaaaagaacuagcuaaugucaacauacuagugaaacaaauauccacacccaagggaccuucacuaagagucaugauaaacucaagaagugcagugcuagcacaaaugcccagcaaauuuaccauaugcgcuaauguguccuuggaugaaagaagcaaacuagcauaugauguaaccacacccugugaaaucaaggcauguagucuaacaugccuaaaaucaaaaaauauguugacuacaguuaaagaucucacuaugaagacacucaacccuacacaugauauuauugcuuuaugugaauuugaaaacauaguaacaucaaaaaaagucauaauaccaacauaccuaagauccaucagugucagaaauaaagaucugaacacacuugaaaauauaacaaccacugaauucaaaaaugcuaucacaaaugcaaaaaucaucccuuacucaggauuacuauuagucaucacagugacugacaacaaaggagcauucaaauacauaaagccacaaagucaauucauaguagaucuuggagcuuaccuagaaaaagaaaguauauauuauguuaccacaaauuggaagcacacagcuacacgauuugcaaucaaacccauggaagauuaaggacuaguguccaccugucccuccugggcugcuggauugucucguuuuccugccaaauaaacaggaucagcgcuuuacagaucuaaaaaaaaaaaaaaaaaaaaaaaaaaaaaaaaaaaaaaaaaaaaaaaaaaaaaaaaaaaaaaaaugcaucccccccccccccccccccccccccccccccaaaggcucuuuucagagccaccagaauu

SEQ ID NO: 9870 - RNA, 1052 nt, Artificial Sequence
  mRNA product Design e-3 comprising derived and/or modified sequence from HRSV(A2)__P0DOE7.1__M (opt1)
gggagacuuucccauucuguagcagaauuugguguugccuguggucuuggucccgcggagaagcuuaccauggagaccuacgugaacaagcugcacgagggcagcaccuacacggccgccguccaguacaacgugcucgagaaggacgacgaccccgcgucccugaccaucugggugccgauguuccagagcuccaugcccgccgaccugcucaucaaggagcuggccaacgucaacauccuggugaagcagaucagcacccccaaggggcccucccuccgcgugaugaucaacagccgguccgccguccuggcccagaugccgagcaaguucaccaucugcgcgaacgugucccuggacgagcgcagcaagcucgccuacgacgugacgacccccugcgagaucaaggccugcucccugaccugccucaagagcaagaacaugcugaccacggucaaggaccugaccaugaagacccugaaccccacccacgacaucaucgcccucugcgaguucgagaacaucgugacguccaagaaggugaucauccccaccuaccugcggagcaucuccguccgcaacaaggaccugaacacccucgagaacaucaccacgaccgaguucaagaacgcgaucaccaacgccaagaucaucccguacagcggccugcugcucgugaucaccgugacggacaacaagggggccuucaaguacaucaagccccagucccaguucaucgucgaccugggcgccuaccuggagaaggagagcaucuacuacgugaccaccaacuggaagcacaccgccacgcgguucgcgaucaagcccauggaggacugaggacuaguguccaccugucccuccugggcugcuggauugucucguuuuccugccaaauaaacaggaucagcgcuuuacagaucuaaaaaaaaaaaaaaaaaaaaaaaaaaaaaaaaaaaaaaaaaaaaaaaaaaaaaaaaaaaaaaaaugcaucccccccccccccccccccccccccccccccaaaggcucuuuucagagccaccagaauu

SEQ ID NO: 9871 - RNA, 1052 nt, Artificial Sequence
  mRNA product Design e-3 comprising derived and/or modified sequence from HRSV(A2)__P0DOE7.1__M (opt2)
gggagacuuucccauucuguagcagaauuugguguugccuguggucuuggucccgcggagaagcuuaccauggagaccuacgucaacaagcuccacgagggcuccaccuacaccgccgccguccaguacaacguccucgagaaggacgacgaccccgccucccucaccaucuggguccccauguuccaguccuccaugcccgccgaccuccucaucaaggagcucgccaacgucaacauccucgucaagcagaucuccacccccaagggccccucccuccgcgucaugaucaacucccgcuccgccguccucgcccagaugcccuccaaguucaccaucugcgccaacgucucccucgacgagcgcuccaagcucgccuacgacgucaccacccccugcgagaucaaggccugcucccucaccugccucaaguccaagaacaugcucaccaccgucaaggaccucaccaugaagacccucaaccccacccacgacaucaucgcccucugcgaguucgagaacaucgucaccuccaagaaggucaucauccccaccuaccuccgcuccaucuccguccgcaacaaggaccucaacacccucgagaacaucaccaccaccgaguucaagaacgccaucaccaacgccaagaucauccccuacuccggccuccuccucgucaucaccgucaccgacaacaagggcgccuucaaguacaucaagccccagucccaguucaucgucgaccucggcgccuaccucgagaaggaguccaucuacuacgucaccaccaacuggaagcacaccgccacccgcuucgccaucaagcccauggaggacugaggacuaguguccaccugucccuccugggcugcuggauugucucguuuuccugccaaauaaacaggaucagcgcuuuacagaucuaaaaaaaaaaaaaaaaaaaaaaaaaaaaaaaaaaaaaaaaaaaaaaaaaaaaaaaaaaaaaaaaugcaucccccccccccccccccccccccccccccccaaaggcucuuuucagagccaccagaauu

SEQ ID NO: 9872 - RNA, 1052 nt, Artificial Sequence
  mRNA product Design e-3 comprising derived and/or modified sequence from HRSV(A2)__P0DOE7.1__M (opt3)
gggagacuuucccauucuguagcagaauuugguguugccuguggucuuggucccgcggagaagcuuaccauggagaccuacgugaacaagcugcacgaaggcagcacauauacugccgcuguccaguacaauguucucgagaaagacgaugaccccgcaucccuuacgaucugggugccuauguuccaaucuucaaugccagccgaucuguugauuaaggaauuagcgaacguaaauauacuggugaaacagaucaguaccccgaaggggcccagccuaagagucaugauuaacuccaggucugcugugcucgcccagaugccuucgaaauuuacaaucugcgcaaauguuucacuggacgagcggagcaaacuugccuaugaugugacuaccccaugugaaauuaaggcuugcagucugacauguuugaaguccaagaacaugcucaccacugucaaagaccugacaaugaagacccugaaucccacgcaugauaucauagcacucugcgaguucgagaacaucgugacuucuaaaaagguaauuaucccuaccuacuuacgcagcauuuccguucgaaauaaggaccugaacacacuugaaaauaucacuaccacagaguuuaaaaacgccauaaccaaugcuaagauuaucccauauucaggauugcugcuagugauuacggucacugauaacaaaggugccuucaaguacaucaaaccccagagucaauuuaucguggaccucggcgcguaucuggaaaaggagagcauuuacuacgugacaaccaauuggaaacacacugcaacacguuucgccauaaagccuauggaggauugaggacuaguguccaccugucccuccugggcugcuggauugucucguuuuccugccaaauaaacaggaucagcgcuuuacagaucuaaaaaaaaaaaaaaaaaaaaaaaaaaaaaaaaaaaaaaaaaaaaaaaaaaaaaaaaaaaaaaaaugcaucccccccccccccccccccccccccccccccaaaggcucuuuucagagccaccagaauu

SEQ ID NO: 9873 - RNA, 1052 nt, Artificial Sequence
  mRNA product Design e-3 comprising derived and/or modified sequence from HRSV(A2)__P0DOE7.1__M (opt4)
gggagacuuucccauucuguagcagaauuugguguugccuguggucuuggucccgcggagaagcuuaccauggagaccuacgugaacaagcugcacgagggcagcaccuacaccgccgccgugcaguacaacgugcuggagaaggacgacgaccccgccagccugaccaucugggugcccauguuccagagcagcaugcccgccgaccugcugaucaaggagcuggccaacgugaacauccuggugaagcagaucagcacccccaagggccccagccugagagugaugaucaacagcagaagcgccgugcuggcccagaugcccagcaaguucaccaucugcgccaacgugagccuggacgagagaagcaagcuggccuacgacgugaccacccccugcgagaucaaggccugcagccugaccugccugaagagcaagaacaugcugaccaccgugaaggaccugaccaugaagacccugaaccccacccacgacaucaucgcccugugcgaguucgagaacaucgugaccagcaagaaggugaucauccccaccuaccugagaagcaucagcgugagaaacaaggaccugaacacccuggagaacaucaccaccaccgaguucaagaacgccaucaccaacgccaagaucauccccuacagcggccugcugcuggugaucaccgugaccgacaacaagggcgccuucaaguacaucaagccccagagccaguucaucguggaccugggcgccuaccuggagaaggagagcaucuacuacgugaccaccaacuggaagcacaccgccaccagauucgccaucaagcccauggaggacugaggacuaguguccaccugucccuccugggcugcuggauugucucguuuuccugccaaauaaacaggaucagcgcuuuacagaucuaaaaaaaaaaaaaaaaaaaaaaaaaaaaaaaaaaaaaaaaaaaaaaaaaaaaaaaaaaaaaaaaugcaucccccccccccccccccccccccccccccccaaaggcucuuuucagagccaccagaauu

SEQ ID NO: 9874 - RNA, 1052 nt, Artificial Sequence
  mRNA product Design e-3 comprising derived and/or modified sequence from HRSV(A2)__P0DOE7.1__M (opt5)
gggagacuuucccauucuguagcagaauuugguguugccuguggucuuggucccgcggagaagcuuaccauggagaccuacgugaacaagcugcacgaaggcagcacauauacggccgcuguccaguacaauguucucgagaaagacgaugaccccgccucccugaccaucugggugccuauguuccaaucuagcaugccggcggaucuucugauuaaggaacucgcuaacgugaauauccuggucaaacagauuuccacacccaaggggccuucucuuagagugaugaucaacagccgguccgccguucuggcccagaugcccucuaaauuuaccauuugcgcuaaugugagccucgacgagcgcuccaagcuggccuaugaugucacaaccccuugugaaaucaaggcuugcagccugacaugucucaaaucuaagaacaugcugaccacggugaaagaccuuaccaugaagacacugaaucccacccaugauaucauugcccucugcgaguucgagaacaucguuacauccaaaaaggugauuaucccuaccuaccugagaagcauuucuguccggaauaaggaccuuaacacgcuggaaaauaucacaaccacagaguuuaaaaacgcgauuaccaaugccaagaucaucccguauuccggacuccugcuggugauuaccgugacagauaacaaaggcgcuuucaaguacaucaaaccccagagccaauuuauugucgaccucggggccuaucuggaaaaggagucuaucuacuacguuacgaccaauuggaaacacacagcuacccgcuucgccauuaagccuauggaggauugaggacuaguguccaccugucccuccugggcugcuggauugucucguuuuccugccaaauaaacaggaucagcgcuuuacagaucuaaaaaaaaaaaaaaaaaaaaaaaaaaaaaaaaaaaaaaaaaaaaaaaaaaaaaaaaaaaaaaaaugcaucccccccccccccccccccccccccccccccaaaggcucuuuucagagccaccagaauu

SEQ ID NO: 9875 - RNA, 1052 nt, Artificial Sequence
  mRNA product Design e-3 comprising derived and/or modified sequence from HRSV(A2)__P0DOE7.1__M (opt6)
gggagacuuucccauucuguagcagaauuugguguugccuguggucuuggucccgcggagaagcuuaccauggaaacauacguaaacaaacuacacgaaggauccacauacacagcagcaguacaauacaacguacuagaaaaagacgacgacccagcaucuuuaaccauauggguaccaauguuccaaucaucaaugccagcagaccucuuaauaaaagaacuagcaaacguaaacauccuagucaaacaaauaucaacacccaaaggaccaucccucagaguaaugaucaacucaagaucagcaguacuagcacaaaugccaucaaaauucacaauaugcgccaacguuucuuuagacgaacgaucaaaauuagccuacgacguaacaacacccugcgaaauaaaagcaugcucacuaacaugccuaaaaucaaaaaacaugcucacuacaguaaaagaccuaaccaugaaaacacucaacccaacacacgacauaauagcccuaugcgaauuugaaaacauaguaacaucaaaaaaaguaauaaucccaacauacuuaagaucgaucucagucagaaacaaagaccuaaauacacucgaaaacauaacaacaacagaauuuaaaaacgcaauaacaaacgcaaaaauaauaccauacucaggacuacuccuaguaauaacaguaacagacaacaaaggagcauucaaauacauaaaaccacaaucacaauucaucguagaccucggagcauaccuagaaaaagaaucaauauacuacguaacaacaaacuggaaacacaccgccacaagauucgcaauaaaacccauggaagacuaaggacuaguguccaccugucccuccugggcugcuggauugucucguuuuccugccaaauaaacaggaucagcgcuuuacagaucuaaaaaaaaaaaaaaaaaaaaaaaaaaaaaaaaaaaaaaaaaaaaaaaaaaaaaaaaaaaaaaaaugcaucccccccccccccccccccccccccccccccaaaggcucuuuucagagccaccagaauu

SEQ ID NO: 9876 - RNA, 1052 nt, Artificial Sequence
  mRNA product Design e-3 comprising derived and/or modified sequence from HRSV(A2)__P0DOE7.1__M (opt11)
gggagacuuucccauucuguagcagaauuugguguugccuguggucuuggucccgcggagaagcuuaccauggaaaccuacgucaacaaacuacacgaaggcucaaccuacaccgccgccguccaauacaacguccucgaaaaagacgacgaccccgccucccuaaccaucuggguucccauguuccaaucauccaugcccgccgaccuccucauaaaagaacuagccaacgucaacauccuagucaaacaaaucagcacccccaaaggccccucccuccgcguaaugaucaacucccgcuccgccguccuagcccaaaugcccuccaaauuuacaaucugcgccaacgucucccucgacgaacgcucaaaacucgccuacgacgucaccacacccugcgaaaucaaagccugcucccucaccugccucaaaagcaaaaauaugcuaaccaccgucaaagaccuuaccaugaaaacccucaaccccacucacgacaucauagcccucugcgaauuugaaaacaucgucaccuccaaaaaagucaucauccccacauaccuccgcuccaucuccguccgcaacaaagaccucaacacccucgaaaacaucaccaccaccgaauuuaaaaacgccaucaccaacgccaaaaucauccccuacuccggccuccuccucgucaucaccguuaccgacaacaaaggcgccuucaaauacaucaaaccccaaucccaauucaucgucgaccucggagccuaccuugaaaaagaguccaucuacuacgucaccaccaacuggaaacacaccgccacccgauucgccaucaaacccauggaagacuaaggacuaguguccaccugucccuccugggcugcuggauugucucguuuuccugccaaauaaacaggaucagcgcuuuacagaucuaaaaaaaaaaaaaaaaaaaaaaaaaaaaaaaaaaaaaaaaaaaaaaaaaaaaaaaaaaaaaaaaugcaucccccccccccccccccccccccccccccccaaaggcucuuuucagagccaccagaauu

SEQ ID NO: 9877 - RNA, 1106 nt, Artificial Sequence
  mRNA product Design e-4 comprising derived and/or modified sequence from HRSV(A2)__P0DOE7.1__M (wt)
gggagacuccugucgggcggaaguaggaggaguagaguuuaaaaacaguacucuuuuuccgguucgggacguaguugaagcaacgacaagccggauaaccgcucuugagacaggaagcuuaccauggaaacauacgugaacaagcuucacgaaggcuccacauacacagcugcuguucaauacaaugucuuagaaaaagacgaugacccugcaucacuuacaauaugggugcccauguuccaaucaucuaugccagcagauuuacuuauaaaagaacuagcuaaugucaacauacuagugaaacaaauauccacacccaagggaccuucacuaagagucaugauaaacucaagaagugcagugcuagcacaaaugcccagcaaauuuaccauaugcgcuaauguguccuuggaugaaagaagcaaacuagcauaugauguaaccacacccugugaaaucaaggcauguagucuaacaugccuaaaaucaaaaaauauguugacuacaguuaaagaucucacuaugaagacacucaacccuacacaugauauuauugcuuuaugugaauuugaaaacauaguaacaucaaaaaaagucauaauaccaacauaccuaagauccaucagugucagaaauaaagaucugaacacacuugaaaauauaacaaccacugaauucaaaaaugcuaucacaaaugcaaaaaucaucccuuacucaggauuacuauuagucaucacagugacugacaacaaaggagcauucaaauacauaaagccacaaagucaauucauaguagaucuuggagcuuaccuagaaaaagaaaguauauauuauguuaccacaaauuggaagcacacagcuacacgauuugcaaucaaacccauggaagauuaaggacuaguguccaccugucccuccugggcugcuggauugucucguuuuccugccaaauaaacaggaucagcgcuuuacagaucuaaaaaaaaaaaaaaaaaaaaaaaaaaaaaaaaaaaaaaaaaaaaaaaaaaaaaaaaaaaaaaaaugcaucccccccccccccccccccccccccccccccaaaggcucuuuucagagccaccagaauu

SEQ ID NO: 9878 - RNA, 1106 nt, Artificial Sequence
  mRNA product Design e-4 comprising derived and/or modified sequence from HRSV(A2)__P0DOE7.1__M (opt1)
gggagacuccugucgggcggaaguaggaggaguagaguuuaaaaacaguacucuuuuuccgguucgggacguaguugaagcaacgacaagccggauaaccgcucuugagacaggaagcuuaccauggagaccuacgugaacaagcugcacgagggcagcaccuacacggccgccguccaguacaacgugcucgagaaggacgacgaccccgcgucccugaccaucugggugccgauguuccagagcuccaugcccgccgaccugcucaucaaggagcuggccaacgucaacauccuggugaagcagaucagcacccccaaggggcccucccuccgcgugaugaucaacagccgguccgccguccuggcccagaugccgagcaaguucaccaucugcgcgaacgugucccuggacgagcgcagcaagcucgccuacgacgugacgacccccugcgagaucaaggccugcucccugaccugccucaagagcaagaacaugcugaccacggucaaggaccugaccaugaagacccugaaccccacccacgacaucaucgcccucugcgaguucgagaacaucgugacguccaagaaggugaucauccccaccuaccugcggagcaucuccguccgcaacaaggaccugaacacccucgagaacaucaccacgaccgaguucaagaacgcgaucaccaacgccaagaucaucccguacagcggccugcugcucgugaucaccgugacggacaacaagggggccuucaaguacaucaagccccagucccaguucaucgucgaccugggcgccuaccuggagaaggagagcaucuacuacgugaccaccaacuggaagcacaccgccacgcgguucgcgaucaagcccauggaggacugaggacuaguguccaccugucccuccugggcugcuggauugucucguuuuccugccaaauaaacaggaucagcgcuuuacagaucuaaaaaaaaaaaaaaaaaaaaaaaaaaaaaaaaaaaaaaaaaaaaaaaaaaaaaaaaaaaaaaaaugcaucccccccccccccccccccccccccccccccaaaggcucuuuucagagccaccagaauu

SEQ ID NO: 9879 - RNA, 1106 nt, Artificial Sequence
  mRNA product Design e-4 comprising derived and/or modified sequence from HRSV(A2)__P0DOE7.1__M (opt2)
gggagacuccugucgggcggaaguaggaggaguagaguuuaaaaacaguacucuuuuuccgguucgggacguaguugaagcaacgacaagccggauaaccgcucuugagacaggaagcuuaccauggagaccuacgucaacaagcuccacgagggcuccaccuacaccgccgccguccaguacaacguccucgagaaggacgacgaccccgccucccucaccaucuggguccccauguuccaguccuccaugcccgccgaccuccucaucaaggagcucgccaacgucaacauccucgucaagcagaucuccacccccaagggccccucccuccgcgucaugaucaacucccgcuccgccguccucgcccagaugcccuccaaguucaccaucugcgccaacgucucccucgacgagcgcuccaagcucgccuacgacgucaccacccccugcgagaucaaggccugcucccucaccugccucaaguccaagaacaugcucaccaccgucaaggaccucaccaugaagacccucaaccccacccacgacaucaucgcccucugcgaguucgagaacaucgucaccuccaagaaggucaucauccccaccuaccuccgcuccaucuccguccgcaacaaggaccucaacacccucgagaacaucaccaccaccgaguucaagaacgccaucaccaacgccaagaucauccccuacuccggccuccuccucgucaucaccgucaccgacaacaagggcgccuucaaguacaucaagccccagucccaguucaucgucgaccucggcgccuaccucgagaaggaguccaucuacuacgucaccaccaacuggaagcacaccgccacccgcuucgccaucaagcccauggaggacugaggacuaguguccaccugucccuccugggcugcuggauugucucguuuuccugccaaauaaacaggaucagcgcuuuacagaucuaaaaaaaaaaaaaaaaaaaaaaaaaaaaaaaaaaaaaaaaaaaaaaaaaaaaaaaaaaaaaaaaugcaucccccccccccccccccccccccccccccccaaaggcucuuuucagagccaccagaauu

SEQ ID NO: 9880 - RNA, 1106 nt, Artificial Sequence
  mRNA product Design e-4 comprising derived and/or modified sequence from HRSV(A2)__P0DOE7.1__M (opt3)
gggagacuccugucgggcggaaguaggaggaguagaguuuaaaaacaguacucuuuuuccgguucgggacguaguugaagcaacgacaagccggauaaccgcucuugagacaggaagcuuaccauggagaccuacgugaacaagcugcacgaaggcagcacauauacugccgcuguccaguacaauguucucgagaaagacgaugaccccgcaucccuuacgaucugggugccuauguuccaaucuucaaugccagccgaucuguugauuaaggaauuagcgaacguaaauauacuggugaaacagaucaguaccccgaaggggcccagccuaagagucaugauuaacuccaggucugcugugcucgcccagaugccuucgaaauuuacaaucugcgcaaauguuucacuggacgagcggagcaaacuugccuaugaugugacuaccccaugugaaauuaaggcuugcagucugacauguuugaaguccaagaacaugcucaccacugucaaagaccugacaaugaagacccugaaucccacgcaugauaucauagcacucugcgaguucgagaacaucgugacuucuaaaaagguaauuaucccuaccuacuuacgcagcauuuccguucgaaauaaggaccugaacacacuugaaaauaucacuaccacagaguuuaaaaacgccauaaccaaugcuaagauuaucccauauucaggauugcugcuagugauuacggucacugauaacaaaggugccuucaaguacaucaaaccccagagucaauuuaucguggaccucggcgcguaucuggaaaaggagagcauuuacuacgugacaaccaauuggaaacacacugcaacacguuucgccauaaagccuauggaggauugaggacuaguguccaccugucccuccugggcugcuggauugucucguuuuccugccaaauaaacaggaucagcgcuuuacagaucuaaaaaaaaaaaaaaaaaaaaaaaaaaaaaaaaaaaaaaaaaaaaaaaaaaaaaaaaaaaaaaaaugcaucccccccccccccccccccccccccccccccaaaggcucuuuucagagccaccagaauu

SEQ ID NO: 9881 - RNA, 1106 nt, Artificial Sequence
  mRNA product Design e-4 comprising derived and/or modified sequence from HRSV(A2)__P0DOE7.1__M (opt4)
gggagacuccugucgggcggaaguaggaggaguagaguuuaaaaacaguacucuuuuuccgguucgggacguaguugaagcaacgacaagccggauaaccgcucuugagacaggaagcuuaccauggagaccuacgugaacaagcugcacgagggcagcaccuacaccgccgccgugcaguacaacgugcuggagaaggacgacgaccccgccagccugaccaucugggugcccauguuccagagcagcaugcccgccgaccugcugaucaaggagcuggccaacgugaacauccuggugaagcagaucagcacccccaagggccccagccugagagugaugaucaacagcagaagcgccgugcuggcccagaugcccagcaaguucaccaucugcgccaacgugagccuggacgagagaagcaagcuggccuacgacgugaccacccccugcgagaucaaggccugcagccugaccugccugaagagcaagaacaugcugaccaccgugaaggaccugaccaugaagacccugaaccccacccacgacaucaucgcccugugcgaguucgagaacaucgugaccagcaagaaggugaucauccccaccuaccugagaagcaucagcgugagaaacaaggaccugaacacccuggagaacaucaccaccaccgaguucaagaacgccaucaccaacgccaagaucauccccuacagcggccugcugcuggugaucaccgugaccgacaacaagggcgccuucaaguacaucaagccccagagccaguucaucguggaccugggcgccuaccuggagaaggagagcaucuacuacgugaccaccaacuggaagcacaccgccaccagauucgccaucaagcccauggaggacugaggacuaguguccaccugucccuccugggcugcuggauugucucguuuuccugccaaauaaacaggaucagcgcuuuacagaucuaaaaaaaaaaaaaaaaaaaaaaaaaaaaaaaaaaaaaaaaaaaaaaaaaaaaaaaaaaaaaaaaugcaucccccccccccccccccccccccccccccccaaaggcucuuuucagagccaccagaauu

SEQ ID NO: 9882 - RNA, 1106 nt, Artificial Sequence
  mRNA product Design e-4 comprising derived and/or modified sequence from HRSV(A2)__P0DOE7.1__M (opt5)
gggagacuccugucgggcggaaguaggaggaguagaguuuaaaaacaguacucuuuuuccgguucgggacguaguugaagcaacgacaagccggauaaccgcucuugagacaggaagcuuaccauggagaccuacgugaacaagcugcacgaaggcagcacauauacggccgcuguccaguacaauguucucgagaaagacgaugaccccgccucccugaccaucugggugccuauguuccaaucuagcaugccggcggaucuucugauuaaggaacucgcuaacgugaauauccuggucaaacagauuuccacacccaaggggccuucucuuagagugaugaucaacagccgguccgccguucuggcccagaugcccucuaaauuuaccauuugcgcuaaugugagccucgacgagcgcuccaagcuggccuaugaugucacaaccccuugugaaaucaaggcuugcagccugacaugucucaaaucuaagaacaugcugaccacggugaaagaccuuaccaugaagacacugaaucccacccaugauaucauugcccucugcgaguucgagaacaucguuacauccaaaaaggugauuaucccuaccuaccugagaagcauuucuguccggaauaaggaccuuaacacgcuggaaaauaucacaaccacagaguuuaaaaacgcgauuaccaaugccaagaucaucccguauuccggacuccugcuggugauuaccgugacagauaacaaaggcgcuuucaaguacaucaaaccccagagccaauuuauugucgaccucggggccuaucuggaaaaggagucuaucuacuacguuacgaccaauuggaaacacacagcuacccgcuucgccauuaagccuauggaggauugaggacuaguguccaccugucccuccugggcugcuggauugucucguuuuccugccaaauaaacaggaucagcgcuuuacagaucuaaaaaaaaaaaaaaaaaaaaaaaaaaaaaaaaaaaaaaaaaaaaaaaaaaaaaaaaaaaaaaaaugcaucccccccccccccccccccccccccccccccaaaggcucuuuucagagccaccagaauu

SEQ ID NO: 9883 - RNA, 1106 nt, Artificial Sequence
  mRNA product Design e-4 comprising derived and/or modified sequence from HRSV(A2)__P0DOE7.1__M (opt6)
gggagacuccugucgggcggaaguaggaggaguagaguuuaaaaacaguacucuuuuuccgguucgggacguaguugaagcaacgacaagccggauaaccgcucuugagacaggaagcuuaccauggaaacauacguaaacaaacuacacgaaggauccacauacacagcagcaguacaauacaacguacuagaaaaagacgacgacccagcaucuuuaaccauauggguaccaauguuccaaucaucaaugccagcagaccucuuaauaaaagaacuagcaaacguaaacauccuagucaaacaaauaucaacacccaaaggaccaucccucagaguaaugaucaacucaagaucagcaguacuagcacaaaugccaucaaaauucacaauaugcgccaacguuucuuuagacgaacgaucaaaauuagccuacgacguaacaacacccugcgaaauaaaagcaugcucacuaacaugccuaaaaucaaaaaacaugcucacuacaguaaaagaccuaaccaugaaaacacucaacccaacacacgacauaauagcccuaugcgaauuugaaaacauaguaacaucaaaaaaaguaauaaucccaacauacuuaagaucgaucucagucagaaacaaagaccuaaauacacucgaaaacauaacaacaacagaauuuaaaaacgcaauaacaaacgcaaaaauaauaccauacucaggacuacuccuaguaauaacaguaacagacaacaaaggagcauucaaauacauaaaaccacaaucacaauucaucguagaccucggagcauaccuagaaaaagaaucaauauacuacguaacaacaaacuggaaacacaccgccacaagauucgcaauaaaacccauggaagacuaaggacuaguguccaccugucccuccugggcugcuggauugucucguuuuccugccaaauaaacaggaucagcgcuuuacagaucuaaaaaaaaaaaaaaaaaaaaaaaaaaaaaaaaaaaaaaaaaaaaaaaaaaaaaaaaaaaaaaaaugcaucccccccccccccccccccccccccccccccaaaggcucuuuucagagccaccagaauu

SEQ ID NO: 9884 - RNA, 1106 nt, Artificial Sequence
  mRNA product Design e-4 comprising derived and/or modified sequence from HRSV(A2)__P0DOE7.1__M (opt11)
gggagacuccugucgggcggaaguaggaggaguagaguuuaaaaacaguacucuuuuuccgguucgggacguaguugaagcaacgacaagccggauaaccgcucuugagacaggaagcuuaccauggaaaccuacgucaacaaacuacacgaaggcucaaccuacaccgccgccguccaauacaacguccucgaaaaagacgacgaccccgccucccuaaccaucuggguucccauguuccaaucauccaugcccgccgaccuccucauaaaagaacuagccaacgucaacauccuagucaaacaaaucagcacccccaaaggccccucccuccgcguaaugaucaacucccgcuccgccguccuagcccaaaugcccuccaaauuuacaaucugcgccaacgucucccucgacgaacgcucaaaacucgccuacgacgucaccacacccugcgaaaucaaagccugcucccucaccugccucaaaagcaaaaauaugcuaaccaccgucaaagaccuuaccaugaaaacccucaaccccacucacgacaucauagcccucugcgaauuugaaaacaucgucaccuccaaaaaagucaucauccccacauaccuccgcuccaucuccguccgcaacaaagaccucaacacccucgaaaacaucaccaccaccgaauuuaaaaacgccaucaccaacgccaaaaucauccccuacuccggccuccuccucgucaucaccguuaccgacaacaaaggcgccuucaaauacaucaaaccccaaucccaauucaucgucgaccucggagccuaccuugaaaaagaguccaucuacuacgucaccaccaacuggaaacacaccgccacccgauucgccaucaaacccauggaagacuaaggacuaguguccaccugucccuccugggcugcuggauugucucguuuuccugccaaauaaacaggaucagcgcuuuacagaucuaaaaaaaaaaaaaaaaaaaaaaaaaaaaaaaaaaaaaaaaaaaaaaaaaaaaaaaaaaaaaaaaugcaucccccccccccccccccccccccccccccccaaaggcucuuuucagagccaccagaauu

SEQ ID NO: 9885 - RNA, 1073 nt, Artificial Sequence
  mRNA product Design e-5 comprising derived and/or modified sequence from HRSV(A2)__P0DOE7.1__M (wt)
gggagagcggcucggccauuuugucccagucaguccggaggcugcggcugcagaaguaccgccugcggaguaacugcaaagaagcuuaccauggaaacauacgugaacaagcuucacgaaggcuccacauacacagcugcuguucaauacaaugucuuagaaaaagacgaugacccugcaucacuuacaauaugggugcccauguuccaaucaucuaugccagcagauuuacuuauaaaagaacuagcuaaugucaacauacuagugaaacaaauauccacacccaagggaccuucacuaagagucaugauaaacucaagaagugcagugcuagcacaaaugcccagcaaauuuaccauaugcgcuaauguguccuuggaugaaagaagcaaacuagcauaugauguaaccacacccugugaaaucaaggcauguagucuaacaugccuaaaaucaaaaaauauguugacuacaguuaaagaucucacuaugaagacacucaacccuacacaugauauuauugcuuuaugugaauuugaaaacauaguaacaucaaaaaaagucauaauaccaacauaccuaagauccaucagugucagaaauaaagaucugaacacacuugaaaauauaacaaccacugaauucaaaaaugcuaucacaaaugcaaaaaucaucccuuacucaggauuacuauuagucaucacagugacugacaacaaaggagcauucaaauacauaaagccacaaagucaauucauaguagaucuuggagcuuaccuagaaaaagaaaguauauauuauguuaccacaaauuggaagcacacagcuacacgauuugcaaucaaacccauggaagauuaaggacuaguguccaccugucccuccugggcugcuggauugucucguuuuccugccaaauaaacaggaucagcgcuuuacagaucuaaaaaaaaaaaaaaaaaaaaaaaaaaaaaaaaaaaaaaaaaaaaaaaaaaaaaaaaaaaaaaaaugcaucccccccccccccccccccccccccccccccaaaggcucuuuucagagccaccagaauu

SEQ ID NO: 9886 - RNA, 1073 nt, Artificial Sequence
  mRNA product Design e-5 comprising derived and/or modified sequence from HRSV(A2)__P0DOE7.1__M (opt1)
gggagagcggcucggccauuuugucccagucaguccggaggcugcggcugcagaaguaccgccugcggaguaacugcaaagaagcuuaccauggagaccuacgugaacaagcugcacgagggcagcaccuacacggccgccguccaguacaacgugcucgagaaggacgacgaccccgcgucccugaccaucugggugccgauguuccagagcuccaugcccgccgaccugcucaucaaggagcuggccaacgucaacauccuggugaagcagaucagcacccccaaggggcccucccuccgcgugaugaucaacagccgguccgccguccuggcccagaugccgagcaaguucaccaucugcgcgaacgugucccuggacgagcgcagcaagcucgccuacgacgugacgacccccugcgagaucaaggccugcucccugaccugccucaagagcaagaacaugcugaccacggucaaggaccugaccaugaagacccugaaccccacccacgacaucaucgcccucugcgaguucgagaacaucgugacguccaagaaggugaucauccccaccuaccugcggagcaucuccguccgcaacaaggaccugaacacccucgagaacaucaccacgaccgaguucaagaacgcgaucaccaacgccaagaucaucccguacagcggccugcugcucgugaucaccgugacggacaacaagggggccuucaaguacaucaagccccagucccaguucaucgucgaccugggcgccuaccuggagaaggagagcaucuacuacgugaccaccaacuggaagcacaccgccacgcgguucgcgaucaagcccauggaggacugaggacuaguguccaccugucccuccugggcugcuggauugucucguuuuccugccaaauaaacaggaucagcgcuuuacagaucuaaaaaaaaaaaaaaaaaaaaaaaaaaaaaaaaaaaaaaaaaaaaaaaaaaaaaaaaaaaaaaaaugcaucccccccccccccccccccccccccccccccaaaggcucuuuucagagccaccagaauu

SEQ ID NO: 9887 - RNA, 1073 nt, Artificial Sequence
  mRNA product Design e-5 comprising derived and/or modified sequence from HRSV(A2)__P0DOE7.1__M (opt2)
gggagagcggcucggccauuuugucccagucaguccggaggcugcggcugcagaaguaccgccugcggaguaacugcaaagaagcuuaccauggagaccuacgucaacaagcuccacgagggcuccaccuacaccgccgccguccaguacaacguccucgagaaggacgacgaccccgccucccucaccaucuggguccccauguuccaguccuccaugcccgccgaccuccucaucaaggagcucgccaacgucaacauccucgucaagcagaucuccacccccaagggccccucccuccgcgucaugaucaacucccgcuccgccguccucgcccagaugcccuccaaguucaccaucugcgccaacgucucccucgacgagcgcuccaagcucgccuacgacgucaccacccccugcgagaucaaggccugcucccucaccugccucaaguccaagaacaugcucaccaccgucaaggaccucaccaugaagacccucaaccccacccacgacaucaucgcccucugcgaguucgagaacaucgucaccuccaagaaggucaucauccccaccuaccuccgcuccaucuccguccgcaacaaggaccucaacacccucgagaacaucaccaccaccgaguucaagaacgccaucaccaacgccaagaucauccccuacuccggccuccuccucgucaucaccgucaccgacaacaagggcgccuucaaguacaucaagccccagucccaguucaucgucgaccucggcgccuaccucgagaaggaguccaucuacuacgucaccaccaacuggaagcacaccgccacccgcuucgccaucaagcccauggaggacugaggacuaguguccaccugucccuccugggcugcuggauugucucguuuuccugccaaauaaacaggaucagcgcuuuacagaucuaaaaaaaaaaaaaaaaaaaaaaaaaaaaaaaaaaaaaaaaaaaaaaaaaaaaaaaaaaaaaaaaugcaucccccccccccccccccccccccccccccccaaaggcucuuuucagagccaccagaauu

SEQ ID NO: 9888 - RNA, 1073 nt, Artificial Sequence
  mRNA product Design e-5 comprising derived and/or modified sequence from HRSV(A2)__P0DOE7.1__M (opt3)
gggagagcggcucggccauuuugucccagucaguccggaggcugcggcugcagaaguaccgccugcggaguaacugcaaagaagcuuaccauggagaccuacgugaacaagcugcacgaaggcagcacauauacugccgcuguccaguacaauguucucgagaaagacgaugaccccgcaucccuuacgaucugggugccuauguuccaaucuucaaugccagccgaucuguugauuaaggaauuagcgaacguaaauauacuggugaaacagaucaguaccccgaaggggcccagccuaagagucaugauuaacuccaggucugcugugcucgcccagaugccuucgaaauuuacaaucugcgcaaauguuucacuggacgagcggagcaaacuugccuaugaugugacuaccccaugugaaauuaaggcuugcagucugacauguuugaaguccaagaacaugcucaccacugucaaagaccugacaaugaagacccugaaucccacgcaugauaucauagcacucugcgaguucgagaacaucgugacuucuaaaaagguaauuaucccuaccuacuuacgcagcauuuccguucgaaauaaggaccugaacacacuugaaaauaucacuaccacagaguuuaaaaacgccauaaccaaugcuaagauuaucccauauucaggauugcugcuagugauuacggucacugauaacaaaggugccuucaaguacaucaaaccccagagucaauuuaucguggaccucggcgcguaucuggaaaaggagagcauuuacuacgugacaaccaauuggaaacacacugcaacacguuucgccauaaagccuauggaggauugaggacuaguguccaccugucccuccugggcugcuggauugucucguuuuccugccaaauaaacaggaucagcgcuuuacagaucuaaaaaaaaaaaaaaaaaaaaaaaaaaaaaaaaaaaaaaaaaaaaaaaaaaaaaaaaaaaaaaaaugcaucccccccccccccccccccccccccccccccaaaggcucuuuucagagccaccagaauu

SEQ ID NO: 9889 - RNA, 1073 nt, Artificial Sequence
  mRNA product Design e-5 comprising derived and/or modified sequence from HRSV(A2)__P0DOE7.1__M (opt4)
gggagagcggcucggccauuuugucccagucaguccggaggcugcggcugcagaaguaccgccugcggaguaacugcaaagaagcuuaccauggagaccuacgugaacaagcugcacgagggcagcaccuacaccgccgccgugcaguacaacgugcuggagaaggacgacgaccccgccagccugaccaucugggugcccauguuccagagcagcaugcccgccgaccugcugaucaaggagcuggccaacgugaacauccuggugaagcagaucagcacccccaagggccccagccugagagugaugaucaacagcagaagcgccgugcuggcccagaugcccagcaaguucaccaucugcgccaacgugagccuggacgagagaagcaagcuggccuacgacgugaccacccccugcgagaucaaggccugcagccugaccugccugaagagcaagaacaugcugaccaccgugaaggaccugaccaugaagacccugaaccccacccacgacaucaucgcccugugcgaguucgagaacaucgugaccagcaagaaggugaucauccccaccuaccugagaagcaucagcgugagaaacaaggaccugaacacccuggagaacaucaccaccaccgaguucaagaacgccaucaccaacgccaagaucauccccuacagcggccugcugcuggugaucaccgugaccgacaacaagggcgccuucaaguacaucaagccccagagccaguucaucguggaccugggcgccuaccuggagaaggagagcaucuacuacgugaccaccaacuggaagcacaccgccaccagauucgccaucaagcccauggaggacugaggacuaguguccaccugucccuccugggcugcuggauugucucguuuuccugccaaauaaacaggaucagcgcuuuacagaucuaaaaaaaaaaaaaaaaaaaaaaaaaaaaaaaaaaaaaaaaaaaaaaaaaaaaaaaaaaaaaaaaugcaucccccccccccccccccccccccccccccccaaaggcucuuuucagagccaccagaauu

SEQ ID NO: 9890 - RNA, 1073 nt, Artificial Sequence
  mRNA product Design e-5 comprising derived and/or modified sequence from HRSV(A2)__P0DOE7.1__M (opt5)
gggagagcggcucggccauuuugucccagucaguccggaggcugcggcugcagaaguaccgccugcggaguaacugcaaagaagcuuaccauggagaccuacgugaacaagcugcacgaaggcagcacauauacggccgcuguccaguacaauguucucgagaaagacgaugaccccgccucccugaccaucugggugccuauguuccaaucuagcaugccggcggaucuucugauuaaggaacucgcuaacgugaauauccuggucaaacagauuuccacacccaaggggccuucucuuagagugaugaucaacagccgguccgccguucuggcccagaugcccucuaaauuuaccauuugcgcuaaugugagccucgacgagcgcuccaagcuggccuaugaugucacaaccccuugugaaaucaaggcuugcagccugacaugucucaaaucuaagaacaugcugaccacggugaaagaccuuaccaugaagacacugaaucccacccaugauaucauugcccucugcgaguucgagaacaucguuacauccaaaaaggugauuaucccuaccuaccugagaagcauuucuguccggaauaaggaccuuaacacgcuggaaaauaucacaaccacagaguuuaaaaacgcgauuaccaaugccaagaucaucccguauuccggacuccugcuggugauuaccgugacagauaacaaaggcgcuuucaaguacaucaaaccccagagccaauuuauugucgaccucggggccuaucuggaaaaggagucuaucuacuacguuacgaccaauuggaaacacacagcuacccgcuucgccauuaagccuauggaggauugaggacuaguguccaccugucccuccugggcugcuggauugucucguuuuccugccaaauaaacaggaucagcgcuuuacagaucuaaaaaaaaaaaaaaaaaaaaaaaaaaaaaaaaaaaaaaaaaaaaaaaaaaaaaaaaaaaaaaaaugcaucccccccccccccccccccccccccccccccaaaggcucuuuucagagccaccagaauu

SEQ ID NO: 9891 - RNA, 1073 nt, Artificial Sequence
  mRNA product Design e-5 comprising derived and/or modified sequence from HRSV(A2)__P0DOE7.1__M (opt6)
gggagagcggcucggccauuuugucccagucaguccggaggcugcggcugcagaaguaccgccugcggaguaacugcaaagaagcuuaccauggaaacauacguaaacaaacuacacgaaggauccacauacacagcagcaguacaauacaacguacuagaaaaagacgacgacccagcaucuuuaaccauauggguaccaauguuccaaucaucaaugccagcagaccucuuaauaaaagaacuagcaaacguaaacauccuagucaaacaaauaucaacacccaaaggaccaucccucagaguaaugaucaacucaagaucagcaguacuagcacaaaugccaucaaaauucacaauaugcgccaacguuucuuuagacgaacgaucaaaauuagccuacgacguaacaacacccugcgaaauaaaagcaugcucacuaacaugccuaaaaucaaaaaacaugcucacuacaguaaaagaccuaaccaugaaaacacucaacccaacacacgacauaauagcccuaugcgaauuugaaaacauaguaacaucaaaaaaaguaauaaucccaacauacuuaagaucgaucucagucagaaacaaagaccuaaauacacucgaaaacauaacaacaacagaauuuaaaaacgcaauaacaaacgcaaaaauaauaccauacucaggacuacuccuaguaauaacaguaacagacaacaaaggagcauucaaauacauaaaaccacaaucacaauucaucguagaccucggagcauaccuagaaaaagaaucaauauacuacguaacaacaaacuggaaacacaccgccacaagauucgcaauaaaacccauggaagacuaaggacuaguguccaccugucccuccugggcugcuggauugucucguuuuccugccaaauaaacaggaucagcgcuuuacagaucuaaaaaaaaaaaaaaaaaaaaaaaaaaaaaaaaaaaaaaaaaaaaaaaaaaaaaaaaaaaaaaaaugcaucccccccccccccccccccccccccccccccaaaggcucuuuucagagccaccagaauu

SEQ ID NO: 9892 - RNA, 1073 nt, Artificial Sequence
  mRNA product Design e-5 comprising derived and/or modified sequence from HRSV(A2)__P0DOE7.1__M (opt11)
gggagagcggcucggccauuuugucccagucaguccggaggcugcggcugcagaaguaccgccugcggaguaacugcaaagaagcuuaccauggaaaccuacgucaacaaacuacacgaaggcucaaccuacaccgccgccguccaauacaacguccucgaaaaagacgacgaccccgccucccuaaccaucuggguucccauguuccaaucauccaugcccgccgaccuccucauaaaagaacuagccaacgucaacauccuagucaaacaaaucagcacccccaaaggccccucccuccgcguaaugaucaacucccgcuccgccguccuagcccaaaugcccuccaaauuuacaaucugcgccaacgucucccucgacgaacgcucaaaacucgccuacgacgucaccacacccugcgaaaucaaagccugcucccucaccugccucaaaagcaaaaauaugcuaaccaccgucaaagaccuuaccaugaaaacccucaaccccacucacgacaucauagcccucugcgaauuugaaaacaucgucaccuccaaaaaagucaucauccccacauaccuccgcuccaucuccguccgcaacaaagaccucaacacccucgaaaacaucaccaccaccgaauuuaaaaacgccaucaccaacgccaaaaucauccccuacuccggccuccuccucgucaucaccguuaccgacaacaaaggcgccuucaaauacaucaaaccccaaucccaauucaucgucgaccucggagccuaccuugaaaaagaguccaucuacuacgucaccaccaacuggaaacacaccgccacccgauucgccaucaaacccauggaagacuaaggacuaguguccaccugucccuccugggcugcuggauugucucguuuuccugccaaauaaacaggaucagcgcuuuacagaucuaaaaaaaaaaaaaaaaaaaaaaaaaaaaaaaaaaaaaaaaaaaaaaaaaaaaaaaaaaaaaaaaugcaucccccccccccccccccccccccccccccccaaaggcucuuuucagagccaccagaauu

SEQ ID NO: 9893 - RNA, 1140 nt, Artificial Sequence
  mRNA product Design e-6 comprising derived and/or modified sequence from HRSV(A2)__P0DOE7.1__M (wt)
gggagagcggcucggccauuuugucccagucaguccggaggcugcggcugcagaaguaccgccugcggaguaacugcaaagaagcuuaccauggaaacauacgugaacaagcuucacgaaggcuccacauacacagcugcuguucaauacaaugucuuagaaaaagacgaugacccugcaucacuuacaauaugggugcccauguuccaaucaucuaugccagcagauuuacuuauaaaagaacuagcuaaugucaacauacuagugaaacaaauauccacacccaagggaccuucacuaagagucaugauaaacucaagaagugcagugcuagcacaaaugcccagcaaauuuaccauaugcgcuaauguguccuuggaugaaagaagcaaacuagcauaugauguaaccacacccugugaaaucaaggcauguagucuaacaugccuaaaaucaaaaaauauguugacuacaguuaaagaucucacuaugaagacacucaacccuacacaugauauuauugcuuuaugugaauuugaaaacauaguaacaucaaaaaaagucauaauaccaacauaccuaagauccaucagugucagaaauaaagaucugaacacacuugaaaauauaacaaccacugaauucaaaaaugcuaucacaaaugcaaaaaucaucccuuacucaggauuacuauuagucaucacagugacugacaacaaaggagcauucaaauacauaaagccacaaagucaauucauaguagaucuuggagcuuaccuagaaaaagaaaguauauauuauguuaccacaaauuggaagcacacagcuacacgauuugcaaucaaacccauggaagauuaaggacuaguacuggcugcaucucccuuuccucuguccuccauccuucucccaggauggugaagggggaccugguacccagugauccccaccccaggauccuaaaucaugacuuaccugcuaauaaaaacucauuggaaaagugagaagaucuaaaaaaaaaaaaaaaaaaaaaaaaaaaaaaaaaaaaaaaaaaaaaaaaaaaaaaaaaaaaaaaaugcaucccccccccccccccccccccccccccccccaaaggcucuuuucagagccaccagaauu

SEQ ID NO: 9894 - RNA, 1140 nt, Artificial Sequence
  mRNA product Design e-6 comprising derived and/or modified sequence from HRSV(A2)__P0DOE7.1__M (opt1)
gggagagcggcucggccauuuugucccagucaguccggaggcugcggcugcagaaguaccgccugcggaguaacugcaaagaagcuuaccauggagaccuacgugaacaagcugcacgagggcagcaccuacacggccgccguccaguacaacgugcucgagaaggacgacgaccccgcgucccugaccaucugggugccgauguuccagagcuccaugcccgccgaccugcucaucaaggagcuggccaacgucaacauccuggugaagcagaucagcacccccaaggggcccucccuccgcgugaugaucaacagccgguccgccguccuggcccagaugccgagcaaguucaccaucugcgcgaacgugucccuggacgagcgcagcaagcucgccuacgacgugacgacccccugcgagaucaaggccugcucccugaccugccucaagagcaagaacaugcugaccacggucaaggaccugaccaugaagacccugaaccccacccacgacaucaucgcccucugcgaguucgagaacaucgugacguccaagaaggugaucauccccaccuaccugcggagcaucuccguccgcaacaaggaccugaacacccucgagaacaucaccacgaccgaguucaagaacgcgaucaccaacgccaagaucaucccguacagcggccugcugcucgugaucaccgugacggacaacaagggggccuucaaguacaucaagccccagucccaguucaucgucgaccugggcgccuaccuggagaaggagagcaucuacuacgugaccaccaacuggaagcacaccgccacgcgguucgcgaucaagcccauggaggacugaggacuaguacuggcugcaucucccuuuccucuguccuccauccuucucccaggauggugaagggggaccugguacccagugauccccaccccaggauccuaaaucaugacuuaccugcuaauaaaaacucauuggaaaagugagaagaucuaaaaaaaaaaaaaaaaaaaaaaaaaaaaaaaaaaaaaaaaaaaaaaaaaaaaaaaaaaaaaaaaugcaucccccccccccccccccccccccccccccccaaaggcucuuuucagagccaccagaauu

SEQ ID NO: 9895 - RNA, 1140 nt, Artificial Sequence
  mRNA product Design e-6 comprising derived and/or modified sequence from HRSV(A2)__P0DOE7.1__M (opt2)
gggagagcggcucggccauuuugucccagucaguccggaggcugcggcugcagaaguaccgccugcggaguaacugcaaagaagcuuaccauggagaccuacgucaacaagcuccacgagggcuccaccuacaccgccgccguccaguacaacguccucgagaaggacgacgaccccgccucccucaccaucuggguccccauguuccaguccuccaugcccgccgaccuccucaucaaggagcucgccaacgucaacauccucgucaagcagaucuccacccccaagggccccucccuccgcgucaugaucaacucccgcuccgccguccucgcccagaugcccuccaaguucaccaucugcgccaacgucucccucgacgagcgcuccaagcucgccuacgacgucaccacccccugcgagaucaaggccugcucccucaccugccucaaguccaagaacaugcucaccaccgucaaggaccucaccaugaagacccucaaccccacccacgacaucaucgcccucugcgaguucgagaacaucgucaccuccaagaaggucaucauccccaccuaccuccgcuccaucuccguccgcaacaaggaccucaacacccucgagaacaucaccaccaccgaguucaagaacgccaucaccaacgccaagaucauccccuacuccggccuccuccucgucaucaccgucaccgacaacaagggcgccuucaaguacaucaagccccagucccaguucaucgucgaccucggcgccuaccucgagaaggaguccaucuacuacgucaccaccaacuggaagcacaccgccacccgcuucgccaucaagcccauggaggacugaggacuaguacuggcugcaucucccuuuccucuguccuccauccuucucccaggauggugaagggggaccugguacccagugauccccaccccaggauccuaaaucaugacuuaccugcuaauaaaaacucauuggaaaagugagaagaucuaaaaaaaaaaaaaaaaaaaaaaaaaaaaaaaaaaaaaaaaaaaaaaaaaaaaaaaaaaaaaaaaugcaucccccccccccccccccccccccccccccccaaaggcucuuuucagagccaccagaauu

SEQ ID NO: 9896 - RNA, 1140 nt, Artificial Sequence
  mRNA product Design e-6 comprising derived and/or modified sequence from HRSV(A2)__P0DOE7.1__M (opt3)
gggagagcggcucggccauuuugucccagucaguccggaggcugcggcugcagaaguaccgccugcggaguaacugcaaagaagcuuaccauggagaccuacgugaacaagcugcacgaaggcagcacauauacugccgcuguccaguacaauguucucgagaaagacgaugaccccgcaucccuuacgaucugggugccuauguuccaaucuucaaugccagccgaucuguugauuaaggaauuagcgaacguaaauauacuggugaaacagaucaguaccccgaaggggcccagccuaagagucaugauuaacuccaggucugcugugcucgcccagaugccuucgaaauuuacaaucugcgcaaauguuucacuggacgagcggagcaaacuugccuaugaugugacuaccccaugugaaauuaaggcuugcagucugacauguuugaaguccaagaacaugcucaccacugucaaagaccugacaaugaagacccugaaucccacgcaugauaucauagcacucugcgaguucgagaacaucgugacuucuaaaaagguaauuaucccuaccuacuuacgcagcauuuccguucgaaauaaggaccugaacacacuugaaaauaucacuaccacagaguuuaaaaacgccauaaccaaugcuaagauuaucccauauucaggauugcugcuagugauuacggucacugauaacaaaggugccuucaaguacaucaaaccccagagucaauuuaucguggaccucggcgcguaucuggaaaaggagagcauuuacuacgugacaaccaauuggaaacacacugcaacacguuucgccauaaagccuauggaggauugaggacuaguacuggcugcaucucccuuuccucuguccuccauccuucucccaggauggugaagggggaccugguacccagugauccccaccccaggauccuaaaucaugacuuaccugcuaauaaaaacucauuggaaaagugagaagaucuaaaaaaaaaaaaaaaaaaaaaaaaaaaaaaaaaaaaaaaaaaaaaaaaaaaaaaaaaaaaaaaaugcaucccccccccccccccccccccccccccccccaaaggcucuuuucagagccaccagaauu

SEQ ID NO: 9897 - RNA, 1140 nt, Artificial Sequence
  mRNA product Design e-6 comprising derived and/or modified sequence from HRSV(A2)__P0DOE7.1__M (opt4)
gggagagcggcucggccauuuugucccagucaguccggaggcugcggcugcagaaguaccgccugcggaguaacugcaaagaagcuuaccauggagaccuacgugaacaagcugcacgagggcagcaccuacaccgccgccgugcaguacaacgugcuggagaaggacgacgaccccgccagccugaccaucugggugcccauguuccagagcagcaugcccgccgaccugcugaucaaggagcuggccaacgugaacauccuggugaagcagaucagcacccccaagggccccagccugagagugaugaucaacagcagaagcgccgugcuggcccagaugcccagcaaguucaccaucugcgccaacgugagccuggacgagagaagcaagcuggccuacgacgugaccacccccugcgagaucaaggccugcagccugaccugccugaagagcaagaacaugcugaccaccgugaaggaccugaccaugaagacccugaaccccacccacgacaucaucgcccugugcgaguucgagaacaucgugaccagcaagaaggugaucauccccaccuaccugagaagcaucagcgugagaaacaaggaccugaacacccuggagaacaucaccaccaccgaguucaagaacgccaucaccaacgccaagaucauccccuacagcggccugcugcuggugaucaccgugaccgacaacaagggcgccuucaaguacaucaagccccagagccaguucaucguggaccugggcgccuaccuggagaaggagagcaucuacuacgugaccaccaacuggaagcacaccgccaccagauucgccaucaagcccauggaggacugaggacuaguacuggcugcaucucccuuuccucuguccuccauccuucucccaggauggugaagggggaccugguacccagugauccccaccccaggauccuaaaucaugacuuaccugcuaauaaaaacucauuggaaaagugagaagaucuaaaaaaaaaaaaaaaaaaaaaaaaaaaaaaaaaaaaaaaaaaaaaaaaaaaaaaaaaaaaaaaaugcaucccccccccccccccccccccccccccccccaaaggcucuuuucagagccaccagaauu

SEQ ID NO: 9898 - RNA, 1140 nt, Artificial Sequence
  mRNA product Design e-6 comprising derived and/or modified sequence from HRSV(A2)__P0DOE7.1__M (opt5)
gggagagcggcucggccauuuugucccagucaguccggaggcugcggcugcagaaguaccgccugcggaguaacugcaaagaagcuuaccauggagaccuacgugaacaagcugcacgaaggcagcacauauacggccgcuguccaguacaauguucucgagaaagacgaugaccccgccucccugaccaucugggugccuauguuccaaucuagcaugccggcggaucuucugauuaaggaacucgcuaacgugaauauccuggucaaacagauuuccacacccaaggggccuucucuuagagugaugaucaacagccgguccgccguucuggcccagaugcccucuaaauuuaccauuugcgcuaaugugagccucgacgagcgcuccaagcuggccuaugaugucacaaccccuugugaaaucaaggcuugcagccugacaugucucaaaucuaagaacaugcugaccacggugaaagaccuuaccaugaagacacugaaucccacccaugauaucauugcccucugcgaguucgagaacaucguuacauccaaaaaggugauuaucccuaccuaccugagaagcauuucuguccggaauaaggaccuuaacacgcuggaaaauaucacaaccacagaguuuaaaaacgcgauuaccaaugccaagaucaucccguauuccggacuccugcuggugauuaccgugacagauaacaaaggcgcuuucaaguacaucaaaccccagagccaauuuauugucgaccucggggccuaucuggaaaaggagucuaucuacuacguuacgaccaauuggaaacacacagcuacccgcuucgccauuaagccuauggaggauugaggacuaguacuggcugcaucucccuuuccucuguccuccauccuucucccaggauggugaagggggaccugguacccagugauccccaccccaggauccuaaaucaugacuuaccugcuaauaaaaacucauuggaaaagugagaagaucuaaaaaaaaaaaaaaaaaaaaaaaaaaaaaaaaaaaaaaaaaaaaaaaaaaaaaaaaaaaaaaaaugcaucccccccccccccccccccccccccccccccaaaggcucuuuucagagccaccagaauu

SEQ ID NO: 9899 - RNA, 1140 nt, Artificial Sequence
  mRNA product Design e-6 comprising derived and/or modified sequence from HRSV(A2)__P0DOE7.1__M (opt6)
gggagagcggcucggccauuuugucccagucaguccggaggcugcggcugcagaaguaccgccugcggaguaacugcaaagaagcuuaccauggaaacauacguaaacaaacuacacgaaggauccacauacacagcagcaguacaauacaacguacuagaaaaagacgacgacccagcaucuuuaaccauauggguaccaauguuccaaucaucaaugccagcagaccucuuaauaaaagaacuagcaaacguaaacauccuagucaaacaaauaucaacacccaaaggaccaucccucagaguaaugaucaacucaagaucagcaguacuagcacaaaugccaucaaaauucacaauaugcgccaacguuucuuuagacgaacgaucaaaauuagccuacgacguaacaacacccugcgaaauaaaagcaugcucacuaacaugccuaaaaucaaaaaacaugcucacuacaguaaaagaccuaaccaugaaaacacucaacccaacacacgacauaauagcccuaugcgaauuugaaaacauaguaacaucaaaaaaaguaauaaucccaacauacuuaagaucgaucucagucagaaacaaagaccuaaauacacucgaaaacauaacaacaacagaauuuaaaaacgcaauaacaaacgcaaaaauaauaccauacucaggacuacuccuaguaauaacaguaacagacaacaaaggagcauucaaauacauaaaaccacaaucacaauucaucguagaccucggagcauaccuagaaaaagaaucaauauacuacguaacaacaaacuggaaacacaccgccacaagauucgcaauaaaacccauggaagacuaaggacuaguacuggcugcaucucccuuuccucuguccuccauccuucucccaggauggugaagggggaccugguacccagugauccccaccccaggauccuaaaucaugacuuaccugcuaauaaaaacucauuggaaaagugagaagaucuaaaaaaaaaaaaaaaaaaaaaaaaaaaaaaaaaaaaaaaaaaaaaaaaaaaaaaaaaaaaaaaaugcaucccccccccccccccccccccccccccccccaaaggcucuuuucagagccaccagaauu

SEQ ID NO: 9900 - RNA, 1140 nt, Artificial Sequence
  mRNA product Design e-6 comprising derived and/or modified sequence from HRSV(A2)__P0DOE7.1__M (opt11)
gggagagcggcucggccauuuugucccagucaguccggaggcugcggcugcagaaguaccgccugcggaguaacugcaaagaagcuuaccauggaaaccuacgucaacaaacuacacgaaggcucaaccuacaccgccgccguccaauacaacguccucgaaaaagacgacgaccccgccucccuaaccaucuggguucccauguuccaaucauccaugcccgccgaccuccucauaaaagaacuagccaacgucaacauccuagucaaacaaaucagcacccccaaaggccccucccuccgcguaaugaucaacucccgcuccgccguccuagcccaaaugcccuccaaauuuacaaucugcgccaacgucucccucgacgaacgcucaaaacucgccuacgacgucaccacacccugcgaaaucaaagccugcucccucaccugccucaaaagcaaaaauaugcuaaccaccgucaaagaccuuaccaugaaaacccucaaccccacucacgacaucauagcccucugcgaauuugaaaacaucgucaccuccaaaaaagucaucauccccacauaccuccgcuccaucuccguccgcaacaaagaccucaacacccucgaaaacaucaccaccaccgaauuuaaaaacgccaucaccaacgccaaaaucauccccuacuccggccuccuccucgucaucaccguuaccgacaacaaaggcgccuucaaauacaucaaaccccaaucccaauucaucgucgaccucggagccuaccuugaaaaagaguccaucuacuacgucaccaccaacuggaaacacaccgccacccgauucgccaucaaacccauggaagacuaaggacuaguacuggcugcaucucccuuuccucuguccuccauccuucucccaggauggugaagggggaccugguacccagugauccccaccccaggauccuaaaucaugacuuaccugcuaauaaaaacucauuggaaaagugagaagaucuaaaaaaaaaaaaaaaaaaaaaaaaaaaaaaaaaaaaaaaaaaaaaaaaaaaaaaaaaaaaaaaaugcaucccccccccccccccccccccccccccccccaaaggcucuuuucagagccaccagaauu

SEQ ID NO: 9901 - RNA, 1356 nt, Artificial Sequence
  mRNA product Design f-1 comprising derived and/or modified sequence from HRSV(A2)__P0DOE7.1__M (wt)
gggagagcggcucggccauuuugucccagucaguccggaggcugcggcugcagaaguaccgccugcggaguaacugcaaagaagcuuaccauggaaacauacgugaacaagcuucacgaaggcuccacauacacagcugcuguucaauacaaugucuuagaaaaagacgaugacccugcaucacuuacaauaugggugcccauguuccaaucaucuaugccagcagauuuacuuauaaaagaacuagcuaaugucaacauacuagugaaacaaauauccacacccaagggaccuucacuaagagucaugauaaacucaagaagugcagugcuagcacaaaugcccagcaaauuuaccauaugcgcuaauguguccuuggaugaaagaagcaaacuagcauaugauguaaccacacccugugaaaucaaggcauguagucuaacaugccuaaaaucaaaaaauauguugacuacaguuaaagaucucacuaugaagacacucaacccuacacaugauauuauugcuuuaugugaauuugaaaacauaguaacaucaaaaaaagucauaauaccaacauaccuaagauccaucagugucagaaauaaagaucugaacacacuugaaaauauaacaaccacugaauucaaaaaugcuaucacaaaugcaaaaaucaucccuuacucaggauuacuauuagucaucacagugacugacaacaaaggagcauucaaauacauaaagccacaaagucaauucauaguagaucuuggagcuuaccuagaaaaagaaaguauauauuauguuaccacaaauuggaagcacacagcuacacgauuugcaaucaaacccauggaagauuaaggacuagugaagggaacacccaaauuuaauucagccuuaagcacaauuaauuaagagugaaacguaauuguacaagcaguuggucacccaccauagggcaugaucaacaccgcaaccuuuccuuuuucccccagugauucugaaaaaccccucuucccuucagcuugcuuagauguuccaaauuuaguaagcuuaaggcggccuacagaagaaaaagaaaaaaaaggccacaaaaguucccucucacuuucaguaaauaaaauaaaagcagcaacagaaauaaagaaauaaaugaaauucaaaaugaaauaaauauuguguugugcagcauuaaaaaaucaauaaaaauuaaaaaugagcaagaucuaaaaaaaaaaaaaaaaaaaaaaaaaaaaaaaaaaaaaaaaaaaaaaaaaaaaaaaaaaaaaaaaugcaucccccccccccccccccccccccccccccccaaaggcucuuuucagagccaccagaauu

SEQ ID NO: 9902 - RNA, 1356 nt, Artificial Sequence
  mRNA product Design f-1 comprising derived and/or modified sequence from HRSV(A2)__P0DOE7.1__M (opt1)
gggagagcggcucggccauuuugucccagucaguccggaggcugcggcugcagaaguaccgccugcggaguaacugcaaagaagcuuaccauggagaccuacgugaacaagcugcacgagggcagcaccuacacggccgccguccaguacaacgugcucgagaaggacgacgaccccgcgucccugaccaucugggugccgauguuccagagcuccaugcccgccgaccugcucaucaaggagcuggccaacgucaacauccuggugaagcagaucagcacccccaaggggcccucccuccgcgugaugaucaacagccgguccgccguccuggcccagaugccgagcaaguucaccaucugcgcgaacgugucccuggacgagcgcagcaagcucgccuacgacgugacgacccccugcgagaucaaggccugcucccugaccugccucaagagcaagaacaugcugaccacggucaaggaccugaccaugaagacccugaaccccacccacgacaucaucgcccucugcgaguucgagaacaucgugacguccaagaaggugaucauccccaccuaccugcggagcaucuccguccgcaacaaggaccugaacacccucgagaacaucaccacgaccgaguucaagaacgcgaucaccaacgccaagaucaucccguacagcggccugcugcucgugaucaccgugacggacaacaagggggccuucaaguacaucaagccccagucccaguucaucgucgaccugggcgccuaccuggagaaggagagcaucuacuacgugaccaccaacuggaagcacaccgccacgcgguucgcgaucaagcccauggaggacugaggacuagugaagggaacacccaaauuuaauucagccuuaagcacaauuaauuaagagugaaacguaauuguacaagcaguuggucacccaccauagggcaugaucaacaccgcaaccuuuccuuuuucccccagugauucugaaaaaccccucuucccuucagcuugcuuagauguuccaaauuuaguaagcuuaaggcggccuacagaagaaaaagaaaaaaaaggccacaaaaguucccucucacuuucaguaaauaaaauaaaagcagcaacagaaauaaagaaauaaaugaaauucaaaaugaaauaaauauuguguugugcagcauuaaaaaaucaauaaaaauuaaaaaugagcaagaucuaaaaaaaaaaaaaaaaaaaaaaaaaaaaaaaaaaaaaaaaaaaaaaaaaaaaaaaaaaaaaaaaugcaucccccccccccccccccccccccccccccccaaaggcucuuuucagagccaccagaauu

SEQ ID NO: 9903 - RNA, 1356 nt, Artificial Sequence
  mRNA product Design f-1 comprising derived and/or modified sequence from HRSV(A2)__P0DOE7.1__M (opt2)
gggagagcggcucggccauuuugucccagucaguccggaggcugcggcugcagaaguaccgccugcggaguaacugcaaagaagcuuaccauggagaccuacgucaacaagcuccacgagggcuccaccuacaccgccgccguccaguacaacguccucgagaaggacgacgaccccgccucccucaccaucuggguccccauguuccaguccuccaugcccgccgaccuccucaucaaggagcucgccaacgucaacauccucgucaagcagaucuccacccccaagggccccucccuccgcgucaugaucaacucccgcuccgccguccucgcccagaugcccuccaaguucaccaucugcgccaacgucucccucgacgagcgcuccaagcucgccuacgacgucaccacccccugcgagaucaaggccugcucccucaccugccucaaguccaagaacaugcucaccaccgucaaggaccucaccaugaagacccucaaccccacccacgacaucaucgcccucugcgaguucgagaacaucgucaccuccaagaaggucaucauccccaccuaccuccgcuccaucuccguccgcaacaaggaccucaacacccucgagaacaucaccaccaccgaguucaagaacgccaucaccaacgccaagaucauccccuacuccggccuccuccucgucaucaccgucaccgacaacaagggcgccuucaaguacaucaagccccagucccaguucaucgucgaccucggcgccuaccucgagaaggaguccaucuacuacgucaccaccaacuggaagcacaccgccacccgcuucgccaucaagcccauggaggacugaggacuagugaagggaacacccaaauuuaauucagccuuaagcacaauuaauuaagagugaaacguaauuguacaagcaguuggucacccaccauagggcaugaucaacaccgcaaccuuuccuuuuucccccagugauucugaaaaaccccucuucccuucagcuugcuuagauguuccaaauuuaguaagcuuaaggcggccuacagaagaaaaagaaaaaaaaggccacaaaaguucccucucacuuucaguaaauaaaauaaaagcagcaacagaaauaaagaaauaaaugaaauucaaaaugaaauaaauauuguguugugcagcauuaaaaaaucaauaaaaauuaaaaaugagcaagaucuaaaaaaaaaaaaaaaaaaaaaaaaaaaaaaaaaaaaaaaaaaaaaaaaaaaaaaaaaaaaaaaaugcaucccccccccccccccccccccccccccccccaaaggcucuuuucagagccaccagaauu

SEQ ID NO: 9904 - RNA, 1356 nt, Artificial Sequence
  mRNA product Design f-1 comprising derived and/or modified sequence from HRSV(A2)__P0DOE7.1__M (opt3)
gggagagcggcucggccauuuugucccagucaguccggaggcugcggcugcagaaguaccgccugcggaguaacugcaaagaagcuuaccauggagaccuacgugaacaagcugcacgaaggcagcacauauacugccgcuguccaguacaauguucucgagaaagacgaugaccccgcaucccuuacgaucugggugccuauguuccaaucuucaaugccagccgaucuguugauuaaggaauuagcgaacguaaauauacuggugaaacagaucaguaccccgaaggggcccagccuaagagucaugauuaacuccaggucugcugugcucgcccagaugccuucgaaauuuacaaucugcgcaaauguuucacuggacgagcggagcaaacuugccuaugaugugacuaccccaugugaaauuaaggcuugcagucugacauguuugaaguccaagaacaugcucaccacugucaaagaccugacaaugaagacccugaaucccacgcaugauaucauagcacucugcgaguucgagaacaucgugacuucuaaaaagguaauuaucccuaccuacuuacgcagcauuuccguucgaaauaaggaccugaacacacuugaaaauaucacuaccacagaguuuaaaaacgccauaaccaaugcuaagauuaucccauauucaggauugcugcuagugauuacggucacugauaacaaaggugccuucaaguacaucaaaccccagagucaauuuaucguggaccucggcgcguaucuggaaaaggagagcauuuacuacgugacaaccaauuggaaacacacugcaacacguuucgccauaaagccuauggaggauugaggacuagugaagggaacacccaaauuuaauucagccuuaagcacaauuaauuaagagugaaacguaauuguacaagcaguuggucacccaccauagggcaugaucaacaccgcaaccuuuccuuuuucccccagugauucugaaaaaccccucuucccuucagcuugcuuagauguuccaaauuuaguaagcuuaaggcggccuacagaagaaaaagaaaaaaaaggccacaaaaguucccucucacuuucaguaaauaaaauaaaagcagcaacagaaauaaagaaauaaaugaaauucaaaaugaaauaaauauuguguugugcagcauuaaaaaaucaauaaaaauuaaaaaugagcaagaucuaaaaaaaaaaaaaaaaaaaaaaaaaaaaaaaaaaaaaaaaaaaaaaaaaaaaaaaaaaaaaaaaugcaucccccccccccccccccccccccccccccccaaaggcucuuuucagagccaccagaauu

SEQ ID NO: 9905 - RNA, 1356 nt, Artificial Sequence
  mRNA product Design f-1 comprising derived and/or modified sequence from HRSV(A2)__P0DOE7.1__M (opt4)
gggagagcggcucggccauuuugucccagucaguccggaggcugcggcugcagaaguaccgccugcggaguaacugcaaagaagcuuaccauggagaccuacgugaacaagcugcacgagggcagcaccuacaccgccgccgugcaguacaacgugcuggagaaggacgacgaccccgccagccugaccaucugggugcccauguuccagagcagcaugcccgccgaccugcugaucaaggagcuggccaacgugaacauccuggugaagcagaucagcacccccaagggccccagccugagagugaugaucaacagcagaagcgccgugcuggcccagaugcccagcaaguucaccaucugcgccaacgugagccuggacgagagaagcaagcuggccuacgacgugaccacccccugcgagaucaaggccugcagccugaccugccugaagagcaagaacaugcugaccaccgugaaggaccugaccaugaagacccugaaccccacccacgacaucaucgcccugugcgaguucgagaacaucgugaccagcaagaaggugaucauccccaccuaccugagaagcaucagcgugagaaacaaggaccugaacacccuggagaacaucaccaccaccgaguucaagaacgccaucaccaacgccaagaucauccccuacagcggccugcugcuggugaucaccgugaccgacaacaagggcgccuucaaguacaucaagccccagagccaguucaucguggaccugggcgccuaccuggagaaggagagcaucuacuacgugaccaccaacuggaagcacaccgccaccagauucgccaucaagcccauggaggacugaggacuagugaagggaacacccaaauuuaauucagccuuaagcacaauuaauuaagagugaaacguaauuguacaagcaguuggucacccaccauagggcaugaucaacaccgcaaccuuuccuuuuucccccagugauucugaaaaaccccucuucccuucagcuugcuuagauguuccaaauuuaguaagcuuaaggcggccuacagaagaaaaagaaaaaaaaggccacaaaaguucccucucacuuucaguaaauaaaauaaaagcagcaacagaaauaaagaaauaaaugaaauucaaaaugaaauaaauauuguguugugcagcauuaaaaaaucaauaaaaauuaaaaaugagcaagaucuaaaaaaaaaaaaaaaaaaaaaaaaaaaaaaaaaaaaaaaaaaaaaaaaaaaaaaaaaaaaaaaaugcaucccccccccccccccccccccccccccccccaaaggcucuuuucagagccaccagaauu

SEQ ID NO: 9906 - RNA, 1356 nt, Artificial Sequence
  mRNA product Design f-1 comprising derived and/or modified sequence from HRSV(A2)__P0DOE7.1__M (opt5)
gggagagcggcucggccauuuugucccagucaguccggaggcugcggcugcagaaguaccgccugcggaguaacugcaaagaagcuuaccauggagaccuacgugaacaagcugcacgaaggcagcacauauacggccgcuguccaguacaauguucucgagaaagacgaugaccccgccucccugaccaucugggugccuauguuccaaucuagcaugccggcggaucuucugauuaaggaacucgcuaacgugaauauccuggucaaacagauuuccacacccaaggggccuucucuuagagugaugaucaacagccgguccgccguucuggcccagaugcccucuaaauuuaccauuugcgcuaaugugagccucgacgagcgcuccaagcuggccuaugaugucacaaccccuugugaaaucaaggcuugcagccugacaugucucaaaucuaagaacaugcugaccacggugaaagaccuuaccaugaagacacugaaucccacccaugauaucauugcccucugcgaguucgagaacaucguuacauccaaaaaggugauuaucccuaccuaccugagaagcauuucuguccggaauaaggaccuuaacacgcuggaaaauaucacaaccacagaguuuaaaaacgcgauuaccaaugccaagaucaucccguauuccggacuccugcuggugauuaccgugacagauaacaaaggcgcuuucaaguacaucaaaccccagagccaauuuauugucgaccucggggccuaucuggaaaaggagucuaucuacuacguuacgaccaauuggaaacacacagcuacccgcuucgccauuaagccuauggaggauugaggacuagugaagggaacacccaaauuuaauucagccuuaagcacaauuaauuaagagugaaacguaauuguacaagcaguuggucacccaccauagggcaugaucaacaccgcaaccuuuccuuuuucccccagugauucugaaaaaccccucuucccuucagcuugcuuagauguuccaaauuuaguaagcuuaaggcggccuacagaagaaaaagaaaaaaaaggccacaaaaguucccucucacuuucaguaaauaaaauaaaagcagcaacagaaauaaagaaauaaaugaaauucaaaaugaaauaaauauuguguugugcagcauuaaaaaaucaauaaaaauuaaaaaugagcaagaucuaaaaaaaaaaaaaaaaaaaaaaaaaaaaaaaaaaaaaaaaaaaaaaaaaaaaaaaaaaaaaaaaugcaucccccccccccccccccccccccccccccccaaaggcucuuuucagagccaccagaauu

SEQ ID NO: 9907 - RNA, 1356 nt, Artificial Sequence
  mRNA product Design f-1 comprising derived and/or modified sequence from HRSV(A2)__P0DOE7.1__M (opt6)
gggagagcggcucggccauuuugucccagucaguccggaggcugcggcugcagaaguaccgccugcggaguaacugcaaagaagcuuaccauggaaacauacguaaacaaacuacacgaaggauccacauacacagcagcaguacaauacaacguacuagaaaaagacgacgacccagcaucuuuaaccauauggguaccaauguuccaaucaucaaugccagcagaccucuuaauaaaagaacuagcaaacguaaacauccuagucaaacaaauaucaacacccaaaggaccaucccucagaguaaugaucaacucaagaucagcaguacuagcacaaaugccaucaaaauucacaauaugcgccaacguuucuuuagacgaacgaucaaaauuagccuacgacguaacaacacccugcgaaauaaaagcaugcucacuaacaugccuaaaaucaaaaaacaugcucacuacaguaaaagaccuaaccaugaaaacacucaacccaacacacgacauaauagcccuaugcgaauuugaaaacauaguaacaucaaaaaaaguaauaaucccaacauacuuaagaucgaucucagucagaaacaaagaccuaaauacacucgaaaacauaacaacaacagaauuuaaaaacgcaauaacaaacgcaaaaauaauaccauacucaggacuacuccuaguaauaacaguaacagacaacaaaggagcauucaaauacauaaaaccacaaucacaauucaucguagaccucggagcauaccuagaaaaagaaucaauauacuacguaacaacaaacuggaaacacaccgccacaagauucgcaauaaaacccauggaagacuaaggacuagugaagggaacacccaaauuuaauucagccuuaagcacaauuaauuaagagugaaacguaauuguacaagcaguuggucacccaccauagggcaugaucaacaccgcaaccuuuccuuuuucccccagugauucugaaaaaccccucuucccuucagcuugcuuagauguuccaaauuuaguaagcuuaaggcggccuacagaagaaaaagaaaaaaaaggccacaaaaguucccucucacuuucaguaaauaaaauaaaagcagcaacagaaauaaagaaauaaaugaaauucaaaaugaaauaaauauuguguugugcagcauuaaaaaaucaauaaaaauuaaaaaugagcaagaucuaaaaaaaaaaaaaaaaaaaaaaaaaaaaaaaaaaaaaaaaaaaaaaaaaaaaaaaaaaaaaaaaugcaucccccccccccccccccccccccccccccccaaaggcucuuuucagagccaccagaauu

SEQ ID NO: 9908 - RNA, 1356 nt, Artificial Sequence
  mRNA product Design f-1 comprising derived and/or modified sequence from HRSV(A2)__P0DOE7.1__M (opt11)
gggagagcggcucggccauuuugucccagucaguccggaggcugcggcugcagaaguaccgccugcggaguaacugcaaagaagcuuaccauggaaaccuacgucaacaaacuacacgaaggcucaaccuacaccgccgccguccaauacaacguccucgaaaaagacgacgaccccgccucccuaaccaucuggguucccauguuccaaucauccaugcccgccgaccuccucauaaaagaacuagccaacgucaacauccuagucaaacaaaucagcacccccaaaggccccucccuccgcguaaugaucaacucccgcuccgccguccuagcccaaaugcccuccaaauuuacaaucugcgccaacgucucccucgacgaacgcucaaaacucgccuacgacgucaccacacccugcgaaaucaaagccugcucccucaccugccucaaaagcaaaaauaugcuaaccaccgucaaagaccuuaccaugaaaacccucaaccccacucacgacaucauagcccucugcgaauuugaaaacaucgucaccuccaaaaaagucaucauccccacauaccuccgcuccaucuccguccgcaacaaagaccucaacacccucgaaaacaucaccaccaccgaauuuaaaaacgccaucaccaacgccaaaaucauccccuacuccggccuccuccucgucaucaccguuaccgacaacaaaggcgccuucaaauacaucaaaccccaaucccaauucaucgucgaccucggagccuaccuugaaaaagaguccaucuacuacgucaccaccaacuggaaacacaccgccacccgauucgccaucaaacccauggaagacuaaggacuagugaagggaacacccaaauuuaauucagccuuaagcacaauuaauuaagagugaaacguaauuguacaagcaguuggucacccaccauagggcaugaucaacaccgcaaccuuuccuuuuucccccagugauucugaaaaaccccucuucccuucagcuugcuuagauguuccaaauuuaguaagcuuaaggcggccuacagaagaaaaagaaaaaaaaggccacaaaaguucccucucacuuucaguaaauaaaauaaaagcagcaacagaaauaaagaaauaaaugaaauucaaaaugaaauaaauauuguguugugcagcauuaaaaaaucaauaaaaauuaaaaaugagcaagaucuaaaaaaaaaaaaaaaaaaaaaaaaaaaaaaaaaaaaaaaaaaaaaaaaaaaaaaaaaaaaaaaaugcaucccccccccccccccccccccccccccccccaaaggcucuuuucagagccaccagaauu

SEQ ID NO: 9909 - RNA, 1136 nt, Artificial Sequence
  mRNA product Design f-2 comprising derived and/or modified sequence from HRSV(A2)__P0DOE7.1__M (wt)
gggagagcggcucggccauuuugucccagucaguccggaggcugcggcugcagaaguaccgccugcggaguaacugcaaagaagcuuaccauggaaacauacgugaacaagcuucacgaaggcuccacauacacagcugcuguucaauacaaugucuuagaaaaagacgaugacccugcaucacuuacaauaugggugcccauguuccaaucaucuaugccagcagauuuacuuauaaaagaacuagcuaaugucaacauacuagugaaacaaauauccacacccaagggaccuucacuaagagucaugauaaacucaagaagugcagugcuagcacaaaugcccagcaaauuuaccauaugcgcuaauguguccuuggaugaaagaagcaaacuagcauaugauguaaccacacccugugaaaucaaggcauguagucuaacaugccuaaaaucaaaaaauauguugacuacaguuaaagaucucacuaugaagacacucaacccuacacaugauauuauugcuuuaugugaauuugaaaacauaguaacaucaaaaaaagucauaauaccaacauaccuaagauccaucagugucagaaauaaagaucugaacacacuugaaaauauaacaaccacugaauucaaaaaugcuaucacaaaugcaaaaaucaucccuuacucaggauuacuauuagucaucacagugacugacaacaaaggagcauucaaauacauaaagccacaaagucaauucauaguagaucuuggagcuuaccuagaaaaagaaaguauauauuauguuaccacaaauuggaagcacacagcuacacgauuugcaaucaaacccauggaagauuaaggacuaguggaagcauuuuccuggcugauuaaaagaaauuacucagcuauggucaucuguuccuguuagaaggcuaugcagcauauuauauacuaugcgcauguuaugaaaugcauaauaaaaaauuuuaaaaaaucuaaaagaucuaaaaaaaaaaaaaaaaaaaaaaaaaaaaaaaaaaaaaaaaaaaaaaaaaaaaaaaaaaaaaaaaugcaucccccccccccccccccccccccccccccccaaaggcucuuuucagagccaccagaauu

SEQ ID NO: 9910 - RNA, 1136 nt, Artificial Sequence
  mRNA product Design f-2 comprising derived and/or modified sequence from HRSV(A2)__P0DOE7.1__M (opt1)
gggagagcggcucggccauuuugucccagucaguccggaggcugcggcugcagaaguaccgccugcggaguaacugcaaagaagcuuaccauggagaccuacgugaacaagcugcacgagggcagcaccuacacggccgccguccaguacaacgugcucgagaaggacgacgaccccgcgucccugaccaucugggugccgauguuccagagcuccaugcccgccgaccugcucaucaaggagcuggccaacgucaacauccuggugaagcagaucagcacccccaaggggcccucccuccgcgugaugaucaacagccgguccgccguccuggcccagaugccgagcaaguucaccaucugcgcgaacgugucccuggacgagcgcagcaagcucgccuacgacgugacgacccccugcgagaucaaggccugcucccugaccugccucaagagcaagaacaugcugaccacggucaaggaccugaccaugaagacccugaaccccacccacgacaucaucgcccucugcgaguucgagaacaucgugacguccaagaaggugaucauccccaccuaccugcggagcaucuccguccgcaacaaggaccugaacacccucgagaacaucaccacgaccgaguucaagaacgcgaucaccaacgccaagaucaucccguacagcggccugcugcucgugaucaccgugacggacaacaagggggccuucaaguacaucaagccccagucccaguucaucgucgaccugggcgccuaccuggagaaggagagcaucuacuacgugaccaccaacuggaagcacaccgccacgcgguucgcgaucaagcccauggaggacugaggacuaguggaagcauuuuccuggcugauuaaaagaaauuacucagcuauggucaucuguuccuguuagaaggcuaugcagcauauuauauacuaugcgcauguuaugaaaugcauaauaaaaaauuuuaaaaaaucuaaaagaucuaaaaaaaaaaaaaaaaaaaaaaaaaaaaaaaaaaaaaaaaaaaaaaaaaaaaaaaaaaaaaaaaugcaucccccccccccccccccccccccccccccccaaaggcucuuuucagagccaccagaauu

SEQ ID NO: 9911 - RNA, 1136 nt, Artificial Sequence
  mRNA product Design f-2 comprising derived and/or modified sequence from HRSV(A2)__P0DOE7.1__M (opt2)
gggagagcggcucggccauuuugucccagucaguccggaggcugcggcugcagaaguaccgccugcggaguaacugcaaagaagcuuaccauggagaccuacgucaacaagcuccacgagggcuccaccuacaccgccgccguccaguacaacguccucgagaaggacgacgaccccgccucccucaccaucuggguccccauguuccaguccuccaugcccgccgaccuccucaucaaggagcucgccaacgucaacauccucgucaagcagaucuccacccccaagggccccucccuccgcgucaugaucaacucccgcuccgccguccucgcccagaugcccuccaaguucaccaucugcgccaacgucucccucgacgagcgcuccaagcucgccuacgacgucaccacccccugcgagaucaaggccugcucccucaccugccucaaguccaagaacaugcucaccaccgucaaggaccucaccaugaagacccucaaccccacccacgacaucaucgcccucugcgaguucgagaacaucgucaccuccaagaaggucaucauccccaccuaccuccgcuccaucuccguccgcaacaaggaccucaacacccucgagaacaucaccaccaccgaguucaagaacgccaucaccaacgccaagaucauccccuacuccggccuccuccucgucaucaccgucaccgacaacaagggcgccuucaaguacaucaagccccagucccaguucaucgucgaccucggcgccuaccucgagaaggaguccaucuacuacgucaccaccaacuggaagcacaccgccacccgcuucgccaucaagcccauggaggacugaggacuaguggaagcauuuuccuggcugauuaaaagaaauuacucagcuauggucaucuguuccuguuagaaggcuaugcagcauauuauauacuaugcgcauguuaugaaaugcauaauaaaaaauuuuaaaaaaucuaaaagaucuaaaaaaaaaaaaaaaaaaaaaaaaaaaaaaaaaaaaaaaaaaaaaaaaaaaaaaaaaaaaaaaaugcaucccccccccccccccccccccccccccccccaaaggcucuuuucagagccaccagaauu

SEQ ID NO: 9912 - RNA, 1136 nt, Artificial Sequence
  mRNA product Design f-2 comprising derived and/or modified sequence from HRSV(A2)__P0DOE7.1__M (opt3)
gggagagcggcucggccauuuugucccagucaguccggaggcugcggcugcagaaguaccgccugcggaguaacugcaaagaagcuuaccauggagaccuacgugaacaagcugcacgaaggcagcacauauacugccgcuguccaguacaauguucucgagaaagacgaugaccccgcaucccuuacgaucugggugccuauguuccaaucuucaaugccagccgaucuguugauuaaggaauuagcgaacguaaauauacuggugaaacagaucaguaccccgaaggggcccagccuaagagucaugauuaacuccaggucugcugugcucgcccagaugccuucgaaauuuacaaucugcgcaaauguuucacuggacgagcggagcaaacuugccuaugaugugacuaccccaugugaaauuaaggcuugcagucugacauguuugaaguccaagaacaugcucaccacugucaaagaccugacaaugaagacccugaaucccacgcaugauaucauagcacucugcgaguucgagaacaucgugacuucuaaaaagguaauuaucccuaccuacuuacgcagcauuuccguucgaaauaaggaccugaacacacuugaaaauaucacuaccacagaguuuaaaaacgccauaaccaaugcuaagauuaucccauauucaggauugcugcuagugauuacggucacugauaacaaaggugccuucaaguacaucaaaccccagagucaauuuaucguggaccucggcgcguaucuggaaaaggagagcauuuacuacgugacaaccaauuggaaacacacugcaacacguuucgccauaaagccuauggaggauugaggacuaguggaagcauuuuccuggcugauuaaaagaaauuacucagcuauggucaucuguuccuguuagaaggcuaugcagcauauuauauacuaugcgcauguuaugaaaugcauaauaaaaaauuuuaaaaaaucuaaaagaucuaaaaaaaaaaaaaaaaaaaaaaaaaaaaaaaaaaaaaaaaaaaaaaaaaaaaaaaaaaaaaaaaugcaucccccccccccccccccccccccccccccccaaaggcucuuuucagagccaccagaauu

SEQ ID NO: 9913 - RNA, 1136 nt, Artificial Sequence
  mRNA product Design f-2 comprising derived and/or modified sequence from HRSV(A2)__P0DOE7.1__M (opt4)
gggagagcggcucggccauuuugucccagucaguccggaggcugcggcugcagaaguaccgccugcggaguaacugcaaagaagcuuaccauggagaccuacgugaacaagcugcacgagggcagcaccuacaccgccgccgugcaguacaacgugcuggagaaggacgacgaccccgccagccugaccaucugggugcccauguuccagagcagcaugcccgccgaccugcugaucaaggagcuggccaacgugaacauccuggugaagcagaucagcacccccaagggccccagccugagagugaugaucaacagcagaagcgccgugcuggcccagaugcccagcaaguucaccaucugcgccaacgugagccuggacgagagaagcaagcuggccuacgacgugaccacccccugcgagaucaaggccugcagccugaccugccugaagagcaagaacaugcugaccaccgugaaggaccugaccaugaagacccugaaccccacccacgacaucaucgcccugugcgaguucgagaacaucgugaccagcaagaaggugaucauccccaccuaccugagaagcaucagcgugagaaacaaggaccugaacacccuggagaacaucaccaccaccgaguucaagaacgccaucaccaacgccaagaucauccccuacagcggccugcugcuggugaucaccgugaccgacaacaagggcgccuucaaguacaucaagccccagagccaguucaucguggaccugggcgccuaccuggagaaggagagcaucuacuacgugaccaccaacuggaagcacaccgccaccagauucgccaucaagcccauggaggacugaggacuaguggaagcauuuuccuggcugauuaaaagaaauuacucagcuauggucaucuguuccuguuagaaggcuaugcagcauauuauauacuaugcgcauguuaugaaaugcauaauaaaaaauuuuaaaaaaucuaaaagaucuaaaaaaaaaaaaaaaaaaaaaaaaaaaaaaaaaaaaaaaaaaaaaaaaaaaaaaaaaaaaaaaaugcaucccccccccccccccccccccccccccccccaaaggcucuuuucagagccaccagaauu

SEQ ID NO: 9914 - RNA, 1136 nt, Artificial Sequence
  mRNA product Design f-2 comprising derived and/or modified sequence from HRSV(A2)__P0DOE7.1__M (opt5)
gggagagcggcucggccauuuugucccagucaguccggaggcugcggcugcagaaguaccgccugcggaguaacugcaaagaagcuuaccauggagaccuacgugaacaagcugcacgaaggcagcacauauacggccgcuguccaguacaauguucucgagaaagacgaugaccccgccucccugaccaucugggugccuauguuccaaucuagcaugccggcggaucuucugauuaaggaacucgcuaacgugaauauccuggucaaacagauuuccacacccaaggggccuucucuuagagugaugaucaacagccgguccgccguucuggcccagaugcccucuaaauuuaccauuugcgcuaaugugagccucgacgagcgcuccaagcuggccuaugaugucacaaccccuugugaaaucaaggcuugcagccugacaugucucaaaucuaagaacaugcugaccacggugaaagaccuuaccaugaagacacugaaucccacccaugauaucauugcccucugcgaguucgagaacaucguuacauccaaaaaggugauuaucccuaccuaccugagaagcauuucuguccggaauaaggaccuuaacacgcuggaaaauaucacaaccacagaguuuaaaaacgcgauuaccaaugccaagaucaucccguauuccggacuccugcuggugauuaccgugacagauaacaaaggcgcuuucaaguacaucaaaccccagagccaauuuauugucgaccucggggccuaucuggaaaaggagucuaucuacuacguuacgaccaauuggaaacacacagcuacccgcuucgccauuaagccuauggaggauugaggacuaguggaagcauuuuccuggcugauuaaaagaaauuacucagcuauggucaucuguuccuguuagaaggcuaugcagcauauuauauacuaugcgcauguuaugaaaugcauaauaaaaaauuuuaaaaaaucuaaaagaucuaaaaaaaaaaaaaaaaaaaaaaaaaaaaaaaaaaaaaaaaaaaaaaaaaaaaaaaaaaaaaaaaugcaucccccccccccccccccccccccccccccccaaaggcucuuuucagagccaccagaauu

SEQ ID NO: 9915 - RNA, 1136 nt, Artificial Sequence
  mRNA product Design f-2 comprising derived and/or modified sequence from HRSV(A2)__P0DOE7.1__M (opt6)
gggagagcggcucggccauuuugucccagucaguccggaggcugcggcugcagaaguaccgccugcggaguaacugcaaagaagcuuaccauggaaacauacguaaacaaacuacacgaaggauccacauacacagcagcaguacaauacaacguacuagaaaaagacgacgacccagcaucuuuaaccauauggguaccaauguuccaaucaucaaugccagcagaccucuuaauaaaagaacuagcaaacguaaacauccuagucaaacaaauaucaacacccaaaggaccaucccucagaguaaugaucaacucaagaucagcaguacuagcacaaaugccaucaaaauucacaauaugcgccaacguuucuuuagacgaacgaucaaaauuagccuacgacguaacaacacccugcgaaauaaaagcaugcucacuaacaugccuaaaaucaaaaaacaugcucacuacaguaaaagaccuaaccaugaaaacacucaacccaacacacgacauaauagcccuaugcgaauuugaaaacauaguaacaucaaaaaaaguaauaaucccaacauacuuaagaucgaucucagucagaaacaaagaccuaaauacacucgaaaacauaacaacaacagaauuuaaaaacgcaauaacaaacgcaaaaauaauaccauacucaggacuacuccuaguaauaacaguaacagacaacaaaggagcauucaaauacauaaaaccacaaucacaauucaucguagaccucggagcauaccuagaaaaagaaucaauauacuacguaacaacaaacuggaaacacaccgccacaagauucgcaauaaaacccauggaagacuaaggacuaguggaagcauuuuccuggcugauuaaaagaaauuacucagcuauggucaucuguuccuguuagaaggcuaugcagcauauuauauacuaugcgcauguuaugaaaugcauaauaaaaaauuuuaaaaaaucuaaaagaucuaaaaaaaaaaaaaaaaaaaaaaaaaaaaaaaaaaaaaaaaaaaaaaaaaaaaaaaaaaaaaaaaugcaucccccccccccccccccccccccccccccccaaaggcucuuuucagagccaccagaauu

SEQ ID NO: 9916 - RNA, 1136 nt, Artificial Sequence
  mRNA product Design f-2 comprising derived and/or modified sequence from HRSV(A2)__P0DOE7.1__M (opt11)
gggagagcggcucggccauuuugucccagucaguccggaggcugcggcugcagaaguaccgccugcggaguaacugcaaagaagcuuaccauggaaaccuacgucaacaaacuacacgaaggcucaaccuacaccgccgccguccaauacaacguccucgaaaaagacgacgaccccgccucccuaaccaucuggguucccauguuccaaucauccaugcccgccgaccuccucauaaaagaacuagccaacgucaacauccuagucaaacaaaucagcacccccaaaggccccucccuccgcguaaugaucaacucccgcuccgccguccuagcccaaaugcccuccaaauuuacaaucugcgccaacgucucccucgacgaacgcucaaaacucgccuacgacgucaccacacccugcgaaaucaaagccugcucccucaccugccucaaaagcaaaaauaugcuaaccaccgucaaagaccuuaccaugaaaacccucaaccccacucacgacaucauagcccucugcgaauuugaaaacaucgucaccuccaaaaaagucaucauccccacauaccuccgcuccaucuccguccgcaacaaagaccucaacacccucgaaaacaucaccaccaccgaauuuaaaaacgccaucaccaacgccaaaaucauccccuacuccggccuccuccucgucaucaccguuaccgacaacaaaggcgccuucaaauacaucaaaccccaaucccaauucaucgucgaccucggagccuaccuugaaaaagaguccaucuacuacgucaccaccaacuggaaacacaccgccacccgauucgccaucaaacccauggaagacuaaggacuaguggaagcauuuuccuggcugauuaaaagaaauuacucagcuauggucaucuguuccuguuagaaggcuaugcagcauauuauauacuaugcgcauguuaugaaaugcauaauaaaaaauuuuaaaaaaucuaaaagaucuaaaaaaaaaaaaaaaaaaaaaaaaaaaaaaaaaaaaaaaaaaaaaaaaaaaaaaaaaaaaaaaaugcaucccccccccccccccccccccccccccccccaaaggcucuuuucagagccaccagaauu

SEQ ID NO: 9917 - RNA, 1127 nt, Artificial Sequence
  mRNA product Design f-3 comprising derived and/or modified sequence from HRSV(A2)__P0DOE7.1__M (wt)
gggagagucccgcagucggcguccagcggcucugcuuguucgugugugugucguugcaggccuuauucaagcuuaccauggaaacauacgugaacaagcuucacgaaggcuccacauacacagcugcuguucaauacaaugucuuagaaaaagacgaugacccugcaucacuuacaauaugggugcccauguuccaaucaucuaugccagcagauuuacuuauaaaagaacuagcuaaugucaacauacuagugaaacaaauauccacacccaagggaccuucacuaagagucaugauaaacucaagaagugcagugcuagcacaaaugcccagcaaauuuaccauaugcgcuaauguguccuuggaugaaagaagcaaacuagcauaugauguaaccacacccugugaaaucaaggcauguagucuaacaugccuaaaaucaaaaaauauguugacuacaguuaaagaucucacuaugaagacacucaacccuacacaugauauuauugcuuuaugugaauuugaaaacauaguaacaucaaaaaaagucauaauaccaacauaccuaagauccaucagugucagaaauaaagaucugaacacacuugaaaauauaacaaccacugaauucaaaaaugcuaucacaaaugcaaaaaucaucccuuacucaggauuacuauuagucaucacagugacugacaacaaaggagcauucaaauacauaaagccacaaagucaauucauaguagaucuuggagcuuaccuagaaaaagaaaguauauauuauguuaccacaaauuggaagcacacagcuacacgauuugcaaucaaacccauggaagauuaaggacuaguacuggcugcaucucccuuuccucuguccuccauccuucucccaggauggugaagggggaccugguacccagugauccccaccccaggauccuaaaucaugacuuaccugcuaauaaaaacucauuggaaaagugagaagaucuaaaaaaaaaaaaaaaaaaaaaaaaaaaaaaaaaaaaaaaaaaaaaaaaaaaaaaaaaaaaaaaaugcaucccccccccccccccccccccccccccccccaaaggcucuuuucagagccaccagaauu

SEQ ID NO: 9918 - RNA, 1127 nt, Artificial Sequence
  mRNA product Design f-3 comprising derived and/or modified sequence from HRSV(A2)__P0DOE7.1__M (opt1)
gggagagucccgcagucggcguccagcggcucugcuuguucgugugugugucguugcaggccuuauucaagcuuaccauggagaccuacgugaacaagcugcacgagggcagcaccuacacggccgccguccaguacaacgugcucgagaaggacgacgaccccgcgucccugaccaucugggugccgauguuccagagcuccaugcccgccgaccugcucaucaaggagcuggccaacgucaacauccuggugaagcagaucagcacccccaaggggcccucccuccgcgugaugaucaacagccgguccgccguccuggcccagaugccgagcaaguucaccaucugcgcgaacgugucccuggacgagcgcagcaagcucgccuacgacgugacgacccccugcgagaucaaggccugcucccugaccugccucaagagcaagaacaugcugaccacggucaaggaccugaccaugaagacccugaaccccacccacgacaucaucgcccucugcgaguucgagaacaucgugacguccaagaaggugaucauccccaccuaccugcggagcaucuccguccgcaacaaggaccugaacacccucgagaacaucaccacgaccgaguucaagaacgcgaucaccaacgccaagaucaucccguacagcggccugcugcucgugaucaccgugacggacaacaagggggccuucaaguacaucaagccccagucccaguucaucgucgaccugggcgccuaccuggagaaggagagcaucuacuacgugaccaccaacuggaagcacaccgccacgcgguucgcgaucaagcccauggaggacugaggacuaguacuggcugcaucucccuuuccucuguccuccauccuucucccaggauggugaagggggaccugguacccagugauccccaccccaggauccuaaaucaugacuuaccugcuaauaaaaacucauuggaaaagugagaagaucuaaaaaaaaaaaaaaaaaaaaaaaaaaaaaaaaaaaaaaaaaaaaaaaaaaaaaaaaaaaaaaaaugcaucccccccccccccccccccccccccccccccaaaggcucuuuucagagccaccagaauu

SEQ ID NO: 9919 - RNA, 1127 nt, Artificial Sequence
  mRNA product Design f-3 comprising derived and/or modified sequence from HRSV(A2)__P0DOE7.1__M (opt2)
gggagagucccgcagucggcguccagcggcucugcuuguucgugugugugucguugcaggccuuauucaagcuuaccauggagaccuacgucaacaagcuccacgagggcuccaccuacaccgccgccguccaguacaacguccucgagaaggacgacgaccccgccucccucaccaucuggguccccauguuccaguccuccaugcccgccgaccuccucaucaaggagcucgccaacgucaacauccucgucaagcagaucuccacccccaagggccccucccuccgcgucaugaucaacucccgcuccgccguccucgcccagaugcccuccaaguucaccaucugcgccaacgucucccucgacgagcgcuccaagcucgccuacgacgucaccacccccugcgagaucaaggccugcucccucaccugccucaaguccaagaacaugcucaccaccgucaaggaccucaccaugaagacccucaaccccacccacgacaucaucgcccucugcgaguucgagaacaucgucaccuccaagaaggucaucauccccaccuaccuccgcuccaucuccguccgcaacaaggaccucaacacccucgagaacaucaccaccaccgaguucaagaacgccaucaccaacgccaagaucauccccuacuccggccuccuccucgucaucaccgucaccgacaacaagggcgccuucaaguacaucaagccccagucccaguucaucgucgaccucggcgccuaccucgagaaggaguccaucuacuacgucaccaccaacuggaagcacaccgccacccgcuucgccaucaagcccauggaggacugaggacuaguacuggcugcaucucccuuuccucuguccuccauccuucucccaggauggugaagggggaccugguacccagugauccccaccccaggauccuaaaucaugacuuaccugcuaauaaaaacucauuggaaaagugagaagaucuaaaaaaaaaaaaaaaaaaaaaaaaaaaaaaaaaaaaaaaaaaaaaaaaaaaaaaaaaaaaaaaaugcaucccccccccccccccccccccccccccccccaaaggcucuuuucagagccaccagaauu

SEQ ID NO: 9920 - RNA, 1127 nt, Artificial Sequence
  mRNA product Design f-3 comprising derived and/or modified sequence from HRSV(A2)__P0DOE7.1__M (opt3)
gggagagucccgcagucggcguccagcggcucugcuuguucgugugugugucguugcaggccuuauucaagcuuaccauggagaccuacgugaacaagcugcacgaaggcagcacauauacugccgcuguccaguacaauguucucgagaaagacgaugaccccgcaucccuuacgaucugggugccuauguuccaaucuucaaugccagccgaucuguugauuaaggaauuagcgaacguaaauauacuggugaaacagaucaguaccccgaaggggcccagccuaagagucaugauuaacuccaggucugcugugcucgcccagaugccuucgaaauuuacaaucugcgcaaauguuucacuggacgagcggagcaaacuugccuaugaugugacuaccccaugugaaauuaaggcuugcagucugacauguuugaaguccaagaacaugcucaccacugucaaagaccugacaaugaagacccugaaucccacgcaugauaucauagcacucugcgaguucgagaacaucgugacuucuaaaaagguaauuaucccuaccuacuuacgcagcauuuccguucgaaauaaggaccugaacacacuugaaaauaucacuaccacagaguuuaaaaacgccauaaccaaugcuaagauuaucccauauucaggauugcugcuagugauuacggucacugauaacaaaggugccuucaaguacaucaaaccccagagucaauuuaucguggaccucggcgcguaucuggaaaaggagagcauuuacuacgugacaaccaauuggaaacacacugcaacacguuucgccauaaagccuauggaggauugaggacuaguacuggcugcaucucccuuuccucuguccuccauccuucucccaggauggugaagggggaccugguacccagugauccccaccccaggauccuaaaucaugacuuaccugcuaauaaaaacucauuggaaaagugagaagaucuaaaaaaaaaaaaaaaaaaaaaaaaaaaaaaaaaaaaaaaaaaaaaaaaaaaaaaaaaaaaaaaaugcaucccccccccccccccccccccccccccccccaaaggcucuuuucagagccaccagaauu

SEQ ID NO: 9921 - RNA, 1127 nt, Artificial Sequence
  mRNA product Design f-3 comprising derived and/or modified sequence from HRSV(A2)__P0DOE7.1__M (opt4)
gggagagucccgcagucggcguccagcggcucugcuuguucgugugugugucguugcaggccuuauucaagcuuaccauggagaccuacgugaacaagcugcacgagggcagcaccuacaccgccgccgugcaguacaacgugcuggagaaggacgacgaccccgccagccugaccaucugggugcccauguuccagagcagcaugcccgccgaccugcugaucaaggagcuggccaacgugaacauccuggugaagcagaucagcacccccaagggccccagccugagagugaugaucaacagcagaagcgccgugcuggcccagaugcccagcaaguucaccaucugcgccaacgugagccuggacgagagaagcaagcuggccuacgacgugaccacccccugcgagaucaaggccugcagccugaccugccugaagagcaagaacaugcugaccaccgugaaggaccugaccaugaagacccugaaccccacccacgacaucaucgcccugugcgaguucgagaacaucgugaccagcaagaaggugaucauccccaccuaccugagaagcaucagcgugagaaacaaggaccugaacacccuggagaacaucaccaccaccgaguucaagaacgccaucaccaacgccaagaucauccccuacagcggccugcugcuggugaucaccgugaccgacaacaagggcgccuucaaguacaucaagccccagagccaguucaucguggaccugggcgccuaccuggagaaggagagcaucuacuacgugaccaccaacuggaagcacaccgccaccagauucgccaucaagcccauggaggacugaggacuaguacuggcugcaucucccuuuccucuguccuccauccuucucccaggauggugaagggggaccugguacccagugauccccaccccaggauccuaaaucaugacuuaccugcuaauaaaaacucauuggaaaagugagaagaucuaaaaaaaaaaaaaaaaaaaaaaaaaaaaaaaaaaaaaaaaaaaaaaaaaaaaaaaaaaaaaaaaugcaucccccccccccccccccccccccccccccccaaaggcucuuuucagagccaccagaauu

SEQ ID NO: 9922 - RNA, 1127 nt, Artificial Sequence
  mRNA product Design f-3 comprising derived and/or modified sequence from HRSV(A2)__P0DOE7.1__M (opt5)
gggagagucccgcagucggcguccagcggcucugcuuguucgugugugugucguugcaggccuuauucaagcuuaccauggagaccuacgugaacaagcugcacgaaggcagcacauauacggccgcuguccaguacaauguucucgagaaagacgaugaccccgccucccugaccaucugggugccuauguuccaaucuagcaugccggcggaucuucugauuaaggaacucgcuaacgugaauauccuggucaaacagauuuccacacccaaggggccuucucuuagagugaugaucaacagccgguccgccguucuggcccagaugcccucuaaauuuaccauuugcgcuaaugugagccucgacgagcgcuccaagcuggccuaugaugucacaaccccuugugaaaucaaggcuugcagccugacaugucucaaaucuaagaacaugcugaccacggugaaagaccuuaccaugaagacacugaaucccacccaugauaucauugcccucugcgaguucgagaacaucguuacauccaaaaaggugauuaucccuaccuaccugagaagcauuucuguccggaauaaggaccuuaacacgcuggaaaauaucacaaccacagaguuuaaaaacgcgauuaccaaugccaagaucaucccguauuccggacuccugcuggugauuaccgugacagauaacaaaggcgcuuucaaguacaucaaaccccagagccaauuuauugucgaccucggggccuaucuggaaaaggagucuaucuacuacguuacgaccaauuggaaacacacagcuacccgcuucgccauuaagccuauggaggauugaggacuaguacuggcugcaucucccuuuccucuguccuccauccuucucccaggauggugaagggggaccugguacccagugauccccaccccaggauccuaaaucaugacuuaccugcuaauaaaaacucauuggaaaagugagaagaucuaaaaaaaaaaaaaaaaaaaaaaaaaaaaaaaaaaaaaaaaaaaaaaaaaaaaaaaaaaaaaaaaugcaucccccccccccccccccccccccccccccccaaaggcucuuuucagagccaccagaauu

SEQ ID NO: 9923 - RNA, 1127 nt, Artificial Sequence
  mRNA product Design f-3 comprising derived and/or modified sequence from HRSV(A2)__P0DOE7.1__M (opt6)
gggagagucccgcagucggcguccagcggcucugcuuguucgugugugugucguugcaggccuuauucaagcuuaccauggaaacauacguaaacaaacuacacgaaggauccacauacacagcagcaguacaauacaacguacuagaaaaagacgacgacccagcaucuuuaaccauauggguaccaauguuccaaucaucaaugccagcagaccucuuaauaaaagaacuagcaaacguaaacauccuagucaaacaaauaucaacacccaaaggaccaucccucagaguaaugaucaacucaagaucagcaguacuagcacaaaugccaucaaaauucacaauaugcgccaacguuucuuuagacgaacgaucaaaauuagccuacgacguaacaacacccugcgaaauaaaagcaugcucacuaacaugccuaaaaucaaaaaacaugcucacuacaguaaaagaccuaaccaugaaaacacucaacccaacacacgacauaauagcccuaugcgaauuugaaaacauaguaacaucaaaaaaaguaauaaucccaacauacuuaagaucgaucucagucagaaacaaagaccuaaauacacucgaaaacauaacaacaacagaauuuaaaaacgcaauaacaaacgcaaaaauaauaccauacucaggacuacuccuaguaauaacaguaacagacaacaaaggagcauucaaauacauaaaaccacaaucacaauucaucguagaccucggagcauaccuagaaaaagaaucaauauacuacguaacaacaaacuggaaacacaccgccacaagauucgcaauaaaacccauggaagacuaaggacuaguacuggcugcaucucccuuuccucuguccuccauccuucucccaggauggugaagggggaccugguacccagugauccccaccccaggauccuaaaucaugacuuaccugcuaauaaaaacucauuggaaaagugagaagaucuaaaaaaaaaaaaaaaaaaaaaaaaaaaaaaaaaaaaaaaaaaaaaaaaaaaaaaaaaaaaaaaaugcaucccccccccccccccccccccccccccccccaaaggcucuuuucagagccaccagaauu

SEQ ID NO: 9924 - RNA, 1127 nt, Artificial Sequence
  mRNA product Design f-3 comprising derived and/or modified sequence from HRSV(A2)__P0DOE7.1__M (opt11)
gggagagucccgcagucggcguccagcggcucugcuuguucgugugugugucguugcaggccuuauucaagcuuaccauggaaaccuacgucaacaaacuacacgaaggcucaaccuacaccgccgccguccaauacaacguccucgaaaaagacgacgaccccgccucccuaaccaucuggguucccauguuccaaucauccaugcccgccgaccuccucauaaaagaacuagccaacgucaacauccuagucaaacaaaucagcacccccaaaggccccucccuccgcguaaugaucaacucccgcuccgccguccuagcccaaaugcccuccaaauuuacaaucugcgccaacgucucccucgacgaacgcucaaaacucgccuacgacgucaccacacccugcgaaaucaaagccugcucccucaccugccucaaaagcaaaaauaugcuaaccaccgucaaagaccuuaccaugaaaacccucaaccccacucacgacaucauagcccucugcgaauuugaaaacaucgucaccuccaaaaaagucaucauccccacauaccuccgcuccaucuccguccgcaacaaagaccucaacacccucgaaaacaucaccaccaccgaauuuaaaaacgccaucaccaacgccaaaaucauccccuacuccggccuccuccucgucaucaccguuaccgacaacaaaggcgccuucaaauacaucaaaccccaaucccaauucaucgucgaccucggagccuaccuugaaaaagaguccaucuacuacgucaccaccaacuggaaacacaccgccacccgauucgccaucaaacccauggaagacuaaggacuaguacuggcugcaucucccuuuccucuguccuccauccuucucccaggauggugaagggggaccugguacccagugauccccaccccaggauccuaaaucaugacuuaccugcuaauaaaaacucauuggaaaagugagaagaucuaaaaaaaaaaaaaaaaaaaaaaaaaaaaaaaaaaaaaaaaaaaaaaaaaaaaaaaaaaaaaaaaugcaucccccccccccccccccccccccccccccccaaaggcucuuuucagagccaccagaauu

SEQ ID NO: 9925 - RNA, 1343 nt, Artificial Sequence
  mRNA product Design f-4 comprising derived and/or modified sequence from HRSV(A2)__P0DOE7.1__M (wt)
gggagagucccgcagucggcguccagcggcucugcuuguucgugugugugucguugcaggccuuauucaagcuuaccauggaaacauacgugaacaagcuucacgaaggcuccacauacacagcugcuguucaauacaaugucuuagaaaaagacgaugacccugcaucacuuacaauaugggugcccauguuccaaucaucuaugccagcagauuuacuuauaaaagaacuagcuaaugucaacauacuagugaaacaaauauccacacccaagggaccuucacuaagagucaugauaaacucaagaagugcagugcuagcacaaaugcccagcaaauuuaccauaugcgcuaauguguccuuggaugaaagaagcaaacuagcauaugauguaaccacacccugugaaaucaaggcauguagucuaacaugccuaaaaucaaaaaauauguugacuacaguuaaagaucucacuaugaagacacucaacccuacacaugauauuauugcuuuaugugaauuugaaaacauaguaacaucaaaaaaagucauaauaccaacauaccuaagauccaucagugucagaaauaaagaucugaacacacuugaaaauauaacaaccacugaauucaaaaaugcuaucacaaaugcaaaaaucaucccuuacucaggauuacuauuagucaucacagugacugacaacaaaggagcauucaaauacauaaagccacaaagucaauucauaguagaucuuggagcuuaccuagaaaaagaaaguauauauuauguuaccacaaauuggaagcacacagcuacacgauuugcaaucaaacccauggaagauuaaggacuagugaagggaacacccaaauuuaauucagccuuaagcacaauuaauuaagagugaaacguaauuguacaagcaguuggucacccaccauagggcaugaucaacaccgcaaccuuuccuuuuucccccagugauucugaaaaaccccucuucccuucagcuugcuuagauguuccaaauuuaguaagcuuaaggcggccuacagaagaaaaagaaaaaaaaggccacaaaaguucccucucacuuucaguaaauaaaauaaaagcagcaacagaaauaaagaaauaaaugaaauucaaaaugaaauaaauauuguguugugcagcauuaaaaaaucaauaaaaauuaaaaaugagcaagaucuaaaaaaaaaaaaaaaaaaaaaaaaaaaaaaaaaaaaaaaaaaaaaaaaaaaaaaaaaaaaaaaaugcaucccccccccccccccccccccccccccccccaaaggcucuuuucagagccaccagaauu

SEQ ID NO: 9926 - RNA, 1343 nt, Artificial Sequence
  mRNA product Design f-4 comprising derived and/or modified sequence from HRSV(A2)__P0DOE7.1__M (opt1)
gggagagucccgcagucggcguccagcggcucugcuuguucgugugugugucguugcaggccuuauucaagcuuaccauggagaccuacgugaacaagcugcacgagggcagcaccuacacggccgccguccaguacaacgugcucgagaaggacgacgaccccgcgucccugaccaucugggugccgauguuccagagcuccaugcccgccgaccugcucaucaaggagcuggccaacgucaacauccuggugaagcagaucagcacccccaaggggcccucccuccgcgugaugaucaacagccgguccgccguccuggcccagaugccgagcaaguucaccaucugcgcgaacgugucccuggacgagcgcagcaagcucgccuacgacgugacgacccccugcgagaucaaggccugcucccugaccugccucaagagcaagaacaugcugaccacggucaaggaccugaccaugaagacccugaaccccacccacgacaucaucgcccucugcgaguucgagaacaucgugacguccaagaaggugaucauccccaccuaccugcggagcaucuccguccgcaacaaggaccugaacacccucgagaacaucaccacgaccgaguucaagaacgcgaucaccaacgccaagaucaucccguacagcggccugcugcucgugaucaccgugacggacaacaagggggccuucaaguacaucaagccccagucccaguucaucgucgaccugggcgccuaccuggagaaggagagcaucuacuacgugaccaccaacuggaagcacaccgccacgcgguucgcgaucaagcccauggaggacugaggacuagugaagggaacacccaaauuuaauucagccuuaagcacaauuaauuaagagugaaacguaauuguacaagcaguuggucacccaccauagggcaugaucaacaccgcaaccuuuccuuuuucccccagugauucugaaaaaccccucuucccuucagcuugcuuagauguuccaaauuuaguaagcuuaaggcggccuacagaagaaaaagaaaaaaaaggccacaaaaguucccucucacuuucaguaaauaaaauaaaagcagcaacagaaauaaagaaauaaaugaaauucaaaaugaaauaaauauuguguugugcagcauuaaaaaaucaauaaaaauuaaaaaugagcaagaucuaaaaaaaaaaaaaaaaaaaaaaaaaaaaaaaaaaaaaaaaaaaaaaaaaaaaaaaaaaaaaaaaugcaucccccccccccccccccccccccccccccccaaaggcucuuuucagagccaccagaauu

SEQ ID NO: 9927 - RNA, 1343 nt, Artificial Sequence
  mRNA product Design f-4 comprising derived and/or modified sequence from HRSV(A2)__P0DOE7.1__M (opt2)
gggagagucccgcagucggcguccagcggcucugcuuguucgugugugugucguugcaggccuuauucaagcuuaccauggagaccuacgucaacaagcuccacgagggcuccaccuacaccgccgccguccaguacaacguccucgagaaggacgacgaccccgccucccucaccaucuggguccccauguuccaguccuccaugcccgccgaccuccucaucaaggagcucgccaacgucaacauccucgucaagcagaucuccacccccaagggccccucccuccgcgucaugaucaacucccgcuccgccguccucgcccagaugcccuccaaguucaccaucugcgccaacgucucccucgacgagcgcuccaagcucgccuacgacgucaccacccccugcgagaucaaggccugcucccucaccugccucaaguccaagaacaugcucaccaccgucaaggaccucaccaugaagacccucaaccccacccacgacaucaucgcccucugcgaguucgagaacaucgucaccuccaagaaggucaucauccccaccuaccuccgcuccaucuccguccgcaacaaggaccucaacacccucgagaacaucaccaccaccgaguucaagaacgccaucaccaacgccaagaucauccccuacuccggccuccuccucgucaucaccgucaccgacaacaagggcgccuucaaguacaucaagccccagucccaguucaucgucgaccucggcgccuaccucgagaaggaguccaucuacuacgucaccaccaacuggaagcacaccgccacccgcuucgccaucaagcccauggaggacugaggacuagugaagggaacacccaaauuuaauucagccuuaagcacaauuaauuaagagugaaacguaauuguacaagcaguuggucacccaccauagggcaugaucaacaccgcaaccuuuccuuuuucccccagugauucugaaaaaccccucuucccuucagcuugcuuagauguuccaaauuuaguaagcuuaaggcggccuacagaagaaaaagaaaaaaaaggccacaaaaguucccucucacuuucaguaaauaaaauaaaagcagcaacagaaauaaagaaauaaaugaaauucaaaaugaaauaaauauuguguugugcagcauuaaaaaaucaauaaaaauuaaaaaugagcaagaucuaaaaaaaaaaaaaaaaaaaaaaaaaaaaaaaaaaaaaaaaaaaaaaaaaaaaaaaaaaaaaaaaugcaucccccccccccccccccccccccccccccccaaaggcucuuuucagagccaccagaauu

SEQ ID NO: 9928 - RNA, 1343 nt, Artificial Sequence
  mRNA product Design f-4 comprising derived and/or modified sequence from HRSV(A2)__P0DOE7.1__M (opt3)
gggagagucccgcagucggcguccagcggcucugcuuguucgugugugugucguugcaggccuuauucaagcuuaccauggagaccuacgugaacaagcugcacgaaggcagcacauauacugccgcuguccaguacaauguucucgagaaagacgaugaccccgcaucccuuacgaucugggugccuauguuccaaucuucaaugccagccgaucuguugauuaaggaauuagcgaacguaaauauacuggugaaacagaucaguaccccgaaggggcccagccuaagagucaugauuaacuccaggucugcugugcucgcccagaugccuucgaaauuuacaaucugcgcaaauguuucacuggacgagcggagcaaacuugccuaugaugugacuaccccaugugaaauuaaggcuugcagucugacauguuugaaguccaagaacaugcucaccacugucaaagaccugacaaugaagacccugaaucccacgcaugauaucauagcacucugcgaguucgagaacaucgugacuucuaaaaagguaauuaucccuaccuacuuacgcagcauuuccguucgaaauaaggaccugaacacacuugaaaauaucacuaccacagaguuuaaaaacgccauaaccaaugcuaagauuaucccauauucaggauugcugcuagugauuacggucacugauaacaaaggugccuucaaguacaucaaaccccagagucaauuuaucguggaccucggcgcguaucuggaaaaggagagcauuuacuacgugacaaccaauuggaaacacacugcaacacguuucgccauaaagccuauggaggauugaggacuagugaagggaacacccaaauuuaauucagccuuaagcacaauuaauuaagagugaaacguaauuguacaagcaguuggucacccaccauagggcaugaucaacaccgcaaccuuuccuuuuucccccagugauucugaaaaaccccucuucccuucagcuugcuuagauguuccaaauuuaguaagcuuaaggcggccuacagaagaaaaagaaaaaaaaggccacaaaaguucccucucacuuucaguaaauaaaauaaaagcagcaacagaaauaaagaaauaaaugaaauucaaaaugaaauaaauauuguguugugcagcauuaaaaaaucaauaaaaauuaaaaaugagcaagaucuaaaaaaaaaaaaaaaaaaaaaaaaaaaaaaaaaaaaaaaaaaaaaaaaaaaaaaaaaaaaaaaaugcaucccccccccccccccccccccccccccccccaaaggcucuuuucagagccaccagaauu

SEQ ID NO: 9929 - RNA, 1343 nt, Artificial Sequence
  mRNA product Design f-4 comprising derived and/or modified sequence from HRSV(A2)__P0DOE7.1__M (opt4)
gggagagucccgcagucggcguccagcggcucugcuuguucgugugugugucguugcaggccuuauucaagcuuaccauggagaccuacgugaacaagcugcacgagggcagcaccuacaccgccgccgugcaguacaacgugcuggagaaggacgacgaccccgccagccugaccaucugggugcccauguuccagagcagcaugcccgccgaccugcugaucaaggagcuggccaacgugaacauccuggugaagcagaucagcacccccaagggccccagccugagagugaugaucaacagcagaagcgccgugcuggcccagaugcccagcaaguucaccaucugcgccaacgugagccuggacgagagaagcaagcuggccuacgacgugaccacccccugcgagaucaaggccugcagccugaccugccugaagagcaagaacaugcugaccaccgugaaggaccugaccaugaagacccugaaccccacccacgacaucaucgcccugugcgaguucgagaacaucgugaccagcaagaaggugaucauccccaccuaccugagaagcaucagcgugagaaacaaggaccugaacacccuggagaacaucaccaccaccgaguucaagaacgccaucaccaacgccaagaucauccccuacagcggccugcugcuggugaucaccgugaccgacaacaagggcgccuucaaguacaucaagccccagagccaguucaucguggaccugggcgccuaccuggagaaggagagcaucuacuacgugaccaccaacuggaagcacaccgccaccagauucgccaucaagcccauggaggacugaggacuagugaagggaacacccaaauuuaauucagccuuaagcacaauuaauuaagagugaaacguaauuguacaagcaguuggucacccaccauagggcaugaucaacaccgcaaccuuuccuuuuucccccagugauucugaaaaaccccucuucccuucagcuugcuuagauguuccaaauuuaguaagcuuaaggcggccuacagaagaaaaagaaaaaaaaggccacaaaaguucccucucacuuucaguaaauaaaauaaaagcagcaacagaaauaaagaaauaaaugaaauucaaaaugaaauaaauauuguguugugcagcauuaaaaaaucaauaaaaauuaaaaaugagcaagaucuaaaaaaaaaaaaaaaaaaaaaaaaaaaaaaaaaaaaaaaaaaaaaaaaaaaaaaaaaaaaaaaaugcaucccccccccccccccccccccccccccccccaaaggcucuuuucagagccaccagaauu

SEQ ID NO: 9930 - RNA, 1343 nt, Artificial Sequence
  mRNA product Design f-4 comprising derived and/or modified sequence from HRSV(A2)__P0DOE7.1__M (opt5)
gggagagucccgcagucggcguccagcggcucugcuuguucgugugugugucguugcaggccuuauucaagcuuaccauggagaccuacgugaacaagcugcacgaaggcagcacauauacggccgcuguccaguacaauguucucgagaaagacgaugaccccgccucccugaccaucugggugccuauguuccaaucuagcaugccggcggaucuucugauuaaggaacucgcuaacgugaauauccuggucaaacagauuuccacacccaaggggccuucucuuagagugaugaucaacagccgguccgccguucuggcccagaugcccucuaaauuuaccauuugcgcuaaugugagccucgacgagcgcuccaagcuggccuaugaugucacaaccccuugugaaaucaaggcuugcagccugacaugucucaaaucuaagaacaugcugaccacggugaaagaccuuaccaugaagacacugaaucccacccaugauaucauugcccucugcgaguucgagaacaucguuacauccaaaaaggugauuaucccuaccuaccugagaagcauuucuguccggaauaaggaccuuaacacgcuggaaaauaucacaaccacagaguuuaaaaacgcgauuaccaaugccaagaucaucccguauuccggacuccugcuggugauuaccgugacagauaacaaaggcgcuuucaaguacaucaaaccccagagccaauuuauugucgaccucggggccuaucuggaaaaggagucuaucuacuacguuacgaccaauuggaaacacacagcuacccgcuucgccauuaagccuauggaggauugaggacuagugaagggaacacccaaauuuaauucagccuuaagcacaauuaauuaagagugaaacguaauuguacaagcaguuggucacccaccauagggcaugaucaacaccgcaaccuuuccuuuuucccccagugauucugaaaaaccccucuucccuucagcuugcuuagauguuccaaauuuaguaagcuuaaggcggccuacagaagaaaaagaaaaaaaaggccacaaaaguucccucucacuuucaguaaauaaaauaaaagcagcaacagaaauaaagaaauaaaugaaauucaaaaugaaauaaauauuguguugugcagcauuaaaaaaucaauaaaaauuaaaaaugagcaagaucuaaaaaaaaaaaaaaaaaaaaaaaaaaaaaaaaaaaaaaaaaaaaaaaaaaaaaaaaaaaaaaaaugcaucccccccccccccccccccccccccccccccaaaggcucuuuucagagccaccagaauu

SEQ ID NO: 9931 - RNA, 1343 nt, Artificial Sequence
  mRNA product Design f-4 comprising derived and/or modified sequence from HRSV(A2)__P0DOE7.1__M (opt6)
gggagagucccgcagucggcguccagcggcucugcuuguucgugugugugucguugcaggccuuauucaagcuuaccauggaaacauacguaaacaaacuacacgaaggauccacauacacagcagcaguacaauacaacguacuagaaaaagacgacgacccagcaucuuuaaccauauggguaccaauguuccaaucaucaaugccagcagaccucuuaauaaaagaacuagcaaacguaaacauccuagucaaacaaauaucaacacccaaaggaccaucccucagaguaaugaucaacucaagaucagcaguacuagcacaaaugccaucaaaauucacaauaugcgccaacguuucuuuagacgaacgaucaaaauuagccuacgacguaacaacacccugcgaaauaaaagcaugcucacuaacaugccuaaaaucaaaaaacaugcucacuacaguaaaagaccuaaccaugaaaacacucaacccaacacacgacauaauagcccuaugcgaauuugaaaacauaguaacaucaaaaaaaguaauaaucccaacauacuuaagaucgaucucagucagaaacaaagaccuaaauacacucgaaaacauaacaacaacagaauuuaaaaacgcaauaacaaacgcaaaaauaauaccauacucaggacuacuccuaguaauaacaguaacagacaacaaaggagcauucaaauacauaaaaccacaaucacaauucaucguagaccucggagcauaccuagaaaaagaaucaauauacuacguaacaacaaacuggaaacacaccgccacaagauucgcaauaaaacccauggaagacuaaggacuagugaagggaacacccaaauuuaauucagccuuaagcacaauuaauuaagagugaaacguaauuguacaagcaguuggucacccaccauagggcaugaucaacaccgcaaccuuuccuuuuucccccagugauucugaaaaaccccucuucccuucagcuugcuuagauguuccaaauuuaguaagcuuaaggcggccuacagaagaaaaagaaaaaaaaggccacaaaaguucccucucacuuucaguaaauaaaauaaaagcagcaacagaaauaaagaaauaaaugaaauucaaaaugaaauaaauauuguguugugcagcauuaaaaaaucaauaaaaauuaaaaaugagcaagaucuaaaaaaaaaaaaaaaaaaaaaaaaaaaaaaaaaaaaaaaaaaaaaaaaaaaaaaaaaaaaaaaaugcaucccccccccccccccccccccccccccccccaaaggcucuuuucagagccaccagaauu

SEQ ID NO: 9932 - RNA, 1343 nt, Artificial Sequence
  mRNA product Design f-4 comprising derived and/or modified sequence from HRSV(A2)__P0DOE7.1__M (opt11)
gggagagucccgcagucggcguccagcggcucugcuuguucgugugugugucguugcaggccuuauucaagcuuaccauggaaaccuacgucaacaaacuacacgaaggcucaaccuacaccgccgccguccaauacaacguccucgaaaaagacgacgaccccgccucccuaaccaucuggguucccauguuccaaucauccaugcccgccgaccuccucauaaaagaacuagccaacgucaacauccuagucaaacaaaucagcacccccaaaggccccucccuccgcguaaugaucaacucccgcuccgccguccuagcccaaaugcccuccaaauuuacaaucugcgccaacgucucccucgacgaacgcucaaaacucgccuacgacgucaccacacccugcgaaaucaaagccugcucccucaccugccucaaaagcaaaaauaugcuaaccaccgucaaagaccuuaccaugaaaacccucaaccccacucacgacaucauagcccucugcgaauuugaaaacaucgucaccuccaaaaaagucaucauccccacauaccuccgcuccaucuccguccgcaacaaagaccucaacacccucgaaaacaucaccaccaccgaauuuaaaaacgccaucaccaacgccaaaaucauccccuacuccggccuccuccucgucaucaccguuaccgacaacaaaggcgccuucaaauacaucaaaccccaaucccaauucaucgucgaccucggagccuaccuugaaaaagaguccaucuacuacgucaccaccaacuggaaacacaccgccacccgauucgccaucaaacccauggaagacuaaggacuagugaagggaacacccaaauuuaauucagccuuaagcacaauuaauuaagagugaaacguaauuguacaagcaguuggucacccaccauagggcaugaucaacaccgcaaccuuuccuuuuucccccagugauucugaaaaaccccucuucccuucagcuugcuuagauguuccaaauuuaguaagcuuaaggcggccuacagaagaaaaagaaaaaaaaggccacaaaaguucccucucacuuucaguaaauaaaauaaaagcagcaacagaaauaaagaaauaaaugaaauucaaaaugaaauaaauauuguguugugcagcauuaaaaaaucaauaaaaauuaaaaaugagcaagaucuaaaaaaaaaaaaaaaaaaaaaaaaaaaaaaaaaaaaaaaaaaaaaaaaaaaaaaaaaaaaaaaaugcaucccccccccccccccccccccccccccccccaaaggcucuuuucagagccaccagaauu

SEQ ID NO: 9933 - RNA, 1119 nt, Artificial Sequence
  mRNA product Design f-5 comprising derived and/or modified sequence from HRSV(A2)__P0DOE7.1__M (wt)
gggagacuuucccauucuguagcagaauuugguguugccuguggucuuggucccgcggagaagcuuaccauggaaacauacgugaacaagcuucacgaaggcuccacauacacagcugcuguucaauacaaugucuuagaaaaagacgaugacccugcaucacuuacaauaugggugcccauguuccaaucaucuaugccagcagauuuacuuauaaaagaacuagcuaaugucaacauacuagugaaacaaauauccacacccaagggaccuucacuaagagucaugauaaacucaagaagugcagugcuagcacaaaugcccagcaaauuuaccauaugcgcuaauguguccuuggaugaaagaagcaaacuagcauaugauguaaccacacccugugaaaucaaggcauguagucuaacaugccuaaaaucaaaaaauauguugacuacaguuaaagaucucacuaugaagacacucaacccuacacaugauauuauugcuuuaugugaauuugaaaacauaguaacaucaaaaaaagucauaauaccaacauaccuaagauccaucagugucagaaauaaagaucugaacacacuugaaaauauaacaaccacugaauucaaaaaugcuaucacaaaugcaaaaaucaucccuuacucaggauuacuauuagucaucacagugacugacaacaaaggagcauucaaauacauaaagccacaaagucaauucauaguagaucuuggagcuuaccuagaaaaagaaaguauauauuauguuaccacaaauuggaagcacacagcuacacgauuugcaaucaaacccauggaagauuaaggacuaguacuggcugcaucucccuuuccucuguccuccauccuucucccaggauggugaagggggaccugguacccagugauccccaccccaggauccuaaaucaugacuuaccugcuaauaaaaacucauuggaaaagugagaagaucuaaaaaaaaaaaaaaaaaaaaaaaaaaaaaaaaaaaaaaaaaaaaaaaaaaaaaaaaaaaaaaaaugcaucccccccccccccccccccccccccccccccaaaggcucuuuucagagccaccagaauu

SEQ ID NO: 9934 - RNA, 1119 nt, Artificial Sequence
  mRNA product Design f-5 comprising derived and/or modified sequence from HRSV(A2)__P0DOE7.1__M (opt1)
gggagacuuucccauucuguagcagaauuugguguugccuguggucuuggucccgcggagaagcuuaccauggagaccuacgugaacaagcugcacgagggcagcaccuacacggccgccguccaguacaacgugcucgagaaggacgacgaccccgcgucccugaccaucugggugccgauguuccagagcuccaugcccgccgaccugcucaucaaggagcuggccaacgucaacauccuggugaagcagaucagcacccccaaggggcccucccuccgcgugaugaucaacagccgguccgccguccuggcccagaugccgagcaaguucaccaucugcgcgaacgugucccuggacgagcgcagcaagcucgccuacgacgugacgacccccugcgagaucaaggccugcucccugaccugccucaagagcaagaacaugcugaccacggucaaggaccugaccaugaagacccugaaccccacccacgacaucaucgcccucugcgaguucgagaacaucgugacguccaagaaggugaucauccccaccuaccugcggagcaucuccguccgcaacaaggaccugaacacccucgagaacaucaccacgaccgaguucaagaacgcgaucaccaacgccaagaucaucccguacagcggccugcugcucgugaucaccgugacggacaacaagggggccuucaaguacaucaagccccagucccaguucaucgucgaccugggcgccuaccuggagaaggagagcaucuacuacgugaccaccaacuggaagcacaccgccacgcgguucgcgaucaagcccauggaggacugaggacuaguacuggcugcaucucccuuuccucuguccuccauccuucucccaggauggugaagggggaccugguacccagugauccccaccccaggauccuaaaucaugacuuaccugcuaauaaaaacucauuggaaaagugagaagaucuaaaaaaaaaaaaaaaaaaaaaaaaaaaaaaaaaaaaaaaaaaaaaaaaaaaaaaaaaaaaaaaaugcaucccccccccccccccccccccccccccccccaaaggcucuuuucagagccaccagaauu

SEQ ID NO: 9935 - RNA, 1119 nt, Artificial Sequence
  mRNA product Design f-5 comprising derived and/or modified sequence from HRSV(A2)__P0DOE7.1__M (opt2)
gggagacuuucccauucuguagcagaauuugguguugccuguggucuuggucccgcggagaagcuuaccauggagaccuacgucaacaagcuccacgagggcuccaccuacaccgccgccguccaguacaacguccucgagaaggacgacgaccccgccucccucaccaucuggguccccauguuccaguccuccaugcccgccgaccuccucaucaaggagcucgccaacgucaacauccucgucaagcagaucuccacccccaagggccccucccuccgcgucaugaucaacucccgcuccgccguccucgcccagaugcccuccaaguucaccaucugcgccaacgucucccucgacgagcgcuccaagcucgccuacgacgucaccacccccugcgagaucaaggccugcucccucaccugccucaaguccaagaacaugcucaccaccgucaaggaccucaccaugaagacccucaaccccacccacgacaucaucgcccucugcgaguucgagaacaucgucaccuccaagaaggucaucauccccaccuaccuccgcuccaucuccguccgcaacaaggaccucaacacccucgagaacaucaccaccaccgaguucaagaacgccaucaccaacgccaagaucauccccuacuccggccuccuccucgucaucaccgucaccgacaacaagggcgccuucaaguacaucaagccccagucccaguucaucgucgaccucggcgccuaccucgagaaggaguccaucuacuacgucaccaccaacuggaagcacaccgccacccgcuucgccaucaagcccauggaggacugaggacuaguacuggcugcaucucccuuuccucuguccuccauccuucucccaggauggugaagggggaccugguacccagugauccccaccccaggauccuaaaucaugacuuaccugcuaauaaaaacucauuggaaaagugagaagaucuaaaaaaaaaaaaaaaaaaaaaaaaaaaaaaaaaaaaaaaaaaaaaaaaaaaaaaaaaaaaaaaaugcaucccccccccccccccccccccccccccccccaaaggcucuuuucagagccaccagaauu

SEQ ID NO: 9936 - RNA, 1119 nt, Artificial Sequence
  mRNA product Design f-5 comprising derived and/or modified sequence from HRSV(A2)__P0DOE7.1__M (opt3)
gggagacuuucccauucuguagcagaauuugguguugccuguggucuuggucccgcggagaagcuuaccauggagaccuacgugaacaagcugcacgaaggcagcacauauacugccgcuguccaguacaauguucucgagaaagacgaugaccccgcaucccuuacgaucugggugccuauguuccaaucuucaaugccagccgaucuguugauuaaggaauuagcgaacguaaauauacuggugaaacagaucaguaccccgaaggggcccagccuaagagucaugauuaacuccaggucugcugugcucgcccagaugccuucgaaauuuacaaucugcgcaaauguuucacuggacgagcggagcaaacuugccuaugaugugacuaccccaugugaaauuaaggcuugcagucugacauguuugaaguccaagaacaugcucaccacugucaaagaccugacaaugaagacccugaaucccacgcaugauaucauagcacucugcgaguucgagaacaucgugacuucuaaaaagguaauuaucccuaccuacuuacgcagcauuuccguucgaaauaaggaccugaacacacuugaaaauaucacuaccacagaguuuaaaaacgccauaaccaaugcuaagauuaucccauauucaggauugcugcuagugauuacggucacugauaacaaaggugccuucaaguacaucaaaccccagagucaauuuaucguggaccucggcgcguaucuggaaaaggagagcauuuacuacgugacaaccaauuggaaacacacugcaacacguuucgccauaaagccuauggaggauugaggacuaguacuggcugcaucucccuuuccucuguccuccauccuucucccaggauggugaagggggaccugguacccagugauccccaccccaggauccuaaaucaugacuuaccugcuaauaaaaacucauuggaaaagugagaagaucuaaaaaaaaaaaaaaaaaaaaaaaaaaaaaaaaaaaaaaaaaaaaaaaaaaaaaaaaaaaaaaaaugcaucccccccccccccccccccccccccccccccaaaggcucuuuucagagccaccagaauu

SEQ ID NO: 9937 - RNA, 1119 nt, Artificial Sequence
  mRNA product Design f-5 comprising derived and/or modified sequence from HRSV(A2)__P0DOE7.1__M (opt4)
gggagacuuucccauucuguagcagaauuugguguugccuguggucuuggucccgcggagaagcuuaccauggagaccuacgugaacaagcugcacgagggcagcaccuacaccgccgccgugcaguacaacgugcuggagaaggacgacgaccccgccagccugaccaucugggugcccauguuccagagcagcaugcccgccgaccugcugaucaaggagcuggccaacgugaacauccuggugaagcagaucagcacccccaagggccccagccugagagugaugaucaacagcagaagcgccgugcuggcccagaugcccagcaaguucaccaucugcgccaacgugagccuggacgagagaagcaagcuggccuacgacgugaccacccccugcgagaucaaggccugcagccugaccugccugaagagcaagaacaugcugaccaccgugaaggaccugaccaugaagacccugaaccccacccacgacaucaucgcccugugcgaguucgagaacaucgugaccagcaagaaggugaucauccccaccuaccugagaagcaucagcgugagaaacaaggaccugaacacccuggagaacaucaccaccaccgaguucaagaacgccaucaccaacgccaagaucauccccuacagcggccugcugcuggugaucaccgugaccgacaacaagggcgccuucaaguacaucaagccccagagccaguucaucguggaccugggcgccuaccuggagaaggagagcaucuacuacgugaccaccaacuggaagcacaccgccaccagauucgccaucaagcccauggaggacugaggacuaguacuggcugcaucucccuuuccucuguccuccauccuucucccaggauggugaagggggaccugguacccagugauccccaccccaggauccuaaaucaugacuuaccugcuaauaaaaacucauuggaaaagugagaagaucuaaaaaaaaaaaaaaaaaaaaaaaaaaaaaaaaaaaaaaaaaaaaaaaaaaaaaaaaaaaaaaaaugcaucccccccccccccccccccccccccccccccaaaggcucuuuucagagccaccagaauu

SEQ ID NO: 9938 - RNA, 1119 nt, Artificial Sequence
  mRNA product Design f-5 comprising derived and/or modified sequence from HRSV(A2)__P0DOE7.1__M (opt5)
gggagacuuucccauucuguagcagaauuugguguugccuguggucuuggucccgcggagaagcuuaccauggagaccuacgugaacaagcugcacgaaggcagcacauauacggccgcuguccaguacaauguucucgagaaagacgaugaccccgccucccugaccaucugggugccuauguuccaaucuagcaugccggcggaucuucugauuaaggaacucgcuaacgugaauauccuggucaaacagauuuccacacccaaggggccuucucuuagagugaugaucaacagccgguccgccguucuggcccagaugcccucuaaauuuaccauuugcgcuaaugugagccucgacgagcgcuccaagcuggccuaugaugucacaaccccuugugaaaucaaggcuugcagccugacaugucucaaaucuaagaacaugcugaccacggugaaagaccuuaccaugaagacacugaaucccacccaugauaucauugcccucugcgaguucgagaacaucguuacauccaaaaaggugauuaucccuaccuaccugagaagcauuucuguccggaauaaggaccuuaacacgcuggaaaauaucacaaccacagaguuuaaaaacgcgauuaccaaugccaagaucaucccguauuccggacuccugcuggugauuaccgugacagauaacaaaggcgcuuucaaguacaucaaaccccagagccaauuuauugucgaccucggggccuaucuggaaaaggagucuaucuacuacguuacgaccaauuggaaacacacagcuacccgcuucgccauuaagccuauggaggauugaggacuaguacuggcugcaucucccuuuccucuguccuccauccuucucccaggauggugaagggggaccugguacccagugauccccaccccaggauccuaaaucaugacuuaccugcuaauaaaaacucauuggaaaagugagaagaucuaaaaaaaaaaaaaaaaaaaaaaaaaaaaaaaaaaaaaaaaaaaaaaaaaaaaaaaaaaaaaaaaugcaucccccccccccccccccccccccccccccccaaaggcucuuuucagagccaccagaauu

SEQ ID NO: 9939 - RNA, 1119 nt, Artificial Sequence
  mRNA product Design f-5 comprising derived and/or modified sequence from HRSV(A2)__P0DOE7.1__M (opt6)
gggagacuuucccauucuguagcagaauuugguguugccuguggucuuggucccgcggagaagcuuaccauggaaacauacguaaacaaacuacacgaaggauccacauacacagcagcaguacaauacaacguacuagaaaaagacgacgacccagcaucuuuaaccauauggguaccaauguuccaaucaucaaugccagcagaccucuuaauaaaagaacuagcaaacguaaacauccuagucaaacaaauaucaacacccaaaggaccaucccucagaguaaugaucaacucaagaucagcaguacuagcacaaaugccaucaaaauucacaauaugcgccaacguuucuuuagacgaacgaucaaaauuagccuacgacguaacaacacccugcgaaauaaaagcaugcucacuaacaugccuaaaaucaaaaaacaugcucacuacaguaaaagaccuaaccaugaaaacacucaacccaacacacgacauaauagcccuaugcgaauuugaaaacauaguaacaucaaaaaaaguaauaaucccaacauacuuaagaucgaucucagucagaaacaaagaccuaaauacacucgaaaacauaacaacaacagaauuuaaaaacgcaauaacaaacgcaaaaauaauaccauacucaggacuacuccuaguaauaacaguaacagacaacaaaggagcauucaaauacauaaaaccacaaucacaauucaucguagaccucggagcauaccuagaaaaagaaucaauauacuacguaacaacaaacuggaaacacaccgccacaagauucgcaauaaaacccauggaagacuaaggacuaguacuggcugcaucucccuuuccucuguccuccauccuucucccaggauggugaagggggaccugguacccagugauccccaccccaggauccuaaaucaugacuuaccugcuaauaaaaacucauuggaaaagugagaagaucuaaaaaaaaaaaaaaaaaaaaaaaaaaaaaaaaaaaaaaaaaaaaaaaaaaaaaaaaaaaaaaaaugcaucccccccccccccccccccccccccccccccaaaggcucuuuucagagccaccagaauu

SEQ ID NO: 9940 - RNA, 1119 nt, Artificial Sequence
  mRNA product Design f-5 comprising derived and/or modified sequence from HRSV(A2)__P0DOE7.1__M (opt11)
gggagacuuucccauucuguagcagaauuugguguugccuguggucuuggucccgcggagaagcuuaccauggaaaccuacgucaacaaacuacacgaaggcucaaccuacaccgccgccguccaauacaacguccucgaaaaagacgacgaccccgccucccuaaccaucuggguucccauguuccaaucauccaugcccgccgaccuccucauaaaagaacuagccaacgucaacauccuagucaaacaaaucagcacccccaaaggccccucccuccgcguaaugaucaacucccgcuccgccguccuagcccaaaugcccuccaaauuuacaaucugcgccaacgucucccucgacgaacgcucaaaacucgccuacgacgucaccacacccugcgaaaucaaagccugcucccucaccugccucaaaagcaaaaauaugcuaaccaccgucaaagaccuuaccaugaaaacccucaaccccacucacgacaucauagcccucugcgaauuugaaaacaucgucaccuccaaaaaagucaucauccccacauaccuccgcuccaucuccguccgcaacaaagaccucaacacccucgaaaacaucaccaccaccgaauuuaaaaacgccaucaccaacgccaaaaucauccccuacuccggccuccuccucgucaucaccguuaccgacaacaaaggcgccuucaaauacaucaaaccccaaucccaauucaucgucgaccucggagccuaccuugaaaaagaguccaucuacuacgucaccaccaacuggaaacacaccgccacccgauucgccaucaaacccauggaagacuaaggacuaguacuggcugcaucucccuuuccucuguccuccauccuucucccaggauggugaagggggaccugguacccagugauccccaccccaggauccuaaaucaugacuuaccugcuaauaaaaacucauuggaaaagugagaagaucuaaaaaaaaaaaaaaaaaaaaaaaaaaaaaaaaaaaaaaaaaaaaaaaaaaaaaaaaaaaaaaaaugcaucccccccccccccccccccccccccccccccaaaggcucuuuucagagccaccagaauu

SEQ ID NO: 9941 - RNA, 1115 nt, Artificial Sequence
  mRNA product Design g-1 comprising derived and/or modified sequence from HRSV(A2)__P0DOE7.1__M (wt)
gggagacuuucccauucuguagcagaauuugguguugccuguggucuuggucccgcggagaagcuuaccauggaaacauacgugaacaagcuucacgaaggcuccacauacacagcugcuguucaauacaaugucuuagaaaaagacgaugacccugcaucacuuacaauaugggugcccauguuccaaucaucuaugccagcagauuuacuuauaaaagaacuagcuaaugucaacauacuagugaaacaaauauccacacccaagggaccuucacuaagagucaugauaaacucaagaagugcagugcuagcacaaaugcccagcaaauuuaccauaugcgcuaauguguccuuggaugaaagaagcaaacuagcauaugauguaaccacacccugugaaaucaaggcauguagucuaacaugccuaaaaucaaaaaauauguugacuacaguuaaagaucucacuaugaagacacucaacccuacacaugauauuauugcuuuaugugaauuugaaaacauaguaacaucaaaaaaagucauaauaccaacauaccuaagauccaucagugucagaaauaaagaucugaacacacuugaaaauauaacaaccacugaauucaaaaaugcuaucacaaaugcaaaaaucaucccuuacucaggauuacuauuagucaucacagugacugacaacaaaggagcauucaaauacauaaagccacaaagucaauucauaguagaucuuggagcuuaccuagaaaaagaaaguauauauuauguuaccacaaauuggaagcacacagcuacacgauuugcaaucaaacccauggaagauuaaggacuaguggaagcauuuuccuggcugauuaaaagaaauuacucagcuauggucaucuguuccuguuagaaggcuaugcagcauauuauauacuaugcgcauguuaugaaaugcauaauaaaaaauuuuaaaaaaucuaaaagaucuaaaaaaaaaaaaaaaaaaaaaaaaaaaaaaaaaaaaaaaaaaaaaaaaaaaaaaaaaaaaaaaaugcaucccccccccccccccccccccccccccccccaaaggcucuuuucagagccaccagaauu

SEQ ID NO: 9942 - RNA, 1115 nt, Artificial Sequence
  mRNA product Design g-1 comprising derived and/or modified sequence from HRSV(A2)__P0DOE7.1__M (opt1)
gggagacuuucccauucuguagcagaauuugguguugccuguggucuuggucccgcggagaagcuuaccauggagaccuacgugaacaagcugcacgagggcagcaccuacacggccgccguccaguacaacgugcucgagaaggacgacgaccccgcgucccugaccaucugggugccgauguuccagagcuccaugcccgccgaccugcucaucaaggagcuggccaacgucaacauccuggugaagcagaucagcacccccaaggggcccucccuccgcgugaugaucaacagccgguccgccguccuggcccagaugccgagcaaguucaccaucugcgcgaacgugucccuggacgagcgcagcaagcucgccuacgacgugacgacccccugcgagaucaaggccugcucccugaccugccucaagagcaagaacaugcugaccacggucaaggaccugaccaugaagacccugaaccccacccacgacaucaucgcccucugcgaguucgagaacaucgugacguccaagaaggugaucauccccaccuaccugcggagcaucuccguccgcaacaaggaccugaacacccucgagaacaucaccacgaccgaguucaagaacgcgaucaccaacgccaagaucaucccguacagcggccugcugcucgugaucaccgugacggacaacaagggggccuucaaguacaucaagccccagucccaguucaucgucgaccugggcgccuaccuggagaaggagagcaucuacuacgugaccaccaacuggaagcacaccgccacgcgguucgcgaucaagcccauggaggacugaggacuaguggaagcauuuuccuggcugauuaaaagaaauuacucagcuauggucaucuguuccuguuagaaggcuaugcagcauauuauauacuaugcgcauguuaugaaaugcauaauaaaaaauuuuaaaaaaucuaaaagaucuaaaaaaaaaaaaaaaaaaaaaaaaaaaaaaaaaaaaaaaaaaaaaaaaaaaaaaaaaaaaaaaaugcaucccccccccccccccccccccccccccccccaaaggcucuuuucagagccaccagaauu

SEQ ID NO: 9943 - RNA, 1115 nt, Artificial Sequence
  mRNA product Design g-1 comprising derived and/or modified sequence from HRSV(A2)__P0DOE7.1__M (opt2)
gggagacuuucccauucuguagcagaauuugguguugccuguggucuuggucccgcggagaagcuuaccauggagaccuacgucaacaagcuccacgagggcuccaccuacaccgccgccguccaguacaacguccucgagaaggacgacgaccccgccucccucaccaucuggguccccauguuccaguccuccaugcccgccgaccuccucaucaaggagcucgccaacgucaacauccucgucaagcagaucuccacccccaagggccccucccuccgcgucaugaucaacucccgcuccgccguccucgcccagaugcccuccaaguucaccaucugcgccaacgucucccucgacgagcgcuccaagcucgccuacgacgucaccacccccugcgagaucaaggccugcucccucaccugccucaaguccaagaacaugcucaccaccgucaaggaccucaccaugaagacccucaaccccacccacgacaucaucgcccucugcgaguucgagaacaucgucaccuccaagaaggucaucauccccaccuaccuccgcuccaucuccguccgcaacaaggaccucaacacccucgagaacaucaccaccaccgaguucaagaacgccaucaccaacgccaagaucauccccuacuccggccuccuccucgucaucaccgucaccgacaacaagggcgccuucaaguacaucaagccccagucccaguucaucgucgaccucggcgccuaccucgagaaggaguccaucuacuacgucaccaccaacuggaagcacaccgccacccgcuucgccaucaagcccauggaggacugaggacuaguggaagcauuuuccuggcugauuaaaagaaauuacucagcuauggucaucuguuccuguuagaaggcuaugcagcauauuauauacuaugcgcauguuaugaaaugcauaauaaaaaauuuuaaaaaaucuaaaagaucuaaaaaaaaaaaaaaaaaaaaaaaaaaaaaaaaaaaaaaaaaaaaaaaaaaaaaaaaaaaaaaaaugcaucccccccccccccccccccccccccccccccaaaggcucuuuucagagccaccagaauu

SEQ ID NO: 9944 - RNA, 1115 nt, Artificial Sequence
  mRNA product Design g-1 comprising derived and/or modified sequence from HRSV(A2)__P0DOE7.1__M (opt3)
gggagacuuucccauucuguagcagaauuugguguugccuguggucuuggucccgcggagaagcuuaccauggagaccuacgugaacaagcugcacgaaggcagcacauauacugccgcuguccaguacaauguucucgagaaagacgaugaccccgcaucccuuacgaucugggugccuauguuccaaucuucaaugccagccgaucuguugauuaaggaauuagcgaacguaaauauacuggugaaacagaucaguaccccgaaggggcccagccuaagagucaugauuaacuccaggucugcugugcucgcccagaugccuucgaaauuuacaaucugcgcaaauguuucacuggacgagcggagcaaacuugccuaugaugugacuaccccaugugaaauuaaggcuugcagucugacauguuugaaguccaagaacaugcucaccacugucaaagaccugacaaugaagacccugaaucccacgcaugauaucauagcacucugcgaguucgagaacaucgugacuucuaaaaagguaauuaucccuaccuacuuacgcagcauuuccguucgaaauaaggaccugaacacacuugaaaauaucacuaccacagaguuuaaaaacgccauaaccaaugcuaagauuaucccauauucaggauugcugcuagugauuacggucacugauaacaaaggugccuucaaguacaucaaaccccagagucaauuuaucguggaccucggcgcguaucuggaaaaggagagcauuuacuacgugacaaccaauuggaaacacacugcaacacguuucgccauaaagccuauggaggauugaggacuaguggaagcauuuuccuggcugauuaaaagaaauuacucagcuauggucaucuguuccuguuagaaggcuaugcagcauauuauauacuaugcgcauguuaugaaaugcauaauaaaaaauuuuaaaaaaucuaaaagaucuaaaaaaaaaaaaaaaaaaaaaaaaaaaaaaaaaaaaaaaaaaaaaaaaaaaaaaaaaaaaaaaaugcaucccccccccccccccccccccccccccccccaaaggcucuuuucagagccaccagaauu

SEQ ID NO: 9945 - RNA, 1115 nt, Artificial Sequence
  mRNA product Design g-1 comprising derived and/or modified sequence from HRSV(A2)__P0DOE7.1__M (opt4)
gggagacuuucccauucuguagcagaauuugguguugccuguggucuuggucccgcggagaagcuuaccauggagaccuacgugaacaagcugcacgagggcagcaccuacaccgccgccgugcaguacaacgugcuggagaaggacgacgaccccgccagccugaccaucugggugcccauguuccagagcagcaugcccgccgaccugcugaucaaggagcuggccaacgugaacauccuggugaagcagaucagcacccccaagggccccagccugagagugaugaucaacagcagaagcgccgugcuggcccagaugcccagcaaguucaccaucugcgccaacgugagccuggacgagagaagcaagcuggccuacgacgugaccacccccugcgagaucaaggccugcagccugaccugccugaagagcaagaacaugcugaccaccgugaaggaccugaccaugaagacccugaaccccacccacgacaucaucgcccugugcgaguucgagaacaucgugaccagcaagaaggugaucauccccaccuaccugagaagcaucagcgugagaaacaaggaccugaacacccuggagaacaucaccaccaccgaguucaagaacgccaucaccaacgccaagaucauccccuacagcggccugcugcuggugaucaccgugaccgacaacaagggcgccuucaaguacaucaagccccagagccaguucaucguggaccugggcgccuaccuggagaaggagagcaucuacuacgugaccaccaacuggaagcacaccgccaccagauucgccaucaagcccauggaggacugaggacuaguggaagcauuuuccuggcugauuaaaagaaauuacucagcuauggucaucuguuccuguuagaaggcuaugcagcauauuauauacuaugcgcauguuaugaaaugcauaauaaaaaauuuuaaaaaaucuaaaagaucuaaaaaaaaaaaaaaaaaaaaaaaaaaaaaaaaaaaaaaaaaaaaaaaaaaaaaaaaaaaaaaaaugcaucccccccccccccccccccccccccccccccaaaggcucuuuucagagccaccagaauu

SEQ ID NO: 9946 - RNA, 1115 nt, Artificial Sequence
  mRNA product Design g-1 comprising derived and/or modified sequence from HRSV(A2)__P0DOE7.1__M (opt5)
gggagacuuucccauucuguagcagaauuugguguugccuguggucuuggucccgcggagaagcuuaccauggagaccuacgugaacaagcugcacgaaggcagcacauauacggccgcuguccaguacaauguucucgagaaagacgaugaccccgccucccugaccaucugggugccuauguuccaaucuagcaugccggcggaucuucugauuaaggaacucgcuaacgugaauauccuggucaaacagauuuccacacccaaggggccuucucuuagagugaugaucaacagccgguccgccguucuggcccagaugcccucuaaauuuaccauuugcgcuaaugugagccucgacgagcgcuccaagcuggccuaugaugucacaaccccuugugaaaucaaggcuugcagccugacaugucucaaaucuaagaacaugcugaccacggugaaagaccuuaccaugaagacacugaaucccacccaugauaucauugcccucugcgaguucgagaacaucguuacauccaaaaaggugauuaucccuaccuaccugagaagcauuucuguccggaauaaggaccuuaacacgcuggaaaauaucacaaccacagaguuuaaaaacgcgauuaccaaugccaagaucaucccguauuccggacuccugcuggugauuaccgugacagauaacaaaggcgcuuucaaguacaucaaaccccagagccaauuuauugucgaccucggggccuaucuggaaaaggagucuaucuacuacguuacgaccaauuggaaacacacagcuacccgcuucgccauuaagccuauggaggauugaggacuaguggaagcauuuuccuggcugauuaaaagaaauuacucagcuauggucaucuguuccuguuagaaggcuaugcagcauauuauauacuaugcgcauguuaugaaaugcauaauaaaaaauuuuaaaaaaucuaaaagaucuaaaaaaaaaaaaaaaaaaaaaaaaaaaaaaaaaaaaaaaaaaaaaaaaaaaaaaaaaaaaaaaaugcaucccccccccccccccccccccccccccccccaaaggcucuuuucagagccaccagaauu

SEQ ID NO: 9947 - RNA, 1115 nt, Artificial Sequence
  mRNA product Design g-1 comprising derived and/or modified sequence from HRSV(A2)__P0DOE7.1__M (opt6)
gggagacuuucccauucuguagcagaauuugguguugccuguggucuuggucccgcggagaagcuuaccauggaaacauacguaaacaaacuacacgaaggauccacauacacagcagcaguacaauacaacguacuagaaaaagacgacgacccagcaucuuuaaccauauggguaccaauguuccaaucaucaaugccagcagaccucuuaauaaaagaacuagcaaacguaaacauccuagucaaacaaauaucaacacccaaaggaccaucccucagaguaaugaucaacucaagaucagcaguacuagcacaaaugccaucaaaauucacaauaugcgccaacguuucuuuagacgaacgaucaaaauuagccuacgacguaacaacacccugcgaaauaaaagcaugcucacuaacaugccuaaaaucaaaaaacaugcucacuacaguaaaagaccuaaccaugaaaacacucaacccaacacacgacauaauagcccuaugcgaauuugaaaacauaguaacaucaaaaaaaguaauaaucccaacauacuuaagaucgaucucagucagaaacaaagaccuaaauacacucgaaaacauaacaacaacagaauuuaaaaacgcaauaacaaacgcaaaaauaauaccauacucaggacuacuccuaguaauaacaguaacagacaacaaaggagcauucaaauacauaaaaccacaaucacaauucaucguagaccucggagcauaccuagaaaaagaaucaauauacuacguaacaacaaacuggaaacacaccgccacaagauucgcaauaaaacccauggaagacuaaggacuaguggaagcauuuuccuggcugauuaaaagaaauuacucagcuauggucaucuguuccuguuagaaggcuaugcagcauauuauauacuaugcgcauguuaugaaaugcauaauaaaaaauuuuaaaaaaucuaaaagaucuaaaaaaaaaaaaaaaaaaaaaaaaaaaaaaaaaaaaaaaaaaaaaaaaaaaaaaaaaaaaaaaaugcaucccccccccccccccccccccccccccccccaaaggcucuuuucagagccaccagaauu

SEQ ID NO: 9948 - RNA, 1115 nt, Artificial Sequence
  mRNA product Design g-1 comprising derived and/or modified sequence from HRSV(A2)__P0DOE7.1__M (opt11)
gggagacuuucccauucuguagcagaauuugguguugccuguggucuuggucccgcggagaagcuuaccauggaaaccuacgucaacaaacuacacgaaggcucaaccuacaccgccgccguccaauacaacguccucgaaaaagacgacgaccccgccucccuaaccaucuggguucccauguuccaaucauccaugcccgccgaccuccucauaaaagaacuagccaacgucaacauccuagucaaacaaaucagcacccccaaaggccccucccuccgcguaaugaucaacucccgcuccgccguccuagcccaaaugcccuccaaauuuacaaucugcgccaacgucucccucgacgaacgcucaaaacucgccuacgacgucaccacacccugcgaaaucaaagccugcucccucaccugccucaaaagcaaaaauaugcuaaccaccgucaaagaccuuaccaugaaaacccucaaccccacucacgacaucauagcccucugcgaauuugaaaacaucgucaccuccaaaaaagucaucauccccacauaccuccgcuccaucuccguccgcaacaaagaccucaacacccucgaaaacaucaccaccaccgaauuuaaaaacgccaucaccaacgccaaaaucauccccuacuccggccuccuccucgucaucaccguuaccgacaacaaaggcgccuucaaauacaucaaaccccaaucccaauucaucgucgaccucggagccuaccuugaaaaagaguccaucuacuacgucaccaccaacuggaaacacaccgccacccgauucgccaucaaacccauggaagacuaaggacuaguggaagcauuuuccuggcugauuaaaagaaauuacucagcuauggucaucuguuccuguuagaaggcuaugcagcauauuauauacuaugcgcauguuaugaaaugcauaauaaaaaauuuuaaaaaaucuaaaagaucuaaaaaaaaaaaaaaaaaaaaaaaaaaaaaaaaaaaaaaaaaaaaaaaaaaaaaaaaaaaaaaaaugcaucccccccccccccccccccccccccccccccaaaggcucuuuucagagccaccagaauu

SEQ ID NO: 9949 - RNA, 1130 nt, Artificial Sequence
  mRNA product Design g-2 comprising derived and/or modified sequence from HRSV(A2)__P0DOE7.1__M (wt)
gggagaguccgcucagccagguugcagaagcggcuuagcguguguccuaaucuucucucugcguguagguaggccugugccgcaaacaagcuuaccauggaaacauacgugaacaagcuucacgaaggcuccacauacacagcugcuguucaauacaaugucuuagaaaaagacgaugacccugcaucacuuacaauaugggugcccauguuccaaucaucuaugccagcagauuuacuuauaaaagaacuagcuaaugucaacauacuagugaaacaaauauccacacccaagggaccuucacuaagagucaugauaaacucaagaagugcagugcuagcacaaaugcccagcaaauuuaccauaugcgcuaauguguccuuggaugaaagaagcaaacuagcauaugauguaaccacacccugugaaaucaaggcauguagucuaacaugccuaaaaucaaaaaauauguugacuacaguuaaagaucucacuaugaagacacucaacccuacacaugauauuauugcuuuaugugaauuugaaaacauaguaacaucaaaaaaagucauaauaccaacauaccuaagauccaucagugucagaaauaaagaucugaacacacuugaaaauauaacaaccacugaauucaaaaaugcuaucacaaaugcaaaaaucaucccuuacucaggauuacuauuagucaucacagugacugacaacaaaggagcauucaaauacauaaagccacaaagucaauucauaguagaucuuggagcuuaccuagaaaaagaaaguauauauuauguuaccacaaauuggaagcacacagcuacacgauuugcaaucaaacccauggaagauuaaggacuaguaauaaggaaacuguaugaaugucugugggcaggaagugaagagauccuucuguaaagguuuuuggaauuaugucugcugaauaauaaacuuuuuugaaauaauaaaucugguagaaaaaugagaucuaaaaaaaaaaaaaaaaaaaaaaaaaaaaaaaaaaaaaaaaaaaaaaaaaaaaaaaaaaaaaaaaugcaucccccccccccccccccccccccccccccccaaaggcucuuuucagagccaccagaauu

SEQ ID NO: 9950 - RNA, 1130 nt, Artificial Sequence
  mRNA product Design g-2 comprising derived and/or modified sequence from HRSV(A2)__P0DOE7.1__M (opt1)
gggagaguccgcucagccagguugcagaagcggcuuagcguguguccuaaucuucucucugcguguagguaggccugugccgcaaacaagcuuaccauggagaccuacgugaacaagcugcacgagggcagcaccuacacggccgccguccaguacaacgugcucgagaaggacgacgaccccgcgucccugaccaucugggugccgauguuccagagcuccaugcccgccgaccugcucaucaaggagcuggccaacgucaacauccuggugaagcagaucagcacccccaaggggcccucccuccgcgugaugaucaacagccgguccgccguccuggcccagaugccgagcaaguucaccaucugcgcgaacgugucccuggacgagcgcagcaagcucgccuacgacgugacgacccccugcgagaucaaggccugcucccugaccugccucaagagcaagaacaugcugaccacggucaaggaccugaccaugaagacccugaaccccacccacgacaucaucgcccucugcgaguucgagaacaucgugacguccaagaaggugaucauccccaccuaccugcggagcaucuccguccgcaacaaggaccugaacacccucgagaacaucaccacgaccgaguucaagaacgcgaucaccaacgccaagaucaucccguacagcggccugcugcucgugaucaccgugacggacaacaagggggccuucaaguacaucaagccccagucccaguucaucgucgaccugggcgccuaccuggagaaggagagcaucuacuacgugaccaccaacuggaagcacaccgccacgcgguucgcgaucaagcccauggaggacugaggacuaguaauaaggaaacuguaugaaugucugugggcaggaagugaagagauccuucuguaaagguuuuuggaauuaugucugcugaauaauaaacuuuuuugaaauaauaaaucugguagaaaaaugagaucuaaaaaaaaaaaaaaaaaaaaaaaaaaaaaaaaaaaaaaaaaaaaaaaaaaaaaaaaaaaaaaaaugcaucccccccccccccccccccccccccccccccaaaggcucuuuucagagccaccagaauu

SEQ ID NO: 9951 - RNA, 1130 nt, Artificial Sequence
  mRNA product Design g-2 comprising derived and/or modified sequence from HRSV(A2)__P0DOE7.1__M (opt2)
gggagaguccgcucagccagguugcagaagcggcuuagcguguguccuaaucuucucucugcguguagguaggccugugccgcaaacaagcuuaccauggagaccuacgucaacaagcuccacgagggcuccaccuacaccgccgccguccaguacaacguccucgagaaggacgacgaccccgccucccucaccaucuggguccccauguuccaguccuccaugcccgccgaccuccucaucaaggagcucgccaacgucaacauccucgucaagcagaucuccacccccaagggccccucccuccgcgucaugaucaacucccgcuccgccguccucgcccagaugcccuccaaguucaccaucugcgccaacgucucccucgacgagcgcuccaagcucgccuacgacgucaccacccccugcgagaucaaggccugcucccucaccugccucaaguccaagaacaugcucaccaccgucaaggaccucaccaugaagacccucaaccccacccacgacaucaucgcccucugcgaguucgagaacaucgucaccuccaagaaggucaucauccccaccuaccuccgcuccaucuccguccgcaacaaggaccucaacacccucgagaacaucaccaccaccgaguucaagaacgccaucaccaacgccaagaucauccccuacuccggccuccuccucgucaucaccgucaccgacaacaagggcgccuucaaguacaucaagccccagucccaguucaucgucgaccucggcgccuaccucgagaaggaguccaucuacuacgucaccaccaacuggaagcacaccgccacccgcuucgccaucaagcccauggaggacugaggacuaguaauaaggaaacuguaugaaugucugugggcaggaagugaagagauccuucuguaaagguuuuuggaauuaugucugcugaauaauaaacuuuuuugaaauaauaaaucugguagaaaaaugagaucuaaaaaaaaaaaaaaaaaaaaaaaaaaaaaaaaaaaaaaaaaaaaaaaaaaaaaaaaaaaaaaaaugcaucccccccccccccccccccccccccccccccaaaggcucuuuucagagccaccagaauu

SEQ ID NO: 9952 - RNA, 1130 nt, Artificial Sequence
  mRNA product Design g-2 comprising derived and/or modified sequence from HRSV(A2)__P0DOE7.1__M (opt3)
gggagaguccgcucagccagguugcagaagcggcuuagcguguguccuaaucuucucucugcguguagguaggccugugccgcaaacaagcuuaccauggagaccuacgugaacaagcugcacgaaggcagcacauauacugccgcuguccaguacaauguucucgagaaagacgaugaccccgcaucccuuacgaucugggugccuauguuccaaucuucaaugccagccgaucuguugauuaaggaauuagcgaacguaaauauacuggugaaacagaucaguaccccgaaggggcccagccuaagagucaugauuaacuccaggucugcugugcucgcccagaugccuucgaaauuuacaaucugcgcaaauguuucacuggacgagcggagcaaacuugccuaugaugugacuaccccaugugaaauuaaggcuugcagucugacauguuugaaguccaagaacaugcucaccacugucaaagaccugacaaugaagacccugaaucccacgcaugauaucauagcacucugcgaguucgagaacaucgugacuucuaaaaagguaauuaucccuaccuacuuacgcagcauuuccguucgaaauaaggaccugaacacacuugaaaauaucacuaccacagaguuuaaaaacgccauaaccaaugcuaagauuaucccauauucaggauugcugcuagugauuacggucacugauaacaaaggugccuucaaguacaucaaaccccagagucaauuuaucguggaccucggcgcguaucuggaaaaggagagcauuuacuacgugacaaccaauuggaaacacacugcaacacguuucgccauaaagccuauggaggauugaggacuaguaauaaggaaacuguaugaaugucugugggcaggaagugaagagauccuucuguaaagguuuuuggaauuaugucugcugaauaauaaacuuuuuugaaauaauaaaucugguagaaaaaugagaucuaaaaaaaaaaaaaaaaaaaaaaaaaaaaaaaaaaaaaaaaaaaaaaaaaaaaaaaaaaaaaaaaugcaucccccccccccccccccccccccccccccccaaaggcucuuuucagagccaccagaauu

SEQ ID NO: 9953 - RNA, 1130 nt, Artificial Sequence
  mRNA product Design g-2 comprising derived and/or modified sequence from HRSV(A2)__P0DOE7.1__M (opt4)
gggagaguccgcucagccagguugcagaagcggcuuagcguguguccuaaucuucucucugcguguagguaggccugugccgcaaacaagcuuaccauggagaccuacgugaacaagcugcacgagggcagcaccuacaccgccgccgugcaguacaacgugcuggagaaggacgacgaccccgccagccugaccaucugggugcccauguuccagagcagcaugcccgccgaccugcugaucaaggagcuggccaacgugaacauccuggugaagcagaucagcacccccaagggccccagccugagagugaugaucaacagcagaagcgccgugcuggcccagaugcccagcaaguucaccaucugcgccaacgugagccuggacgagagaagcaagcuggccuacgacgugaccacccccugcgagaucaaggccugcagccugaccugccugaagagcaagaacaugcugaccaccgugaaggaccugaccaugaagacccugaaccccacccacgacaucaucgcccugugcgaguucgagaacaucgugaccagcaagaaggugaucauccccaccuaccugagaagcaucagcgugagaaacaaggaccugaacacccuggagaacaucaccaccaccgaguucaagaacgccaucaccaacgccaagaucauccccuacagcggccugcugcuggugaucaccgugaccgacaacaagggcgccuucaaguacaucaagccccagagccaguucaucguggaccugggcgccuaccuggagaaggagagcaucuacuacgugaccaccaacuggaagcacaccgccaccagauucgccaucaagcccauggaggacugaggacuaguaauaaggaaacuguaugaaugucugugggcaggaagugaagagauccuucuguaaagguuuuuggaauuaugucugcugaauaauaaacuuuuuugaaauaauaaaucugguagaaaaaugagaucuaaaaaaaaaaaaaaaaaaaaaaaaaaaaaaaaaaaaaaaaaaaaaaaaaaaaaaaaaaaaaaaaugcaucccccccccccccccccccccccccccccccaaaggcucuuuucagagccaccagaauu

SEQ ID NO: 9954 - RNA, 1130 nt, Artificial Sequence
  mRNA product Design g-2 comprising derived and/or modified sequence from HRSV(A2)__P0DOE7.1__M (opt5)
gggagaguccgcucagccagguugcagaagcggcuuagcguguguccuaaucuucucucugcguguagguaggccugugccgcaaacaagcuuaccauggagaccuacgugaacaagcugcacgaaggcagcacauauacggccgcuguccaguacaauguucucgagaaagacgaugaccccgccucccugaccaucugggugccuauguuccaaucuagcaugccggcggaucuucugauuaaggaacucgcuaacgugaauauccuggucaaacagauuuccacacccaaggggccuucucuuagagugaugaucaacagccgguccgccguucuggcccagaugcccucuaaauuuaccauuugcgcuaaugugagccucgacgagcgcuccaagcuggccuaugaugucacaaccccuugugaaaucaaggcuugcagccugacaugucucaaaucuaagaacaugcugaccacggugaaagaccuuaccaugaagacacugaaucccacccaugauaucauugcccucugcgaguucgagaacaucguuacauccaaaaaggugauuaucccuaccuaccugagaagcauuucuguccggaauaaggaccuuaacacgcuggaaaauaucacaaccacagaguuuaaaaacgcgauuaccaaugccaagaucaucccguauuccggacuccugcuggugauuaccgugacagauaacaaaggcgcuuucaaguacaucaaaccccagagccaauuuauugucgaccucggggccuaucuggaaaaggagucuaucuacuacguuacgaccaauuggaaacacacagcuacccgcuucgccauuaagccuauggaggauugaggacuaguaauaaggaaacuguaugaaugucugugggcaggaagugaagagauccuucuguaaagguuuuuggaauuaugucugcugaauaauaaacuuuuuugaaauaauaaaucugguagaaaaaugagaucuaaaaaaaaaaaaaaaaaaaaaaaaaaaaaaaaaaaaaaaaaaaaaaaaaaaaaaaaaaaaaaaaugcaucccccccccccccccccccccccccccccccaaaggcucuuuucagagccaccagaauu

SEQ ID NO: 9955 - RNA, 1130 nt, Artificial Sequence
  mRNA product Design g-2 comprising derived and/or modified sequence from HRSV(A2)__P0DOE7.1__M (opt6)
gggagaguccgcucagccagguugcagaagcggcuuagcguguguccuaaucuucucucugcguguagguaggccugugccgcaaacaagcuuaccauggaaacauacguaaacaaacuacacgaaggauccacauacacagcagcaguacaauacaacguacuagaaaaagacgacgacccagcaucuuuaaccauauggguaccaauguuccaaucaucaaugccagcagaccucuuaauaaaagaacuagcaaacguaaacauccuagucaaacaaauaucaacacccaaaggaccaucccucagaguaaugaucaacucaagaucagcaguacuagcacaaaugccaucaaaauucacaauaugcgccaacguuucuuuagacgaacgaucaaaauuagccuacgacguaacaacacccugcgaaauaaaagcaugcucacuaacaugccuaaaaucaaaaaacaugcucacuacaguaaaagaccuaaccaugaaaacacucaacccaacacacgacauaauagcccuaugcgaauuugaaaacauaguaacaucaaaaaaaguaauaaucccaacauacuuaagaucgaucucagucagaaacaaagaccuaaauacacucgaaaacauaacaacaacagaauuuaaaaacgcaauaacaaacgcaaaaauaauaccauacucaggacuacuccuaguaauaacaguaacagacaacaaaggagcauucaaauacauaaaaccacaaucacaauucaucguagaccucggagcauaccuagaaaaagaaucaauauacuacguaacaacaaacuggaaacacaccgccacaagauucgcaauaaaacccauggaagacuaaggacuaguaauaaggaaacuguaugaaugucugugggcaggaagugaagagauccuucuguaaagguuuuuggaauuaugucugcugaauaauaaacuuuuuugaaauaauaaaucugguagaaaaaugagaucuaaaaaaaaaaaaaaaaaaaaaaaaaaaaaaaaaaaaaaaaaaaaaaaaaaaaaaaaaaaaaaaaugcaucccccccccccccccccccccccccccccccaaaggcucuuuucagagccaccagaauu

SEQ ID NO: 9956 - RNA, 1130 nt, Artificial Sequence
  mRNA product Design g-2 comprising derived and/or modified sequence from HRSV(A2)__P0DOE7.1__M (opt11)
gggagaguccgcucagccagguugcagaagcggcuuagcguguguccuaaucuucucucugcguguagguaggccugugccgcaaacaagcuuaccauggaaaccuacgucaacaaacuacacgaaggcucaaccuacaccgccgccguccaauacaacguccucgaaaaagacgacgaccccgccucccuaaccaucuggguucccauguuccaaucauccaugcccgccgaccuccucauaaaagaacuagccaacgucaacauccuagucaaacaaaucagcacccccaaaggccccucccuccgcguaaugaucaacucccgcuccgccguccuagcccaaaugcccuccaaauuuacaaucugcgccaacgucucccucgacgaacgcucaaaacucgccuacgacgucaccacacccugcgaaaucaaagccugcucccucaccugccucaaaagcaaaaauaugcuaaccaccgucaaagaccuuaccaugaaaacccucaaccccacucacgacaucauagcccucugcgaauuugaaaacaucgucaccuccaaaaaagucaucauccccacauaccuccgcuccaucuccguccgcaacaaagaccucaacacccucgaaaacaucaccaccaccgaauuuaaaaacgccaucaccaacgccaaaaucauccccuacuccggccuccuccucgucaucaccguuaccgacaacaaaggcgccuucaaauacaucaaaccccaaucccaauucaucgucgaccucggagccuaccuugaaaaagaguccaucuacuacgucaccaccaacuggaaacacaccgccacccgauucgccaucaaacccauggaagacuaaggacuaguaauaaggaaacuguaugaaugucugugggcaggaagugaagagauccuucuguaaagguuuuuggaauuaugucugcugaauaauaaacuuuuuugaaauaauaaaucugguagaaaaaugagaucuaaaaaaaaaaaaaaaaaaaaaaaaaaaaaaaaaaaaaaaaaaaaaaaaaaaaaaaaaaaaaaaaugcaucccccccccccccccccccccccccccccccaaaggcucuuuucagagccaccagaauu

SEQ ID NO: 9957 - RNA, 1362 nt, Artificial Sequence
  mRNA product Design g-3 comprising derived and/or modified sequence from HRSV(A2)__P0DOE7.1__M (wt)
gggagaguccgcucagccagguugcagaagcggcuuagcguguguccuaaucuucucucugcguguagguaggccugugccgcaaacaagcuuaccauggaaacauacgugaacaagcuucacgaaggcuccacauacacagcugcuguucaauacaaugucuuagaaaaagacgaugacccugcaucacuuacaauaugggugcccauguuccaaucaucuaugccagcagauuuacuuauaaaagaacuagcuaaugucaacauacuagugaaacaaauauccacacccaagggaccuucacuaagagucaugauaaacucaagaagugcagugcuagcacaaaugcccagcaaauuuaccauaugcgcuaauguguccuuggaugaaagaagcaaacuagcauaugauguaaccacacccugugaaaucaaggcauguagucuaacaugccuaaaaucaaaaaauauguugacuacaguuaaagaucucacuaugaagacacucaacccuacacaugauauuauugcuuuaugugaauuugaaaacauaguaacaucaaaaaaagucauaauaccaacauaccuaagauccaucagugucagaaauaaagaucugaacacacuugaaaauauaacaaccacugaauucaaaaaugcuaucacaaaugcaaaaaucaucccuuacucaggauuacuauuagucaucacagugacugacaacaaaggagcauucaaauacauaaagccacaaagucaauucauaguagaucuuggagcuuaccuagaaaaagaaaguauauauuauguuaccacaaauuggaagcacacagcuacacgauuugcaaucaaacccauggaagauuaaggacuagugaagggaacacccaaauuuaauucagccuuaagcacaauuaauuaagagugaaacguaauuguacaagcaguuggucacccaccauagggcaugaucaacaccgcaaccuuuccuuuuucccccagugauucugaaaaaccccucuucccuucagcuugcuuagauguuccaaauuuaguaagcuuaaggcggccuacagaagaaaaagaaaaaaaaggccacaaaaguucccucucacuuucaguaaauaaaauaaaagcagcaacagaaauaaagaaauaaaugaaauucaaaaugaaauaaauauuguguugugcagcauuaaaaaaucaauaaaaauuaaaaaugagcaagaucuaaaaaaaaaaaaaaaaaaaaaaaaaaaaaaaaaaaaaaaaaaaaaaaaaaaaaaaaaaaaaaaaugcaucccccccccccccccccccccccccccccccaaaggcucuuuucagagccaccagaauu

SEQ ID NO: 9958 - RNA, 1362 nt, Artificial Sequence
  mRNA product Design g-3 comprising derived and/or modified sequence from HRSV(A2)__P0DOE7.1__M (opt1)
gggagaguccgcucagccagguugcagaagcggcuuagcguguguccuaaucuucucucugcguguagguaggccugugccgcaaacaagcuuaccauggagaccuacgugaacaagcugcacgagggcagcaccuacacggccgccguccaguacaacgugcucgagaaggacgacgaccccgcgucccugaccaucugggugccgauguuccagagcuccaugcccgccgaccugcucaucaaggagcuggccaacgucaacauccuggugaagcagaucagcacccccaaggggcccucccuccgcgugaugaucaacagccgguccgccguccuggcccagaugccgagcaaguucaccaucugcgcgaacgugucccuggacgagcgcagcaagcucgccuacgacgugacgacccccugcgagaucaaggccugcucccugaccugccucaagagcaagaacaugcugaccacggucaaggaccugaccaugaagacccugaaccccacccacgacaucaucgcccucugcgaguucgagaacaucgugacguccaagaaggugaucauccccaccuaccugcggagcaucuccguccgcaacaaggaccugaacacccucgagaacaucaccacgaccgaguucaagaacgcgaucaccaacgccaagaucaucccguacagcggccugcugcucgugaucaccgugacggacaacaagggggccuucaaguacaucaagccccagucccaguucaucgucgaccugggcgccuaccuggagaaggagagcaucuacuacgugaccaccaacuggaagcacaccgccacgcgguucgcgaucaagcccauggaggacugaggacuagugaagggaacacccaaauuuaauucagccuuaagcacaauuaauuaagagugaaacguaauuguacaagcaguuggucacccaccauagggcaugaucaacaccgcaaccuuuccuuuuucccccagugauucugaaaaaccccucuucccuucagcuugcuuagauguuccaaauuuaguaagcuuaaggcggccuacagaagaaaaagaaaaaaaaggccacaaaaguucccucucacuuucaguaaauaaaauaaaagcagcaacagaaauaaagaaauaaaugaaauucaaaaugaaauaaauauuguguugugcagcauuaaaaaaucaauaaaaauuaaaaaugagcaagaucuaaaaaaaaaaaaaaaaaaaaaaaaaaaaaaaaaaaaaaaaaaaaaaaaaaaaaaaaaaaaaaaaugcaucccccccccccccccccccccccccccccccaaaggcucuuuucagagccaccagaauu

SEQ ID NO: 9959 - RNA, 1362 nt, Artificial Sequence
  mRNA product Design g-3 comprising derived and/or modified sequence from HRSV(A2)__P0DOE7.1__M (opt2)
gggagaguccgcucagccagguugcagaagcggcuuagcguguguccuaaucuucucucugcguguagguaggccugugccgcaaacaagcuuaccauggagaccuacgucaacaagcuccacgagggcuccaccuacaccgccgccguccaguacaacguccucgagaaggacgacgaccccgccucccucaccaucuggguccccauguuccaguccuccaugcccgccgaccuccucaucaaggagcucgccaacgucaacauccucgucaagcagaucuccacccccaagggccccucccuccgcgucaugaucaacucccgcuccgccguccucgcccagaugcccuccaaguucaccaucugcgccaacgucucccucgacgagcgcuccaagcucgccuacgacgucaccacccccugcgagaucaaggccugcucccucaccugccucaaguccaagaacaugcucaccaccgucaaggaccucaccaugaagacccucaaccccacccacgacaucaucgcccucugcgaguucgagaacaucgucaccuccaagaaggucaucauccccaccuaccuccgcuccaucuccguccgcaacaaggaccucaacacccucgagaacaucaccaccaccgaguucaagaacgccaucaccaacgccaagaucauccccuacuccggccuccuccucgucaucaccgucaccgacaacaagggcgccuucaaguacaucaagccccagucccaguucaucgucgaccucggcgccuaccucgagaaggaguccaucuacuacgucaccaccaacuggaagcacaccgccacccgcuucgccaucaagcccauggaggacugaggacuagugaagggaacacccaaauuuaauucagccuuaagcacaauuaauuaagagugaaacguaauuguacaagcaguuggucacccaccauagggcaugaucaacaccgcaaccuuuccuuuuucccccagugauucugaaaaaccccucuucccuucagcuugcuuagauguuccaaauuuaguaagcuuaaggcggccuacagaagaaaaagaaaaaaaaggccacaaaaguucccucucacuuucaguaaauaaaauaaaagcagcaacagaaauaaagaaauaaaugaaauucaaaaugaaauaaauauuguguugugcagcauuaaaaaaucaauaaaaauuaaaaaugagcaagaucuaaaaaaaaaaaaaaaaaaaaaaaaaaaaaaaaaaaaaaaaaaaaaaaaaaaaaaaaaaaaaaaaugcaucccccccccccccccccccccccccccccccaaaggcucuuuucagagccaccagaauu

SEQ ID NO: 9960 - RNA, 1362 nt, Artificial Sequence
  mRNA product Design g-3 comprising derived and/or modified sequence from HRSV(A2)__P0DOE7.1__M (opt3)
gggagaguccgcucagccagguugcagaagcggcuuagcguguguccuaaucuucucucugcguguagguaggccugugccgcaaacaagcuuaccauggagaccuacgugaacaagcugcacgaaggcagcacauauacugccgcuguccaguacaauguucucgagaaagacgaugaccccgcaucccuuacgaucugggugccuauguuccaaucuucaaugccagccgaucuguugauuaaggaauuagcgaacguaaauauacuggugaaacagaucaguaccccgaaggggcccagccuaagagucaugauuaacuccaggucugcugugcucgcccagaugccuucgaaauuuacaaucugcgcaaauguuucacuggacgagcggagcaaacuugccuaugaugugacuaccccaugugaaauuaaggcuugcagucugacauguuugaaguccaagaacaugcucaccacugucaaagaccugacaaugaagacccugaaucccacgcaugauaucauagcacucugcgaguucgagaacaucgugacuucuaaaaagguaauuaucccuaccuacuuacgcagcauuuccguucgaaauaaggaccugaacacacuugaaaauaucacuaccacagaguuuaaaaacgccauaaccaaugcuaagauuaucccauauucaggauugcugcuagugauuacggucacugauaacaaaggugccuucaaguacaucaaaccccagagucaauuuaucguggaccucggcgcguaucuggaaaaggagagcauuuacuacgugacaaccaauuggaaacacacugcaacacguuucgccauaaagccuauggaggauugaggacuagugaagggaacacccaaauuuaauucagccuuaagcacaauuaauuaagagugaaacguaauuguacaagcaguuggucacccaccauagggcaugaucaacaccgcaaccuuuccuuuuucccccagugauucugaaaaaccccucuucccuucagcuugcuuagauguuccaaauuuaguaagcuuaaggcggccuacagaagaaaaagaaaaaaaaggccacaaaaguucccucucacuuucaguaaauaaaauaaaagcagcaacagaaauaaagaaauaaaugaaauucaaaaugaaauaaauauuguguugugcagcauuaaaaaaucaauaaaaauuaaaaaugagcaagaucuaaaaaaaaaaaaaaaaaaaaaaaaaaaaaaaaaaaaaaaaaaaaaaaaaaaaaaaaaaaaaaaaugcaucccccccccccccccccccccccccccccccaaaggcucuuuucagagccaccagaauu

SEQ ID NO: 9961 - RNA, 1362 nt, Artificial Sequence
  mRNA product Design g-3 comprising derived and/or modified sequence from HRSV(A2)__P0DOE7.1__M (opt4)
gggagaguccgcucagccagguugcagaagcggcuuagcguguguccuaaucuucucucugcguguagguaggccugugccgcaaacaagcuuaccauggagaccuacgugaacaagcugcacgagggcagcaccuacaccgccgccgugcaguacaacgugcuggagaaggacgacgaccccgccagccugaccaucugggugcccauguuccagagcagcaugcccgccgaccugcugaucaaggagcuggccaacgugaacauccuggugaagcagaucagcacccccaagggccccagccugagagugaugaucaacagcagaagcgccgugcuggcccagaugcccagcaaguucaccaucugcgccaacgugagccuggacgagagaagcaagcuggccuacgacgugaccacccccugcgagaucaaggccugcagccugaccugccugaagagcaagaacaugcugaccaccgugaaggaccugaccaugaagacccugaaccccacccacgacaucaucgcccugugcgaguucgagaacaucgugaccagcaagaaggugaucauccccaccuaccugagaagcaucagcgugagaaacaaggaccugaacacccuggagaacaucaccaccaccgaguucaagaacgccaucaccaacgccaagaucauccccuacagcggccugcugcuggugaucaccgugaccgacaacaagggcgccuucaaguacaucaagccccagagccaguucaucguggaccugggcgccuaccuggagaaggagagcaucuacuacgugaccaccaacuggaagcacaccgccaccagauucgccaucaagcccauggaggacugaggacuagugaagggaacacccaaauuuaauucagccuuaagcacaauuaauuaagagugaaacguaauuguacaagcaguuggucacccaccauagggcaugaucaacaccgcaaccuuuccuuuuucccccagugauucugaaaaaccccucuucccuucagcuugcuuagauguuccaaauuuaguaagcuuaaggcggccuacagaagaaaaagaaaaaaaaggccacaaaaguucccucucacuuucaguaaauaaaauaaaagcagcaacagaaauaaagaaauaaaugaaauucaaaaugaaauaaauauuguguugugcagcauuaaaaaaucaauaaaaauuaaaaaugagcaagaucuaaaaaaaaaaaaaaaaaaaaaaaaaaaaaaaaaaaaaaaaaaaaaaaaaaaaaaaaaaaaaaaaugcaucccccccccccccccccccccccccccccccaaaggcucuuuucagagccaccagaauu

SEQ ID NO: 9962 - RNA, 1362 nt, Artificial Sequence
  mRNA product Design g-3 comprising derived and/or modified sequence from HRSV(A2)__P0DOE7.1__M (opt5)
gggagaguccgcucagccagguugcagaagcggcuuagcguguguccuaaucuucucucugcguguagguaggccugugccgcaaacaagcuuaccauggagaccuacgugaacaagcugcacgaaggcagcacauauacggccgcuguccaguacaauguucucgagaaagacgaugaccccgccucccugaccaucugggugccuauguuccaaucuagcaugccggcggaucuucugauuaaggaacucgcuaacgugaauauccuggucaaacagauuuccacacccaaggggccuucucuuagagugaugaucaacagccgguccgccguucuggcccagaugcccucuaaauuuaccauuugcgcuaaugugagccucgacgagcgcuccaagcuggccuaugaugucacaaccccuugugaaaucaaggcuugcagccugacaugucucaaaucuaagaacaugcugaccacggugaaagaccuuaccaugaagacacugaaucccacccaugauaucauugcccucugcgaguucgagaacaucguuacauccaaaaaggugauuaucccuaccuaccugagaagcauuucuguccggaauaaggaccuuaacacgcuggaaaauaucacaaccacagaguuuaaaaacgcgauuaccaaugccaagaucaucccguauuccggacuccugcuggugauuaccgugacagauaacaaaggcgcuuucaaguacaucaaaccccagagccaauuuauugucgaccucggggccuaucuggaaaaggagucuaucuacuacguuacgaccaauuggaaacacacagcuacccgcuucgccauuaagccuauggaggauugaggacuagugaagggaacacccaaauuuaauucagccuuaagcacaauuaauuaagagugaaacguaauuguacaagcaguuggucacccaccauagggcaugaucaacaccgcaaccuuuccuuuuucccccagugauucugaaaaaccccucuucccuucagcuugcuuagauguuccaaauuuaguaagcuuaaggcggccuacagaagaaaaagaaaaaaaaggccacaaaaguucccucucacuuucaguaaauaaaauaaaagcagcaacagaaauaaagaaauaaaugaaauucaaaaugaaauaaauauuguguugugcagcauuaaaaaaucaauaaaaauuaaaaaugagcaagaucuaaaaaaaaaaaaaaaaaaaaaaaaaaaaaaaaaaaaaaaaaaaaaaaaaaaaaaaaaaaaaaaaugcaucccccccccccccccccccccccccccccccaaaggcucuuuucagagccaccagaauu

SEQ ID NO: 9963 - RNA, 1362 nt, Artificial Sequence
  mRNA product Design g-3 comprising derived and/or modified sequence from HRSV(A2)__P0DOE7.1__M (opt6)
gggagaguccgcucagccagguugcagaagcggcuuagcguguguccuaaucuucucucugcguguagguaggccugugccgcaaacaagcuuaccauggaaacauacguaaacaaacuacacgaaggauccacauacacagcagcaguacaauacaacguacuagaaaaagacgacgacccagcaucuuuaaccauauggguaccaauguuccaaucaucaaugccagcagaccucuuaauaaaagaacuagcaaacguaaacauccuagucaaacaaauaucaacacccaaaggaccaucccucagaguaaugaucaacucaagaucagcaguacuagcacaaaugccaucaaaauucacaauaugcgccaacguuucuuuagacgaacgaucaaaauuagccuacgacguaacaacacccugcgaaauaaaagcaugcucacuaacaugccuaaaaucaaaaaacaugcucacuacaguaaaagaccuaaccaugaaaacacucaacccaacacacgacauaauagcccuaugcgaauuugaaaacauaguaacaucaaaaaaaguaauaaucccaacauacuuaagaucgaucucagucagaaacaaagaccuaaauacacucgaaaacauaacaacaacagaauuuaaaaacgcaauaacaaacgcaaaaauaauaccauacucaggacuacuccuaguaauaacaguaacagacaacaaaggagcauucaaauacauaaaaccacaaucacaauucaucguagaccucggagcauaccuagaaaaagaaucaauauacuacguaacaacaaacuggaaacacaccgccacaagauucgcaauaaaacccauggaagacuaaggacuagugaagggaacacccaaauuuaauucagccuuaagcacaauuaauuaagagugaaacguaauuguacaagcaguuggucacccaccauagggcaugaucaacaccgcaaccuuuccuuuuucccccagugauucugaaaaaccccucuucccuucagcuugcuuagauguuccaaauuuaguaagcuuaaggcggccuacagaagaaaaagaaaaaaaaggccacaaaaguucccucucacuuucaguaaauaaaauaaaagcagcaacagaaauaaagaaauaaaugaaauucaaaaugaaauaaauauuguguugugcagcauuaaaaaaucaauaaaaauuaaaaaugagcaagaucuaaaaaaaaaaaaaaaaaaaaaaaaaaaaaaaaaaaaaaaaaaaaaaaaaaaaaaaaaaaaaaaaugcaucccccccccccccccccccccccccccccccaaaggcucuuuucagagccaccagaauu

SEQ ID NO: 9964 - RNA, 1362 nt, Artificial Sequence
  mRNA product Design g-3 comprising derived and/or modified sequence from HRSV(A2)__P0DOE7.1__M (opt11)
gggagaguccgcucagccagguugcagaagcggcuuagcguguguccuaaucuucucucugcguguagguaggccugugccgcaaacaagcuuaccauggaaaccuacgucaacaaacuacacgaaggcucaaccuacaccgccgccguccaauacaacguccucgaaaaagacgacgaccccgccucccuaaccaucuggguucccauguuccaaucauccaugcccgccgaccuccucauaaaagaacuagccaacgucaacauccuagucaaacaaaucagcacccccaaaggccccucccuccgcguaaugaucaacucccgcuccgccguccuagcccaaaugcccuccaaauuuacaaucugcgccaacgucucccucgacgaacgcucaaaacucgccuacgacgucaccacacccugcgaaaucaaagccugcucccucaccugccucaaaagcaaaaauaugcuaaccaccgucaaagaccuuaccaugaaaacccucaaccccacucacgacaucauagcccucugcgaauuugaaaacaucgucaccuccaaaaaagucaucauccccacauaccuccgcuccaucuccguccgcaacaaagaccucaacacccucgaaaacaucaccaccaccgaauuuaaaaacgccaucaccaacgccaaaaucauccccuacuccggccuccuccucgucaucaccguuaccgacaacaaaggcgccuucaaauacaucaaaccccaaucccaauucaucgucgaccucggagccuaccuugaaaaagaguccaucuacuacgucaccaccaacuggaaacacaccgccacccgauucgccaucaaacccauggaagacuaaggacuagugaagggaacacccaaauuuaauucagccuuaagcacaauuaauuaagagugaaacguaauuguacaagcaguuggucacccaccauagggcaugaucaacaccgcaaccuuuccuuuuucccccagugauucugaaaaaccccucuucccuucagcuugcuuagauguuccaaauuuaguaagcuuaaggcggccuacagaagaaaaagaaaaaaaaggccacaaaaguucccucucacuuucaguaaauaaaauaaaagcagcaacagaaauaaagaaauaaaugaaauucaaaaugaaauaaauauuguguugugcagcauuaaaaaaucaauaaaaauuaaaaaugagcaagaucuaaaaaaaaaaaaaaaaaaaaaaaaaaaaaaaaaaaaaaaaaaaaaaaaaaaaaaaaaaaaaaaaugcaucccccccccccccccccccccccccccccccaaaggcucuuuucagagccaccagaauu

SEQ ID NO: 9965 - RNA, 1157 nt, Artificial Sequence
  mRNA product Design g-4 comprising derived and/or modified sequence from HRSV(A2)__P0DOE7.1__M (wt)
gggagacuccugucgggcggaaguaggaggaguagaguuuaaaaacaguacucuuuuuccgguucgggacguaguugaagcaacgacaagccggauaaccgcucuugagacaggaagcuuaccauggaaacauacgugaacaagcuucacgaaggcuccacauacacagcugcuguucaauacaaugucuuagaaaaagacgaugacccugcaucacuuacaauaugggugcccauguuccaaucaucuaugccagcagauuuacuuauaaaagaacuagcuaaugucaacauacuagugaaacaaauauccacacccaagggaccuucacuaagagucaugauaaacucaagaagugcagugcuagcacaaaugcccagcaaauuuaccauaugcgcuaauguguccuuggaugaaagaagcaaacuagcauaugauguaaccacacccugugaaaucaaggcauguagucuaacaugccuaaaaucaaaaaauauguugacuacaguuaaagaucucacuaugaagacacucaacccuacacaugauauuauugcuuuaugugaauuugaaaacauaguaacaucaaaaaaagucauaauaccaacauaccuaagauccaucagugucagaaauaaagaucugaacacacuugaaaauauaacaaccacugaauucaaaaaugcuaucacaaaugcaaaaaucaucccuuacucaggauuacuauuagucaucacagugacugacaacaaaggagcauucaaauacauaaagccacaaagucaauucauaguagaucuuggagcuuaccuagaaaaagaaaguauauauuauguuaccacaaauuggaagcacacagcuacacgauuugcaaucaaacccauggaagauuaaggacuaguaauaaggaaacuguaugaaugucugugggcaggaagugaagagauccuucuguaaagguuuuuggaauuaugucugcugaauaauaaacuuuuuugaaauaauaaaucugguagaaaaaugagaucuaaaaaaaaaaaaaaaaaaaaaaaaaaaaaaaaaaaaaaaaaaaaaaaaaaaaaaaaaaaaaaaaugcaucccccccccccccccccccccccccccccccaaaggcucuuuucagagccaccagaauu

SEQ ID NO: 9966 - RNA, 1157 nt, Artificial Sequence
  mRNA product Design g-4 comprising derived and/or modified sequence from HRSV(A2)__P0DOE7.1__M (opt1)
gggagacuccugucgggcggaaguaggaggaguagaguuuaaaaacaguacucuuuuuccgguucgggacguaguugaagcaacgacaagccggauaaccgcucuugagacaggaagcuuaccauggagaccuacgugaacaagcugcacgagggcagcaccuacacggccgccguccaguacaacgugcucgagaaggacgacgaccccgcgucccugaccaucugggugccgauguuccagagcuccaugcccgccgaccugcucaucaaggagcuggccaacgucaacauccuggugaagcagaucagcacccccaaggggcccucccuccgcgugaugaucaacagccgguccgccguccuggcccagaugccgagcaaguucaccaucugcgcgaacgugucccuggacgagcgcagcaagcucgccuacgacgugacgacccccugcgagaucaaggccugcucccugaccugccucaagagcaagaacaugcugaccacggucaaggaccugaccaugaagacccugaaccccacccacgacaucaucgcccucugcgaguucgagaacaucgugacguccaagaaggugaucauccccaccuaccugcggagcaucuccguccgcaacaaggaccugaacacccucgagaacaucaccacgaccgaguucaagaacgcgaucaccaacgccaagaucaucccguacagcggccugcugcucgugaucaccgugacggacaacaagggggccuucaaguacaucaagccccagucccaguucaucgucgaccugggcgccuaccuggagaaggagagcaucuacuacgugaccaccaacuggaagcacaccgccacgcgguucgcgaucaagcccauggaggacugaggacuaguaauaaggaaacuguaugaaugucugugggcaggaagugaagagauccuucuguaaagguuuuuggaauuaugucugcugaauaauaaacuuuuuugaaauaauaaaucugguagaaaaaugagaucuaaaaaaaaaaaaaaaaaaaaaaaaaaaaaaaaaaaaaaaaaaaaaaaaaaaaaaaaaaaaaaaaugcaucccccccccccccccccccccccccccccccaaaggcucuuuucagagccaccagaauu

SEQ ID NO: 9967 - RNA, 1157 nt, Artificial Sequence
  mRNA product Design g-4 comprising derived and/or modified sequence from HRSV(A2)__P0DOE7.1__M (opt2)
gggagacuccugucgggcggaaguaggaggaguagaguuuaaaaacaguacucuuuuuccgguucgggacguaguugaagcaacgacaagccggauaaccgcucuugagacaggaagcuuaccauggagaccuacgucaacaagcuccacgagggcuccaccuacaccgccgccguccaguacaacguccucgagaaggacgacgaccccgccucccucaccaucuggguccccauguuccaguccuccaugcccgccgaccuccucaucaaggagcucgccaacgucaacauccucgucaagcagaucuccacccccaagggccccucccuccgcgucaugaucaacucccgcuccgccguccucgcccagaugcccuccaaguucaccaucugcgccaacgucucccucgacgagcgcuccaagcucgccuacgacgucaccacccccugcgagaucaaggccugcucccucaccugccucaaguccaagaacaugcucaccaccgucaaggaccucaccaugaagacccucaaccccacccacgacaucaucgcccucugcgaguucgagaacaucgucaccuccaagaaggucaucauccccaccuaccuccgcuccaucuccguccgcaacaaggaccucaacacccucgagaacaucaccaccaccgaguucaagaacgccaucaccaacgccaagaucauccccuacuccggccuccuccucgucaucaccgucaccgacaacaagggcgccuucaaguacaucaagccccagucccaguucaucgucgaccucggcgccuaccucgagaaggaguccaucuacuacgucaccaccaacuggaagcacaccgccacccgcuucgccaucaagcccauggaggacugaggacuaguaauaaggaaacuguaugaaugucugugggcaggaagugaagagauccuucuguaaagguuuuuggaauuaugucugcugaauaauaaacuuuuuugaaauaauaaaucugguagaaaaaugagaucuaaaaaaaaaaaaaaaaaaaaaaaaaaaaaaaaaaaaaaaaaaaaaaaaaaaaaaaaaaaaaaaaugcaucccccccccccccccccccccccccccccccaaaggcucuuuucagagccaccagaauu

SEQ ID NO: 9968 - RNA, 1157 nt, Artificial Sequence
  mRNA product Design g-4 comprising derived and/or modified sequence from HRSV(A2)__P0DOE7.1__M (opt3)
gggagacuccugucgggcggaaguaggaggaguagaguuuaaaaacaguacucuuuuuccgguucgggacguaguugaagcaacgacaagccggauaaccgcucuugagacaggaagcuuaccauggagaccuacgugaacaagcugcacgaaggcagcacauauacugccgcuguccaguacaauguucucgagaaagacgaugaccccgcaucccuuacgaucugggugccuauguuccaaucuucaaugccagccgaucuguugauuaaggaauuagcgaacguaaauauacuggugaaacagaucaguaccccgaaggggcccagccuaagagucaugauuaacuccaggucugcugugcucgcccagaugccuucgaaauuuacaaucugcgcaaauguuucacuggacgagcggagcaaacuugccuaugaugugacuaccccaugugaaauuaaggcuugcagucugacauguuugaaguccaagaacaugcucaccacugucaaagaccugacaaugaagacccugaaucccacgcaugauaucauagcacucugcgaguucgagaacaucgugacuucuaaaaagguaauuaucccuaccuacuuacgcagcauuuccguucgaaauaaggaccugaacacacuugaaaauaucacuaccacagaguuuaaaaacgccauaaccaaugcuaagauuaucccauauucaggauugcugcuagugauuacggucacugauaacaaaggugccuucaaguacaucaaaccccagagucaauuuaucguggaccucggcgcguaucuggaaaaggagagcauuuacuacgugacaaccaauuggaaacacacugcaacacguuucgccauaaagccuauggaggauugaggacuaguaauaaggaaacuguaugaaugucugugggcaggaagugaagagauccuucuguaaagguuuuuggaauuaugucugcugaauaauaaacuuuuuugaaauaauaaaucugguagaaaaaugagaucuaaaaaaaaaaaaaaaaaaaaaaaaaaaaaaaaaaaaaaaaaaaaaaaaaaaaaaaaaaaaaaaaugcaucccccccccccccccccccccccccccccccaaaggcucuuuucagagccaccagaauu

SEQ ID NO: 9969 - RNA, 1157 nt, Artificial Sequence
  mRNA product Design g-4 comprising derived and/or modified sequence from HRSV(A2)__P0DOE7.1__M (opt4)
gggagacuccugucgggcggaaguaggaggaguagaguuuaaaaacaguacucuuuuuccgguucgggacguaguugaagcaacgacaagccggauaaccgcucuugagacaggaagcuuaccauggagaccuacgugaacaagcugcacgagggcagcaccuacaccgccgccgugcaguacaacgugcuggagaaggacgacgaccccgccagccugaccaucugggugcccauguuccagagcagcaugcccgccgaccugcugaucaaggagcuggccaacgugaacauccuggugaagcagaucagcacccccaagggccccagccugagagugaugaucaacagcagaagcgccgugcuggcccagaugcccagcaaguucaccaucugcgccaacgugagccuggacgagagaagcaagcuggccuacgacgugaccacccccugcgagaucaaggccugcagccugaccugccugaagagcaagaacaugcugaccaccgugaaggaccugaccaugaagacccugaaccccacccacgacaucaucgcccugugcgaguucgagaacaucgugaccagcaagaaggugaucauccccaccuaccugagaagcaucagcgugagaaacaaggaccugaacacccuggagaacaucaccaccaccgaguucaagaacgccaucaccaacgccaagaucauccccuacagcggccugcugcuggugaucaccgugaccgacaacaagggcgccuucaaguacaucaagccccagagccaguucaucguggaccugggcgccuaccuggagaaggagagcaucuacuacgugaccaccaacuggaagcacaccgccaccagauucgccaucaagcccauggaggacugaggacuaguaauaaggaaacuguaugaaugucugugggcaggaagugaagagauccuucuguaaagguuuuuggaauuaugucugcugaauaauaaacuuuuuugaaauaauaaaucugguagaaaaaugagaucuaaaaaaaaaaaaaaaaaaaaaaaaaaaaaaaaaaaaaaaaaaaaaaaaaaaaaaaaaaaaaaaaugcaucccccccccccccccccccccccccccccccaaaggcucuuuucagagccaccagaauu

SEQ ID NO: 9970 - RNA, 1157 nt, Artificial Sequence
  mRNA product Design g-4 comprising derived and/or modified sequence from HRSV(A2)__P0DOE7.1__M (opt5)
gggagacuccugucgggcggaaguaggaggaguagaguuuaaaaacaguacucuuuuuccgguucgggacguaguugaagcaacgacaagccggauaaccgcucuugagacaggaagcuuaccauggagaccuacgugaacaagcugcacgaaggcagcacauauacggccgcuguccaguacaauguucucgagaaagacgaugaccccgccucccugaccaucugggugccuauguuccaaucuagcaugccggcggaucuucugauuaaggaacucgcuaacgugaauauccuggucaaacagauuuccacacccaaggggccuucucuuagagugaugaucaacagccgguccgccguucuggcccagaugcccucuaaauuuaccauuugcgcuaaugugagccucgacgagcgcuccaagcuggccuaugaugucacaaccccuugugaaaucaaggcuugcagccugacaugucucaaaucuaagaacaugcugaccacggugaaagaccuuaccaugaagacacugaaucccacccaugauaucauugcccucugcgaguucgagaacaucguuacauccaaaaaggugauuaucccuaccuaccugagaagcauuucuguccggaauaaggaccuuaacacgcuggaaaauaucacaaccacagaguuuaaaaacgcgauuaccaaugccaagaucaucccguauuccggacuccugcuggugauuaccgugacagauaacaaaggcgcuuucaaguacaucaaaccccagagccaauuuauugucgaccucggggccuaucuggaaaaggagucuaucuacuacguuacgaccaauuggaaacacacagcuacccgcuucgccauuaagccuauggaggauugaggacuaguaauaaggaaacuguaugaaugucugugggcaggaagugaagagauccuucuguaaagguuuuuggaauuaugucugcugaauaauaaacuuuuuugaaauaauaaaucugguagaaaaaugagaucuaaaaaaaaaaaaaaaaaaaaaaaaaaaaaaaaaaaaaaaaaaaaaaaaaaaaaaaaaaaaaaaaugcaucccccccccccccccccccccccccccccccaaaggcucuuuucagagccaccagaauu

SEQ ID NO: 9971 - RNA, 1157 nt, Artificial Sequence
  mRNA product Design g-4 comprising derived and/or modified sequence from HRSV(A2)__P0DOE7.1__M (opt6)
gggagacuccugucgggcggaaguaggaggaguagaguuuaaaaacaguacucuuuuuccgguucgggacguaguugaagcaacgacaagccggauaaccgcucuugagacaggaagcuuaccauggaaacauacguaaacaaacuacacgaaggauccacauacacagcagcaguacaauacaacguacuagaaaaagacgacgacccagcaucuuuaaccauauggguaccaauguuccaaucaucaaugccagcagaccucuuaauaaaagaacuagcaaacguaaacauccuagucaaacaaauaucaacacccaaaggaccaucccucagaguaaugaucaacucaagaucagcaguacuagcacaaaugccaucaaaauucacaauaugcgccaacguuucuuuagacgaacgaucaaaauuagccuacgacguaacaacacccugcgaaauaaaagcaugcucacuaacaugccuaaaaucaaaaaacaugcucacuacaguaaaagaccuaaccaugaaaacacucaacccaacacacgacauaauagcccuaugcgaauuugaaaacauaguaacaucaaaaaaaguaauaaucccaacauacuuaagaucgaucucagucagaaacaaagaccuaaauacacucgaaaacauaacaacaacagaauuuaaaaacgcaauaacaaacgcaaaaauaauaccauacucaggacuacuccuaguaauaacaguaacagacaacaaaggagcauucaaauacauaaaaccacaaucacaauucaucguagaccucggagcauaccuagaaaaagaaucaauauacuacguaacaacaaacuggaaacacaccgccacaagauucgcaauaaaacccauggaagacuaaggacuaguaauaaggaaacuguaugaaugucugugggcaggaagugaagagauccuucuguaaagguuuuuggaauuaugucugcugaauaauaaacuuuuuugaaauaauaaaucugguagaaaaaugagaucuaaaaaaaaaaaaaaaaaaaaaaaaaaaaaaaaaaaaaaaaaaaaaaaaaaaaaaaaaaaaaaaaugcaucccccccccccccccccccccccccccccccaaaggcucuuuucagagccaccagaauu

SEQ ID NO: 9972 - RNA, 1157 nt, Artificial Sequence
  mRNA product Design g-4 comprising derived and/or modified sequence from HRSV(A2)__P0DOE7.1__M (opt11)
gggagacuccugucgggcggaaguaggaggaguagaguuuaaaaacaguacucuuuuuccgguucgggacguaguugaagcaacgacaagccggauaaccgcucuugagacaggaagcuuaccauggaaaccuacgucaacaaacuacacgaaggcucaaccuacaccgccgccguccaauacaacguccucgaaaaagacgacgaccccgccucccuaaccaucuggguucccauguuccaaucauccaugcccgccgaccuccucauaaaagaacuagccaacgucaacauccuagucaaacaaaucagcacccccaaaggccccucccuccgcguaaugaucaacucccgcuccgccguccuagcccaaaugcccuccaaauuuacaaucugcgccaacgucucccucgacgaacgcucaaaacucgccuacgacgucaccacacccugcgaaaucaaagccugcucccucaccugccucaaaagcaaaaauaugcuaaccaccgucaaagaccuuaccaugaaaacccucaaccccacucacgacaucauagcccucugcgaauuugaaaacaucgucaccuccaaaaaagucaucauccccacauaccuccgcuccaucuccguccgcaacaaagaccucaacacccucgaaaacaucaccaccaccgaauuuaaaaacgccaucaccaacgccaaaaucauccccuacuccggccuccuccucgucaucaccguuaccgacaacaaaggcgccuucaaauacaucaaaccccaaucccaauucaucgucgaccucggagccuaccuugaaaaagaguccaucuacuacgucaccaccaacuggaaacacaccgccacccgauucgccaucaaacccauggaagacuaaggacuaguaauaaggaaacuguaugaaugucugugggcaggaagugaagagauccuucuguaaagguuuuuggaauuaugucugcugaauaauaaacuuuuuugaaauaauaaaucugguagaaaaaugagaucuaaaaaaaaaaaaaaaaaaaaaaaaaaaaaaaaaaaaaaaaaaaaaaaaaaaaaaaaaaaaaaaaugcaucccccccccccccccccccccccccccccccaaaggcucuuuucagagccaccagaauu

SEQ ID NO: 9973 - RNA, 1133 nt, Artificial Sequence
  mRNA product Design g-5 comprising derived and/or modified sequence from HRSV(A2)__P0DOE7.1__M (wt)
gggagacccgugacccggaaguuguacggcuacgcgacuuucccucccacaaacccucgcgcccuuccuuuccuacuugggcccggcagaaagcuuaccauggaaacauacgugaacaagcuucacgaaggcuccacauacacagcugcuguucaauacaaugucuuagaaaaagacgaugacccugcaucacuuacaauaugggugcccauguuccaaucaucuaugccagcagauuuacuuauaaaagaacuagcuaaugucaacauacuagugaaacaaauauccacacccaagggaccuucacuaagagucaugauaaacucaagaagugcagugcuagcacaaaugcccagcaaauuuaccauaugcgcuaauguguccuuggaugaaagaagcaaacuagcauaugauguaaccacacccugugaaaucaaggcauguagucuaacaugccuaaaaucaaaaaauauguugacuacaguuaaagaucucacuaugaagacacucaacccuacacaugauauuauugcuuuaugugaauuugaaaacauaguaacaucaaaaaaagucauaauaccaacauaccuaagauccaucagugucagaaauaaagaucugaacacacuugaaaauauaacaaccacugaauucaaaaaugcuaucacaaaugcaaaaaucaucccuuacucaggauuacuauuagucaucacagugacugacaacaaaggagcauucaaauacauaaagccacaaagucaauucauaguagaucuuggagcuuaccuagaaaaagaaaguauauauuauguuaccacaaauuggaagcacacagcuacacgauuugcaaucaaacccauggaagauuaaggacuaguaauaaggaaacuguaugaaugucugugggcaggaagugaagagauccuucuguaaagguuuuuggaauuaugucugcugaauaauaaacuuuuuugaaauaauaaaucugguagaaaaaugagaucuaaaaaaaaaaaaaaaaaaaaaaaaaaaaaaaaaaaaaaaaaaaaaaaaaaaaaaaaaaaaaaaaugcaucccccccccccccccccccccccccccccccaaaggcucuuuucagagccaccagaauu

SEQ ID NO: 9974 - RNA, 1133 nt, Artificial Sequence
  mRNA product Design g-5 comprising derived and/or modified sequence from HRSV(A2)__P0DOE7.1__M (opt1)
gggagacccgugacccggaaguuguacggcuacgcgacuuucccucccacaaacccucgcgcccuuccuuuccuacuugggcccggcagaaagcuuaccauggagaccuacgugaacaagcugcacgagggcagcaccuacacggccgccguccaguacaacgugcucgagaaggacgacgaccccgcgucccugaccaucugggugccgauguuccagagcuccaugcccgccgaccugcucaucaaggagcuggccaacgucaacauccuggugaagcagaucagcacccccaaggggcccucccuccgcgugaugaucaacagccgguccgccguccuggcccagaugccgagcaaguucaccaucugcgcgaacgugucccuggacgagcgcagcaagcucgccuacgacgugacgacccccugcgagaucaaggccugcucccugaccugccucaagagcaagaacaugcugaccacggucaaggaccugaccaugaagacccugaaccccacccacgacaucaucgcccucugcgaguucgagaacaucgugacguccaagaaggugaucauccccaccuaccugcggagcaucuccguccgcaacaaggaccugaacacccucgagaacaucaccacgaccgaguucaagaacgcgaucaccaacgccaagaucaucccguacagcggccugcugcucgugaucaccgugacggacaacaagggggccuucaaguacaucaagccccagucccaguucaucgucgaccugggcgccuaccuggagaaggagagcaucuacuacgugaccaccaacuggaagcacaccgccacgcgguucgcgaucaagcccauggaggacugaggacuaguaauaaggaaacuguaugaaugucugugggcaggaagugaagagauccuucuguaaagguuuuuggaauuaugucugcugaauaauaaacuuuuuugaaauaauaaaucugguagaaaaaugagaucuaaaaaaaaaaaaaaaaaaaaaaaaaaaaaaaaaaaaaaaaaaaaaaaaaaaaaaaaaaaaaaaaugcaucccccccccccccccccccccccccccccccaaaggcucuuuucagagccaccagaauu

SEQ ID NO: 9975 - RNA, 1133 nt, Artificial Sequence
  mRNA product Design g-5 comprising derived and/or modified sequence from HRSV(A2)__P0DOE7.1__M (opt2)
gggagacccgugacccggaaguuguacggcuacgcgacuuucccucccacaaacccucgcgcccuuccuuuccuacuugggcccggcagaaagcuuaccauggagaccuacgucaacaagcuccacgagggcuccaccuacaccgccgccguccaguacaacguccucgagaaggacgacgaccccgccucccucaccaucuggguccccauguuccaguccuccaugcccgccgaccuccucaucaaggagcucgccaacgucaacauccucgucaagcagaucuccacccccaagggccccucccuccgcgucaugaucaacucccgcuccgccguccucgcccagaugcccuccaaguucaccaucugcgccaacgucucccucgacgagcgcuccaagcucgccuacgacgucaccacccccugcgagaucaaggccugcucccucaccugccucaaguccaagaacaugcucaccaccgucaaggaccucaccaugaagacccucaaccccacccacgacaucaucgcccucugcgaguucgagaacaucgucaccuccaagaaggucaucauccccaccuaccuccgcuccaucuccguccgcaacaaggaccucaacacccucgagaacaucaccaccaccgaguucaagaacgccaucaccaacgccaagaucauccccuacuccggccuccuccucgucaucaccgucaccgacaacaagggcgccuucaaguacaucaagccccagucccaguucaucgucgaccucggcgccuaccucgagaaggaguccaucuacuacgucaccaccaacuggaagcacaccgccacccgcuucgccaucaagcccauggaggacugaggacuaguaauaaggaaacuguaugaaugucugugggcaggaagugaagagauccuucuguaaagguuuuuggaauuaugucugcugaauaauaaacuuuuuugaaauaauaaaucugguagaaaaaugagaucuaaaaaaaaaaaaaaaaaaaaaaaaaaaaaaaaaaaaaaaaaaaaaaaaaaaaaaaaaaaaaaaaugcaucccccccccccccccccccccccccccccccaaaggcucuuuucagagccaccagaauu

SEQ ID NO: 9976 - RNA, 1133 nt, Artificial Sequence
  mRNA product Design g-5 comprising derived and/or modified sequence from HRSV(A2)__P0DOE7.1__M (opt3)
gggagacccgugacccggaaguuguacggcuacgcgacuuucccucccacaaacccucgcgcccuuccuuuccuacuugggcccggcagaaagcuuaccauggagaccuacgugaacaagcugcacgaaggcagcacauauacugccgcuguccaguacaauguucucgagaaagacgaugaccccgcaucccuuacgaucugggugccuauguuccaaucuucaaugccagccgaucuguugauuaaggaauuagcgaacguaaauauacuggugaaacagaucaguaccccgaaggggcccagccuaagagucaugauuaacuccaggucugcugugcucgcccagaugccuucgaaauuuacaaucugcgcaaauguuucacuggacgagcggagcaaacuugccuaugaugugacuaccccaugugaaauuaaggcuugcagucugacauguuugaaguccaagaacaugcucaccacugucaaagaccugacaaugaagacccugaaucccacgcaugauaucauagcacucugcgaguucgagaacaucgugacuucuaaaaagguaauuaucccuaccuacuuacgcagcauuuccguucgaaauaaggaccugaacacacuugaaaauaucacuaccacagaguuuaaaaacgccauaaccaaugcuaagauuaucccauauucaggauugcugcuagugauuacggucacugauaacaaaggugccuucaaguacaucaaaccccagagucaauuuaucguggaccucggcgcguaucuggaaaaggagagcauuuacuacgugacaaccaauuggaaacacacugcaacacguuucgccauaaagccuauggaggauugaggacuaguaauaaggaaacuguaugaaugucugugggcaggaagugaagagauccuucuguaaagguuuuuggaauuaugucugcugaauaauaaacuuuuuugaaauaauaaaucugguagaaaaaugagaucuaaaaaaaaaaaaaaaaaaaaaaaaaaaaaaaaaaaaaaaaaaaaaaaaaaaaaaaaaaaaaaaaugcaucccccccccccccccccccccccccccccccaaaggcucuuuucagagccaccagaauu

SEQ ID NO: 9977 - RNA, 1133 nt, Artificial Sequence
  mRNA product Design g-5 comprising derived and/or modified sequence from HRSV(A2)__P0DOE7.1__M (opt4)
gggagacccgugacccggaaguuguacggcuacgcgacuuucccucccacaaacccucgcgcccuuccuuuccuacuugggcccggcagaaagcuuaccauggagaccuacgugaacaagcugcacgagggcagcaccuacaccgccgccgugcaguacaacgugcuggagaaggacgacgaccccgccagccugaccaucugggugcccauguuccagagcagcaugcccgccgaccugcugaucaaggagcuggccaacgugaacauccuggugaagcagaucagcacccccaagggccccagccugagagugaugaucaacagcagaagcgccgugcuggcccagaugcccagcaaguucaccaucugcgccaacgugagccuggacgagagaagcaagcuggccuacgacgugaccacccccugcgagaucaaggccugcagccugaccugccugaagagcaagaacaugcugaccaccgugaaggaccugaccaugaagacccugaaccccacccacgacaucaucgcccugugcgaguucgagaacaucgugaccagcaagaaggugaucauccccaccuaccugagaagcaucagcgugagaaacaaggaccugaacacccuggagaacaucaccaccaccgaguucaagaacgccaucaccaacgccaagaucauccccuacagcggccugcugcuggugaucaccgugaccgacaacaagggcgccuucaaguacaucaagccccagagccaguucaucguggaccugggcgccuaccuggagaaggagagcaucuacuacgugaccaccaacuggaagcacaccgccaccagauucgccaucaagcccauggaggacugaggacuaguaauaaggaaacuguaugaaugucugugggcaggaagugaagagauccuucuguaaagguuuuuggaauuaugucugcugaauaauaaacuuuuuugaaauaauaaaucugguagaaaaaugagaucuaaaaaaaaaaaaaaaaaaaaaaaaaaaaaaaaaaaaaaaaaaaaaaaaaaaaaaaaaaaaaaaaugcaucccccccccccccccccccccccccccccccaaaggcucuuuucagagccaccagaauu

SEQ ID NO: 9978 - RNA, 1133 nt, Artificial Sequence
  mRNA product Design g-5 comprising derived and/or modified sequence from HRSV(A2)__P0DOE7.1__M (opt5)
gggagacccgugacccggaaguuguacggcuacgcgacuuucccucccacaaacccucgcgcccuuccuuuccuacuugggcccggcagaaagcuuaccauggagaccuacgugaacaagcugcacgaaggcagcacauauacggccgcuguccaguacaauguucucgagaaagacgaugaccccgccucccugaccaucugggugccuauguuccaaucuagcaugccggcggaucuucugauuaaggaacucgcuaacgugaauauccuggucaaacagauuuccacacccaaggggccuucucuuagagugaugaucaacagccgguccgccguucuggcccagaugcccucuaaauuuaccauuugcgcuaaugugagccucgacgagcgcuccaagcuggccuaugaugucacaaccccuugugaaaucaaggcuugcagccugacaugucucaaaucuaagaacaugcugaccacggugaaagaccuuaccaugaagacacugaaucccacccaugauaucauugcccucugcgaguucgagaacaucguuacauccaaaaaggugauuaucccuaccuaccugagaagcauuucuguccggaauaaggaccuuaacacgcuggaaaauaucacaaccacagaguuuaaaaacgcgauuaccaaugccaagaucaucccguauuccggacuccugcuggugauuaccgugacagauaacaaaggcgcuuucaaguacaucaaaccccagagccaauuuauugucgaccucggggccuaucuggaaaaggagucuaucuacuacguuacgaccaauuggaaacacacagcuacccgcuucgccauuaagccuauggaggauugaggacuaguaauaaggaaacuguaugaaugucugugggcaggaagugaagagauccuucuguaaagguuuuuggaauuaugucugcugaauaauaaacuuuuuugaaauaauaaaucugguagaaaaaugagaucuaaaaaaaaaaaaaaaaaaaaaaaaaaaaaaaaaaaaaaaaaaaaaaaaaaaaaaaaaaaaaaaaugcaucccccccccccccccccccccccccccccccaaaggcucuuuucagagccaccagaauu

SEQ ID NO: 9979 - RNA, 1133 nt, Artificial Sequence
  mRNA product Design g-5 comprising derived and/or modified sequence from HRSV(A2)__P0DOE7.1__M (opt6)
gggagacccgugacccggaaguuguacggcuacgcgacuuucccucccacaaacccucgcgcccuuccuuuccuacuugggcccggcagaaagcuuaccauggaaacauacguaaacaaacuacacgaaggauccacauacacagcagcaguacaauacaacguacuagaaaaagacgacgacccagcaucuuuaaccauauggguaccaauguuccaaucaucaaugccagcagaccucuuaauaaaagaacuagcaaacguaaacauccuagucaaacaaauaucaacacccaaaggaccaucccucagaguaaugaucaacucaagaucagcaguacuagcacaaaugccaucaaaauucacaauaugcgccaacguuucuuuagacgaacgaucaaaauuagccuacgacguaacaacacccugcgaaauaaaagcaugcucacuaacaugccuaaaaucaaaaaacaugcucacuacaguaaaagaccuaaccaugaaaacacucaacccaacacacgacauaauagcccuaugcgaauuugaaaacauaguaacaucaaaaaaaguaauaaucccaacauacuuaagaucgaucucagucagaaacaaagaccuaaauacacucgaaaacauaacaacaacagaauuuaaaaacgcaauaacaaacgcaaaaauaauaccauacucaggacuacuccuaguaauaacaguaacagacaacaaaggagcauucaaauacauaaaaccacaaucacaauucaucguagaccucggagcauaccuagaaaaagaaucaauauacuacguaacaacaaacuggaaacacaccgccacaagauucgcaauaaaacccauggaagacuaaggacuaguaauaaggaaacuguaugaaugucugugggcaggaagugaagagauccuucuguaaagguuuuuggaauuaugucugcugaauaauaaacuuuuuugaaauaauaaaucugguagaaaaaugagaucuaaaaaaaaaaaaaaaaaaaaaaaaaaaaaaaaaaaaaaaaaaaaaaaaaaaaaaaaaaaaaaaaugcaucccccccccccccccccccccccccccccccaaaggcucuuuucagagccaccagaauu

SEQ ID NO: 9980 - RNA, 1133 nt, Artificial Sequence
  mRNA product Design g-5 comprising derived and/or modified sequence from HRSV(A2)__P0DOE7.1__M (opt11)
gggagacccgugacccggaaguuguacggcuacgcgacuuucccucccacaaacccucgcgcccuuccuuuccuacuugggcccggcagaaagcuuaccauggaaaccuacgucaacaaacuacacgaaggcucaaccuacaccgccgccguccaauacaacguccucgaaaaagacgacgaccccgccucccuaaccaucuggguucccauguuccaaucauccaugcccgccgaccuccucauaaaagaacuagccaacgucaacauccuagucaaacaaaucagcacccccaaaggccccucccuccgcguaaugaucaacucccgcuccgccguccuagcccaaaugcccuccaaauuuacaaucugcgccaacgucucccucgacgaacgcucaaaacucgccuacgacgucaccacacccugcgaaaucaaagccugcucccucaccugccucaaaagcaaaaauaugcuaaccaccgucaaagaccuuaccaugaaaacccucaaccccacucacgacaucauagcccucugcgaauuugaaaacaucgucaccuccaaaaaagucaucauccccacauaccuccgcuccaucuccguccgcaacaaagaccucaacacccucgaaaacaucaccaccaccgaauuuaaaaacgccaucaccaacgccaaaaucauccccuacuccggccuccuccucgucaucaccguuaccgacaacaaaggcgccuucaaauacaucaaaccccaaucccaauucaucgucgaccucggagccuaccuugaaaaagaguccaucuacuacgucaccaccaacuggaaacacaccgccacccgauucgccaucaaacccauggaagacuaaggacuaguaauaaggaaacuguaugaaugucugugggcaggaagugaagagauccuucuguaaagguuuuuggaauuaugucugcugaauaauaaacuuuuuugaaauaauaaaucugguagaaaaaugagaucuaaaaaaaaaaaaaaaaaaaaaaaaaaaaaaaaaaaaaaaaaaaaaaaaaaaaaaaaaaaaaaaaugcaucccccccccccccccccccccccccccccccaaaggcucuuuucagagccaccagaauu

SEQ ID NO: 9981 - RNA, 1149 nt, Artificial Sequence
  mRNA product Design h-1 comprising derived and/or modified sequence from HRSV(A2)__P0DOE7.1__M (wt)
gggagacccgugacccggaaguuguacggcuacgcgacuuucccucccacaaacccucgcgcccuuccuuuccuacuugggcccggcagaaagcuuaccauggaaacauacgugaacaagcuucacgaaggcuccacauacacagcugcuguucaauacaaugucuuagaaaaagacgaugacccugcaucacuuacaauaugggugcccauguuccaaucaucuaugccagcagauuuacuuauaaaagaacuagcuaaugucaacauacuagugaaacaaauauccacacccaagggaccuucacuaagagucaugauaaacucaagaagugcagugcuagcacaaaugcccagcaaauuuaccauaugcgcuaauguguccuuggaugaaagaagcaaacuagcauaugauguaaccacacccugugaaaucaaggcauguagucuaacaugccuaaaaucaaaaaauauguugacuacaguuaaagaucucacuaugaagacacucaacccuacacaugauauuauugcuuuaugugaauuugaaaacauaguaacaucaaaaaaagucauaauaccaacauaccuaagauccaucagugucagaaauaaagaucugaacacacuugaaaauauaacaaccacugaauucaaaaaugcuaucacaaaugcaaaaaucaucccuuacucaggauuacuauuagucaucacagugacugacaacaaaggagcauucaaauacauaaagccacaaagucaauucauaguagaucuuggagcuuaccuagaaaaagaaaguauauauuauguuaccacaaauuggaagcacacagcuacacgauuugcaaucaaacccauggaagauuaaggacuaguacuggcugcaucucccuuuccucuguccuccauccuucucccaggauggugaagggggaccugguacccagugauccccaccccaggauccuaaaucaugacuuaccugcuaauaaaaacucauuggaaaagugagaagaucuaaaaaaaaaaaaaaaaaaaaaaaaaaaaaaaaaaaaaaaaaaaaaaaaaaaaaaaaaaaaaaaaugcaucccccccccccccccccccccccccccccccaaaggcucuuuucagagccaccagaauu

SEQ ID NO: 9982 - RNA, 1149 nt, Artificial Sequence
  mRNA product Design h-1 comprising derived and/or modified sequence from HRSV(A2)__P0DOE7.1__M (opt1)
gggagacccgugacccggaaguuguacggcuacgcgacuuucccucccacaaacccucgcgcccuuccuuuccuacuugggcccggcagaaagcuuaccauggagaccuacgugaacaagcugcacgagggcagcaccuacacggccgccguccaguacaacgugcucgagaaggacgacgaccccgcgucccugaccaucugggugccgauguuccagagcuccaugcccgccgaccugcucaucaaggagcuggccaacgucaacauccuggugaagcagaucagcacccccaaggggcccucccuccgcgugaugaucaacagccgguccgccguccuggcccagaugccgagcaaguucaccaucugcgcgaacgugucccuggacgagcgcagcaagcucgccuacgacgugacgacccccugcgagaucaaggccugcucccugaccugccucaagagcaagaacaugcugaccacggucaaggaccugaccaugaagacccugaaccccacccacgacaucaucgcccucugcgaguucgagaacaucgugacguccaagaaggugaucauccccaccuaccugcggagcaucuccguccgcaacaaggaccugaacacccucgagaacaucaccacgaccgaguucaagaacgcgaucaccaacgccaagaucaucccguacagcggccugcugcucgugaucaccgugacggacaacaagggggccuucaaguacaucaagccccagucccaguucaucgucgaccugggcgccuaccuggagaaggagagcaucuacuacgugaccaccaacuggaagcacaccgccacgcgguucgcgaucaagcccauggaggacugaggacuaguacuggcugcaucucccuuuccucuguccuccauccuucucccaggauggugaagggggaccugguacccagugauccccaccccaggauccuaaaucaugacuuaccugcuaauaaaaacucauuggaaaagugagaagaucuaaaaaaaaaaaaaaaaaaaaaaaaaaaaaaaaaaaaaaaaaaaaaaaaaaaaaaaaaaaaaaaaugcaucccccccccccccccccccccccccccccccaaaggcucuuuucagagccaccagaauu

SEQ ID NO: 9983 - RNA, 1149 nt, Artificial Sequence
  mRNA product Design h-1 comprising derived and/or modified sequence from HRSV(A2)__P0DOE7.1__M (opt2)
gggagacccgugacccggaaguuguacggcuacgcgacuuucccucccacaaacccucgcgcccuuccuuuccuacuugggcccggcagaaagcuuaccauggagaccuacgucaacaagcuccacgagggcuccaccuacaccgccgccguccaguacaacguccucgagaaggacgacgaccccgccucccucaccaucuggguccccauguuccaguccuccaugcccgccgaccuccucaucaaggagcucgccaacgucaacauccucgucaagcagaucuccacccccaagggccccucccuccgcgucaugaucaacucccgcuccgccguccucgcccagaugcccuccaaguucaccaucugcgccaacgucucccucgacgagcgcuccaagcucgccuacgacgucaccacccccugcgagaucaaggccugcucccucaccugccucaaguccaagaacaugcucaccaccgucaaggaccucaccaugaagacccucaaccccacccacgacaucaucgcccucugcgaguucgagaacaucgucaccuccaagaaggucaucauccccaccuaccuccgcuccaucuccguccgcaacaaggaccucaacacccucgagaacaucaccaccaccgaguucaagaacgccaucaccaacgccaagaucauccccuacuccggccuccuccucgucaucaccgucaccgacaacaagggcgccuucaaguacaucaagccccagucccaguucaucgucgaccucggcgccuaccucgagaaggaguccaucuacuacgucaccaccaacuggaagcacaccgccacccgcuucgccaucaagcccauggaggacugaggacuaguacuggcugcaucucccuuuccucuguccuccauccuucucccaggauggugaagggggaccugguacccagugauccccaccccaggauccuaaaucaugacuuaccugcuaauaaaaacucauuggaaaagugagaagaucuaaaaaaaaaaaaaaaaaaaaaaaaaaaaaaaaaaaaaaaaaaaaaaaaaaaaaaaaaaaaaaaaugcaucccccccccccccccccccccccccccccccaaaggcucuuuucagagccaccagaauu

SEQ ID NO: 9984 - RNA, 1149 nt, Artificial Sequence
  mRNA product Design h-1 comprising derived and/or modified sequence from HRSV(A2)__P0DOE7.1__M (opt3)
gggagacccgugacccggaaguuguacggcuacgcgacuuucccucccacaaacccucgcgcccuuccuuuccuacuugggcccggcagaaagcuuaccauggagaccuacgugaacaagcugcacgaaggcagcacauauacugccgcuguccaguacaauguucucgagaaagacgaugaccccgcaucccuuacgaucugggugccuauguuccaaucuucaaugccagccgaucuguugauuaaggaauuagcgaacguaaauauacuggugaaacagaucaguaccccgaaggggcccagccuaagagucaugauuaacuccaggucugcugugcucgcccagaugccuucgaaauuuacaaucugcgcaaauguuucacuggacgagcggagcaaacuugccuaugaugugacuaccccaugugaaauuaaggcuugcagucugacauguuugaaguccaagaacaugcucaccacugucaaagaccugacaaugaagacccugaaucccacgcaugauaucauagcacucugcgaguucgagaacaucgugacuucuaaaaagguaauuaucccuaccuacuuacgcagcauuuccguucgaaauaaggaccugaacacacuugaaaauaucacuaccacagaguuuaaaaacgccauaaccaaugcuaagauuaucccauauucaggauugcugcuagugauuacggucacugauaacaaaggugccuucaaguacaucaaaccccagagucaauuuaucguggaccucggcgcguaucuggaaaaggagagcauuuacuacgugacaaccaauuggaaacacacugcaacacguuucgccauaaagccuauggaggauugaggacuaguacuggcugcaucucccuuuccucuguccuccauccuucucccaggauggugaagggggaccugguacccagugauccccaccccaggauccuaaaucaugacuuaccugcuaauaaaaacucauuggaaaagugagaagaucuaaaaaaaaaaaaaaaaaaaaaaaaaaaaaaaaaaaaaaaaaaaaaaaaaaaaaaaaaaaaaaaaugcaucccccccccccccccccccccccccccccccaaaggcucuuuucagagccaccagaauu

SEQ ID NO: 9985 - RNA, 1149 nt, Artificial Sequence
  mRNA product Design h-1 comprising derived and/or modified sequence from HRSV(A2)__P0DOE7.1__M (opt4)
gggagacccgugacccggaaguuguacggcuacgcgacuuucccucccacaaacccucgcgcccuuccuuuccuacuugggcccggcagaaagcuuaccauggagaccuacgugaacaagcugcacgagggcagcaccuacaccgccgccgugcaguacaacgugcuggagaaggacgacgaccccgccagccugaccaucugggugcccauguuccagagcagcaugcccgccgaccugcugaucaaggagcuggccaacgugaacauccuggugaagcagaucagcacccccaagggccccagccugagagugaugaucaacagcagaagcgccgugcuggcccagaugcccagcaaguucaccaucugcgccaacgugagccuggacgagagaagcaagcuggccuacgacgugaccacccccugcgagaucaaggccugcagccugaccugccugaagagcaagaacaugcugaccaccgugaaggaccugaccaugaagacccugaaccccacccacgacaucaucgcccugugcgaguucgagaacaucgugaccagcaagaaggugaucauccccaccuaccugagaagcaucagcgugagaaacaaggaccugaacacccuggagaacaucaccaccaccgaguucaagaacgccaucaccaacgccaagaucauccccuacagcggccugcugcuggugaucaccgugaccgacaacaagggcgccuucaaguacaucaagccccagagccaguucaucguggaccugggcgccuaccuggagaaggagagcaucuacuacgugaccaccaacuggaagcacaccgccaccagauucgccaucaagcccauggaggacugaggacuaguacuggcugcaucucccuuuccucuguccuccauccuucucccaggauggugaagggggaccugguacccagugauccccaccccaggauccuaaaucaugacuuaccugcuaauaaaaacucauuggaaaagugagaagaucuaaaaaaaaaaaaaaaaaaaaaaaaaaaaaaaaaaaaaaaaaaaaaaaaaaaaaaaaaaaaaaaaugcaucccccccccccccccccccccccccccccccaaaggcucuuuucagagccaccagaauu

SEQ ID NO: 9986 - RNA, 1149 nt, Artificial Sequence
  mRNA product Design h-1 comprising derived and/or modified sequence from HRSV(A2)__P0DOE7.1__M (opt5)
gggagacccgugacccggaaguuguacggcuacgcgacuuucccucccacaaacccucgcgcccuuccuuuccuacuugggcccggcagaaagcuuaccauggagaccuacgugaacaagcugcacgaaggcagcacauauacggccgcuguccaguacaauguucucgagaaagacgaugaccccgccucccugaccaucugggugccuauguuccaaucuagcaugccggcggaucuucugauuaaggaacucgcuaacgugaauauccuggucaaacagauuuccacacccaaggggccuucucuuagagugaugaucaacagccgguccgccguucuggcccagaugcccucuaaauuuaccauuugcgcuaaugugagccucgacgagcgcuccaagcuggccuaugaugucacaaccccuugugaaaucaaggcuugcagccugacaugucucaaaucuaagaacaugcugaccacggugaaagaccuuaccaugaagacacugaaucccacccaugauaucauugcccucugcgaguucgagaacaucguuacauccaaaaaggugauuaucccuaccuaccugagaagcauuucuguccggaauaaggaccuuaacacgcuggaaaauaucacaaccacagaguuuaaaaacgcgauuaccaaugccaagaucaucccguauuccggacuccugcuggugauuaccgugacagauaacaaaggcgcuuucaaguacaucaaaccccagagccaauuuauugucgaccucggggccuaucuggaaaaggagucuaucuacuacguuacgaccaauuggaaacacacagcuacccgcuucgccauuaagccuauggaggauugaggacuaguacuggcugcaucucccuuuccucuguccuccauccuucucccaggauggugaagggggaccugguacccagugauccccaccccaggauccuaaaucaugacuuaccugcuaauaaaaacucauuggaaaagugagaagaucuaaaaaaaaaaaaaaaaaaaaaaaaaaaaaaaaaaaaaaaaaaaaaaaaaaaaaaaaaaaaaaaaugcaucccccccccccccccccccccccccccccccaaaggcucuuuucagagccaccagaauu

SEQ ID NO: 9987 - RNA, 1149 nt, Artificial Sequence
  mRNA product Design h-1 comprising derived and/or modified sequence from HRSV(A2)__P0DOE7.1__M (opt6)
gggagacccgugacccggaaguuguacggcuacgcgacuuucccucccacaaacccucgcgcccuuccuuuccuacuugggcccggcagaaagcuuaccauggaaacauacguaaacaaacuacacgaaggauccacauacacagcagcaguacaauacaacguacuagaaaaagacgacgacccagcaucuuuaaccauauggguaccaauguuccaaucaucaaugccagcagaccucuuaauaaaagaacuagcaaacguaaacauccuagucaaacaaauaucaacacccaaaggaccaucccucagaguaaugaucaacucaagaucagcaguacuagcacaaaugccaucaaaauucacaauaugcgccaacguuucuuuagacgaacgaucaaaauuagccuacgacguaacaacacccugcgaaauaaaagcaugcucacuaacaugccuaaaaucaaaaaacaugcucacuacaguaaaagaccuaaccaugaaaacacucaacccaacacacgacauaauagcccuaugcgaauuugaaaacauaguaacaucaaaaaaaguaauaaucccaacauacuuaagaucgaucucagucagaaacaaagaccuaaauacacucgaaaacauaacaacaacagaauuuaaaaacgcaauaacaaacgcaaaaauaauaccauacucaggacuacuccuaguaauaacaguaacagacaacaaaggagcauucaaauacauaaaaccacaaucacaauucaucguagaccucggagcauaccuagaaaaagaaucaauauacuacguaacaacaaacuggaaacacaccgccacaagauucgcaauaaaacccauggaagacuaaggacuaguacuggcugcaucucccuuuccucuguccuccauccuucucccaggauggugaagggggaccugguacccagugauccccaccccaggauccuaaaucaugacuuaccugcuaauaaaaacucauuggaaaagugagaagaucuaaaaaaaaaaaaaaaaaaaaaaaaaaaaaaaaaaaaaaaaaaaaaaaaaaaaaaaaaaaaaaaaugcaucccccccccccccccccccccccccccccccaaaggcucuuuucagagccaccagaauu

SEQ ID NO: 9988 - RNA, 1149 nt, Artificial Sequence
  mRNA product Design h-1 comprising derived and/or modified sequence from HRSV(A2)__P0DOE7.1__M (opt11)
gggagacccgugacccggaaguuguacggcuacgcgacuuucccucccacaaacccucgcgcccuuccuuuccuacuugggcccggcagaaagcuuaccauggaaaccuacgucaacaaacuacacgaaggcucaaccuacaccgccgccguccaauacaacguccucgaaaaagacgacgaccccgccucccuaaccaucuggguucccauguuccaaucauccaugcccgccgaccuccucauaaaagaacuagccaacgucaacauccuagucaaacaaaucagcacccccaaaggccccucccuccgcguaaugaucaacucccgcuccgccguccuagcccaaaugcccuccaaauuuacaaucugcgccaacgucucccucgacgaacgcucaaaacucgccuacgacgucaccacacccugcgaaaucaaagccugcucccucaccugccucaaaagcaaaaauaugcuaaccaccgucaaagaccuuaccaugaaaacccucaaccccacucacgacaucauagcccucugcgaauuugaaaacaucgucaccuccaaaaaagucaucauccccacauaccuccgcuccaucuccguccgcaacaaagaccucaacacccucgaaaacaucaccaccaccgaauuuaaaaacgccaucaccaacgccaaaaucauccccuacuccggccuccuccucgucaucaccguuaccgacaacaaaggcgccuucaaauacaucaaaccccaaucccaauucaucgucgaccucggagccuaccuugaaaaagaguccaucuacuacgucaccaccaacuggaaacacaccgccacccgauucgccaucaaacccauggaagacuaaggacuaguacuggcugcaucucccuuuccucuguccuccauccuucucccaggauggugaagggggaccugguacccagugauccccaccccaggauccuaaaucaugacuuaccugcuaauaaaaacucauuggaaaagugagaagaucuaaaaaaaaaaaaaaaaaaaaaaaaaaaaaaaaaaaaaaaaaaaaaaaaaaaaaaaaaaaaaaaaugcaucccccccccccccccccccccccccccccccaaaggcucuuuucagagccaccagaauu

SEQ ID NO: 9989 - RNA, 1365 nt, Artificial Sequence
  mRNA product Design h-2 comprising derived and/or modified sequence from HRSV(A2)__P0DOE7.1__M (wt)
gggagacccgugacccggaaguuguacggcuacgcgacuuucccucccacaaacccucgcgcccuuccuuuccuacuugggcccggcagaaagcuuaccauggaaacauacgugaacaagcuucacgaaggcuccacauacacagcugcuguucaauacaaugucuuagaaaaagacgaugacccugcaucacuuacaauaugggugcccauguuccaaucaucuaugccagcagauuuacuuauaaaagaacuagcuaaugucaacauacuagugaaacaaauauccacacccaagggaccuucacuaagagucaugauaaacucaagaagugcagugcuagcacaaaugcccagcaaauuuaccauaugcgcuaauguguccuuggaugaaagaagcaaacuagcauaugauguaaccacacccugugaaaucaaggcauguagucuaacaugccuaaaaucaaaaaauauguugacuacaguuaaagaucucacuaugaagacacucaacccuacacaugauauuauugcuuuaugugaauuugaaaacauaguaacaucaaaaaaagucauaauaccaacauaccuaagauccaucagugucagaaauaaagaucugaacacacuugaaaauauaacaaccacugaauucaaaaaugcuaucacaaaugcaaaaaucaucccuuacucaggauuacuauuagucaucacagugacugacaacaaaggagcauucaaauacauaaagccacaaagucaauucauaguagaucuuggagcuuaccuagaaaaagaaaguauauauuauguuaccacaaauuggaagcacacagcuacacgauuugcaaucaaacccauggaagauuaaggacuagugaagggaacacccaaauuuaauucagccuuaagcacaauuaauuaagagugaaacguaauuguacaagcaguuggucacccaccauagggcaugaucaacaccgcaaccuuuccuuuuucccccagugauucugaaaaaccccucuucccuucagcuugcuuagauguuccaaauuuaguaagcuuaaggcggccuacagaagaaaaagaaaaaaaaggccacaaaaguucccucucacuuucaguaaauaaaauaaaagcagcaacagaaauaaagaaauaaaugaaauucaaaaugaaauaaauauuguguugugcagcauuaaaaaaucaauaaaaauuaaaaaugagcaagaucuaaaaaaaaaaaaaaaaaaaaaaaaaaaaaaaaaaaaaaaaaaaaaaaaaaaaaaaaaaaaaaaaugcaucccccccccccccccccccccccccccccccaaaggcucuuuucagagccaccagaauu

SEQ ID NO: 9990 - RNA, 1365 nt, Artificial Sequence
  mRNA product Design h-2 comprising derived and/or modified sequence from HRSV(A2)__P0DOE7.1__M (opt1)
gggagacccgugacccggaaguuguacggcuacgcgacuuucccucccacaaacccucgcgcccuuccuuuccuacuugggcccggcagaaagcuuaccauggagaccuacgugaacaagcugcacgagggcagcaccuacacggccgccguccaguacaacgugcucgagaaggacgacgaccccgcgucccugaccaucugggugccgauguuccagagcuccaugcccgccgaccugcucaucaaggagcuggccaacgucaacauccuggugaagcagaucagcacccccaaggggcccucccuccgcgugaugaucaacagccgguccgccguccuggcccagaugccgagcaaguucaccaucugcgcgaacgugucccuggacgagcgcagcaagcucgccuacgacgugacgacccccugcgagaucaaggccugcucccugaccugccucaagagcaagaacaugcugaccacggucaaggaccugaccaugaagacccugaaccccacccacgacaucaucgcccucugcgaguucgagaacaucgugacguccaagaaggugaucauccccaccuaccugcggagcaucuccguccgcaacaaggaccugaacacccucgagaacaucaccacgaccgaguucaagaacgcgaucaccaacgccaagaucaucccguacagcggccugcugcucgugaucaccgugacggacaacaagggggccuucaaguacaucaagccccagucccaguucaucgucgaccugggcgccuaccuggagaaggagagcaucuacuacgugaccaccaacuggaagcacaccgccacgcgguucgcgaucaagcccauggaggacugaggacuagugaagggaacacccaaauuuaauucagccuuaagcacaauuaauuaagagugaaacguaauuguacaagcaguuggucacccaccauagggcaugaucaacaccgcaaccuuuccuuuuucccccagugauucugaaaaaccccucuucccuucagcuugcuuagauguuccaaauuuaguaagcuuaaggcggccuacagaagaaaaagaaaaaaaaggccacaaaaguucccucucacuuucaguaaauaaaauaaaagcagcaacagaaauaaagaaauaaaugaaauucaaaaugaaauaaauauuguguugugcagcauuaaaaaaucaauaaaaauuaaaaaugagcaagaucuaaaaaaaaaaaaaaaaaaaaaaaaaaaaaaaaaaaaaaaaaaaaaaaaaaaaaaaaaaaaaaaaugcaucccccccccccccccccccccccccccccccaaaggcucuuuucagagccaccagaauu

SEQ ID NO: 9991 - RNA, 1365 nt, Artificial Sequence
  mRNA product Design h-2 comprising derived and/or modified sequence from HRSV(A2)__P0DOE7.1__M (opt2)
gggagacccgugacccggaaguuguacggcuacgcgacuuucccucccacaaacccucgcgcccuuccuuuccuacuugggcccggcagaaagcuuaccauggagaccuacgucaacaagcuccacgagggcuccaccuacaccgccgccguccaguacaacguccucgagaaggacgacgaccccgccucccucaccaucuggguccccauguuccaguccuccaugcccgccgaccuccucaucaaggagcucgccaacgucaacauccucgucaagcagaucuccacccccaagggccccucccuccgcgucaugaucaacucccgcuccgccguccucgcccagaugcccuccaaguucaccaucugcgccaacgucucccucgacgagcgcuccaagcucgccuacgacgucaccacccccugcgagaucaaggccugcucccucaccugccucaaguccaagaacaugcucaccaccgucaaggaccucaccaugaagacccucaaccccacccacgacaucaucgcccucugcgaguucgagaacaucgucaccuccaagaaggucaucauccccaccuaccuccgcuccaucuccguccgcaacaaggaccucaacacccucgagaacaucaccaccaccgaguucaagaacgccaucaccaacgccaagaucauccccuacuccggccuccuccucgucaucaccgucaccgacaacaagggcgccuucaaguacaucaagccccagucccaguucaucgucgaccucggcgccuaccucgagaaggaguccaucuacuacgucaccaccaacuggaagcacaccgccacccgcuucgccaucaagcccauggaggacugaggacuagugaagggaacacccaaauuuaauucagccuuaagcacaauuaauuaagagugaaacguaauuguacaagcaguuggucacccaccauagggcaugaucaacaccgcaaccuuuccuuuuucccccagugauucugaaaaaccccucuucccuucagcuugcuuagauguuccaaauuuaguaagcuuaaggcggccuacagaagaaaaagaaaaaaaaggccacaaaaguucccucucacuuucaguaaauaaaauaaaagcagcaacagaaauaaagaaauaaaugaaauucaaaaugaaauaaauauuguguugugcagcauuaaaaaaucaauaaaaauuaaaaaugagcaagaucuaaaaaaaaaaaaaaaaaaaaaaaaaaaaaaaaaaaaaaaaaaaaaaaaaaaaaaaaaaaaaaaaugcaucccccccccccccccccccccccccccccccaaaggcucuuuucagagccaccagaauu

SEQ ID NO: 9992 - RNA, 1365 nt, Artificial Sequence
  mRNA product Design h-2 comprising derived and/or modified sequence from HRSV(A2)__P0DOE7.1__M (opt3)
gggagacccgugacccggaaguuguacggcuacgcgacuuucccucccacaaacccucgcgcccuuccuuuccuacuugggcccggcagaaagcuuaccauggagaccuacgugaacaagcugcacgaaggcagcacauauacugccgcuguccaguacaauguucucgagaaagacgaugaccccgcaucccuuacgaucugggugccuauguuccaaucuucaaugccagccgaucuguugauuaaggaauuagcgaacguaaauauacuggugaaacagaucaguaccccgaaggggcccagccuaagagucaugauuaacuccaggucugcugugcucgcccagaugccuucgaaauuuacaaucugcgcaaauguuucacuggacgagcggagcaaacuugccuaugaugugacuaccccaugugaaauuaaggcuugcagucugacauguuugaaguccaagaacaugcucaccacugucaaagaccugacaaugaagacccugaaucccacgcaugauaucauagcacucugcgaguucgagaacaucgugacuucuaaaaagguaauuaucccuaccuacuuacgcagcauuuccguucgaaauaaggaccugaacacacuugaaaauaucacuaccacagaguuuaaaaacgccauaaccaaugcuaagauuaucccauauucaggauugcugcuagugauuacggucacugauaacaaaggugccuucaaguacaucaaaccccagagucaauuuaucguggaccucggcgcguaucuggaaaaggagagcauuuacuacgugacaaccaauuggaaacacacugcaacacguuucgccauaaagccuauggaggauugaggacuagugaagggaacacccaaauuuaauucagccuuaagcacaauuaauuaagagugaaacguaauuguacaagcaguuggucacccaccauagggcaugaucaacaccgcaaccuuuccuuuuucccccagugauucugaaaaaccccucuucccuucagcuugcuuagauguuccaaauuuaguaagcuuaaggcggccuacagaagaaaaagaaaaaaaaggccacaaaaguucccucucacuuucaguaaauaaaauaaaagcagcaacagaaauaaagaaauaaaugaaauucaaaaugaaauaaauauuguguugugcagcauuaaaaaaucaauaaaaauuaaaaaugagcaagaucuaaaaaaaaaaaaaaaaaaaaaaaaaaaaaaaaaaaaaaaaaaaaaaaaaaaaaaaaaaaaaaaaugcaucccccccccccccccccccccccccccccccaaaggcucuuuucagagccaccagaauu

SEQ ID NO: 9993 - RNA, 1365 nt, Artificial Sequence
  mRNA product Design h-2 comprising derived and/or modified sequence from HRSV(A2)__P0DOE7.1__M (opt4)
gggagacccgugacccggaaguuguacggcuacgcgacuuucccucccacaaacccucgcgcccuuccuuuccuacuugggcccggcagaaagcuuaccauggagaccuacgugaacaagcugcacgagggcagcaccuacaccgccgccgugcaguacaacgugcuggagaaggacgacgaccccgccagccugaccaucugggugcccauguuccagagcagcaugcccgccgaccugcugaucaaggagcuggccaacgugaacauccuggugaagcagaucagcacccccaagggccccagccugagagugaugaucaacagcagaagcgccgugcuggcccagaugcccagcaaguucaccaucugcgccaacgugagccuggacgagagaagcaagcuggccuacgacgugaccacccccugcgagaucaaggccugcagccugaccugccugaagagcaagaacaugcugaccaccgugaaggaccugaccaugaagacccugaaccccacccacgacaucaucgcccugugcgaguucgagaacaucgugaccagcaagaaggugaucauccccaccuaccugagaagcaucagcgugagaaacaaggaccugaacacccuggagaacaucaccaccaccgaguucaagaacgccaucaccaacgccaagaucauccccuacagcggccugcugcuggugaucaccgugaccgacaacaagggcgccuucaaguacaucaagccccagagccaguucaucguggaccugggcgccuaccuggagaaggagagcaucuacuacgugaccaccaacuggaagcacaccgccaccagauucgccaucaagcccauggaggacugaggacuagugaagggaacacccaaauuuaauucagccuuaagcacaauuaauuaagagugaaacguaauuguacaagcaguuggucacccaccauagggcaugaucaacaccgcaaccuuuccuuuuucccccagugauucugaaaaaccccucuucccuucagcuugcuuagauguuccaaauuuaguaagcuuaaggcggccuacagaagaaaaagaaaaaaaaggccacaaaaguucccucucacuuucaguaaauaaaauaaaagcagcaacagaaauaaagaaauaaaugaaauucaaaaugaaauaaauauuguguugugcagcauuaaaaaaucaauaaaaauuaaaaaugagcaagaucuaaaaaaaaaaaaaaaaaaaaaaaaaaaaaaaaaaaaaaaaaaaaaaaaaaaaaaaaaaaaaaaaugcaucccccccccccccccccccccccccccccccaaaggcucuuuucagagccaccagaauu

SEQ ID NO: 9994 - RNA, 1365 nt, Artificial Sequence
  mRNA product Design h-2 comprising derived and/or modified sequence from HRSV(A2)__P0DOE7.1__M (opt5)
gggagacccgugacccggaaguuguacggcuacgcgacuuucccucccacaaacccucgcgcccuuccuuuccuacuugggcccggcagaaagcuuaccauggagaccuacgugaacaagcugcacgaaggcagcacauauacggccgcuguccaguacaauguucucgagaaagacgaugaccccgccucccugaccaucugggugccuauguuccaaucuagcaugccggcggaucuucugauuaaggaacucgcuaacgugaauauccuggucaaacagauuuccacacccaaggggccuucucuuagagugaugaucaacagccgguccgccguucuggcccagaugcccucuaaauuuaccauuugcgcuaaugugagccucgacgagcgcuccaagcuggccuaugaugucacaaccccuugugaaaucaaggcuugcagccugacaugucucaaaucuaagaacaugcugaccacggugaaagaccuuaccaugaagacacugaaucccacccaugauaucauugcccucugcgaguucgagaacaucguuacauccaaaaaggugauuaucccuaccuaccugagaagcauuucuguccggaauaaggaccuuaacacgcuggaaaauaucacaaccacagaguuuaaaaacgcgauuaccaaugccaagaucaucccguauuccggacuccugcuggugauuaccgugacagauaacaaaggcgcuuucaaguacaucaaaccccagagccaauuuauugucgaccucggggccuaucuggaaaaggagucuaucuacuacguuacgaccaauuggaaacacacagcuacccgcuucgccauuaagccuauggaggauugaggacuagugaagggaacacccaaauuuaauucagccuuaagcacaauuaauuaagagugaaacguaauuguacaagcaguuggucacccaccauagggcaugaucaacaccgcaaccuuuccuuuuucccccagugauucugaaaaaccccucuucccuucagcuugcuuagauguuccaaauuuaguaagcuuaaggcggccuacagaagaaaaagaaaaaaaaggccacaaaaguucccucucacuuucaguaaauaaaauaaaagcagcaacagaaauaaagaaauaaaugaaauucaaaaugaaauaaauauuguguugugcagcauuaaaaaaucaauaaaaauuaaaaaugagcaagaucuaaaaaaaaaaaaaaaaaaaaaaaaaaaaaaaaaaaaaaaaaaaaaaaaaaaaaaaaaaaaaaaaugcaucccccccccccccccccccccccccccccccaaaggcucuuuucagagccaccagaauu

SEQ ID NO: 9995 - RNA, 1365 nt, Artificial Sequence
  mRNA product Design h-2 comprising derived and/or modified sequence from HRSV(A2)__P0DOE7.1__M (opt6)
gggagacccgugacccggaaguuguacggcuacgcgacuuucccucccacaaacccucgcgcccuuccuuuccuacuugggcccggcagaaagcuuaccauggaaacauacguaaacaaacuacacgaaggauccacauacacagcagcaguacaauacaacguacuagaaaaagacgacgacccagcaucuuuaaccauauggguaccaauguuccaaucaucaaugccagcagaccucuuaauaaaagaacuagcaaacguaaacauccuagucaaacaaauaucaacacccaaaggaccaucccucagaguaaugaucaacucaagaucagcaguacuagcacaaaugccaucaaaauucacaauaugcgccaacguuucuuuagacgaacgaucaaaauuagccuacgacguaacaacacccugcgaaauaaaagcaugcucacuaacaugccuaaaaucaaaaaacaugcucacuacaguaaaagaccuaaccaugaaaacacucaacccaacacacgacauaauagcccuaugcgaauuugaaaacauaguaacaucaaaaaaaguaauaaucccaacauacuuaagaucgaucucagucagaaacaaagaccuaaauacacucgaaaacauaacaacaacagaauuuaaaaacgcaauaacaaacgcaaaaauaauaccauacucaggacuacuccuaguaauaacaguaacagacaacaaaggagcauucaaauacauaaaaccacaaucacaauucaucguagaccucggagcauaccuagaaaaagaaucaauauacuacguaacaacaaacuggaaacacaccgccacaagauucgcaauaaaacccauggaagacuaaggacuagugaagggaacacccaaauuuaauucagccuuaagcacaauuaauuaagagugaaacguaauuguacaagcaguuggucacccaccauagggcaugaucaacaccgcaaccuuuccuuuuucccccagugauucugaaaaaccccucuucccuucagcuugcuuagauguuccaaauuuaguaagcuuaaggcggccuacagaagaaaaagaaaaaaaaggccacaaaaguucccucucacuuucaguaaauaaaauaaaagcagcaacagaaauaaagaaauaaaugaaauucaaaaugaaauaaauauuguguugugcagcauuaaaaaaucaauaaaaauuaaaaaugagcaagaucuaaaaaaaaaaaaaaaaaaaaaaaaaaaaaaaaaaaaaaaaaaaaaaaaaaaaaaaaaaaaaaaaugcaucccccccccccccccccccccccccccccccaaaggcucuuuucagagccaccagaauu

SEQ ID NO: 9996 - RNA, 1365 nt, Artificial Sequence
  mRNA product Design h-2 comprising derived and/or modified sequence from HRSV(A2)__P0DOE7.1__M (opt11)
gggagacccgugacccggaaguuguacggcuacgcgacuuucccucccacaaacccucgcgcccuuccuuuccuacuugggcccggcagaaagcuuaccauggaaaccuacgucaacaaacuacacgaaggcucaaccuacaccgccgccguccaauacaacguccucgaaaaagacgacgaccccgccucccuaaccaucuggguucccauguuccaaucauccaugcccgccgaccuccucauaaaagaacuagccaacgucaacauccuagucaaacaaaucagcacccccaaaggccccucccuccgcguaaugaucaacucccgcuccgccguccuagcccaaaugcccuccaaauuuacaaucugcgccaacgucucccucgacgaacgcucaaaacucgccuacgacgucaccacacccugcgaaaucaaagccugcucccucaccugccucaaaagcaaaaauaugcuaaccaccgucaaagaccuuaccaugaaaacccucaaccccacucacgacaucauagcccucugcgaauuugaaaacaucgucaccuccaaaaaagucaucauccccacauaccuccgcuccaucuccguccgcaacaaagaccucaacacccucgaaaacaucaccaccaccgaauuuaaaaacgccaucaccaacgccaaaaucauccccuacuccggccuccuccucgucaucaccguuaccgacaacaaaggcgccuucaaauacaucaaaccccaaucccaauucaucgucgaccucggagccuaccuugaaaaagaguccaucuacuacgucaccaccaacuggaaacacaccgccacccgauucgccaucaaacccauggaagacuaaggacuagugaagggaacacccaaauuuaauucagccuuaagcacaauuaauuaagagugaaacguaauuguacaagcaguuggucacccaccauagggcaugaucaacaccgcaaccuuuccuuuuucccccagugauucugaaaaaccccucuucccuucagcuugcuuagauguuccaaauuuaguaagcuuaaggcggccuacagaagaaaaagaaaaaaaaggccacaaaaguucccucucacuuucaguaaauaaaauaaaagcagcaacagaaauaaagaaauaaaugaaauucaaaaugaaauaaauauuguguugugcagcauuaaaaaaucaauaaaaauuaaaaaugagcaagaucuaaaaaaaaaaaaaaaaaaaaaaaaaaaaaaaaaaaaaaaaaaaaaaaaaaaaaaaaaaaaaaaaugcaucccccccccccccccccccccccccccccccaaaggcucuuuucagagccaccagaauu

SEQ ID NO: 9997 - RNA, 1145 nt, Artificial Sequence
  mRNA product Design h-3 comprising derived and/or modified sequence from HRSV(A2)__P0DOE7.1__M (wt)
gggagacccgugacccggaaguuguacggcuacgcgacuuucccucccacaaacccucgcgcccuuccuuuccuacuugggcccggcagaaagcuuaccauggaaacauacgugaacaagcuucacgaaggcuccacauacacagcugcuguucaauacaaugucuuagaaaaagacgaugacccugcaucacuuacaauaugggugcccauguuccaaucaucuaugccagcagauuuacuuauaaaagaacuagcuaaugucaacauacuagugaaacaaauauccacacccaagggaccuucacuaagagucaugauaaacucaagaagugcagugcuagcacaaaugcccagcaaauuuaccauaugcgcuaauguguccuuggaugaaagaagcaaacuagcauaugauguaaccacacccugugaaaucaaggcauguagucuaacaugccuaaaaucaaaaaauauguugacuacaguuaaagaucucacuaugaagacacucaacccuacacaugauauuauugcuuuaugugaauuugaaaacauaguaacaucaaaaaaagucauaauaccaacauaccuaagauccaucagugucagaaauaaagaucugaacacacuugaaaauauaacaaccacugaauucaaaaaugcuaucacaaaugcaaaaaucaucccuuacucaggauuacuauuagucaucacagugacugacaacaaaggagcauucaaauacauaaagccacaaagucaauucauaguagaucuuggagcuuaccuagaaaaagaaaguauauauuauguuaccacaaauuggaagcacacagcuacacgauuugcaaucaaacccauggaagauuaaggacuaguggaagcauuuuccuggcugauuaaaagaaauuacucagcuauggucaucuguuccuguuagaaggcuaugcagcauauuauauacuaugcgcauguuaugaaaugcauaauaaaaaauuuuaaaaaaucuaaaagaucuaaaaaaaaaaaaaaaaaaaaaaaaaaaaaaaaaaaaaaaaaaaaaaaaaaaaaaaaaaaaaaaaugcaucccccccccccccccccccccccccccccccaaaggcucuuuucagagccaccagaauu

SEQ ID NO: 9998 - RNA, 1145 nt, Artificial Sequence
  mRNA product Design h-3 comprising derived and/or modified sequence from HRSV(A2)__P0DOE7.1__M (opt1)
gggagacccgugacccggaaguuguacggcuacgcgacuuucccucccacaaacccucgcgcccuuccuuuccuacuugggcccggcagaaagcuuaccauggagaccuacgugaacaagcugcacgagggcagcaccuacacggccgccguccaguacaacgugcucgagaaggacgacgaccccgcgucccugaccaucugggugccgauguuccagagcuccaugcccgccgaccugcucaucaaggagcuggccaacgucaacauccuggugaagcagaucagcacccccaaggggcccucccuccgcgugaugaucaacagccgguccgccguccuggcccagaugccgagcaaguucaccaucugcgcgaacgugucccuggacgagcgcagcaagcucgccuacgacgugacgacccccugcgagaucaaggccugcucccugaccugccucaagagcaagaacaugcugaccacggucaaggaccugaccaugaagacccugaaccccacccacgacaucaucgcccucugcgaguucgagaacaucgugacguccaagaaggugaucauccccaccuaccugcggagcaucuccguccgcaacaaggaccugaacacccucgagaacaucaccacgaccgaguucaagaacgcgaucaccaacgccaagaucaucccguacagcggccugcugcucgugaucaccgugacggacaacaagggggccuucaaguacaucaagccccagucccaguucaucgucgaccugggcgccuaccuggagaaggagagcaucuacuacgugaccaccaacuggaagcacaccgccacgcgguucgcgaucaagcccauggaggacugaggacuaguggaagcauuuuccuggcugauuaaaagaaauuacucagcuauggucaucuguuccuguuagaaggcuaugcagcauauuauauacuaugcgcauguuaugaaaugcauaauaaaaaauuuuaaaaaaucuaaaagaucuaaaaaaaaaaaaaaaaaaaaaaaaaaaaaaaaaaaaaaaaaaaaaaaaaaaaaaaaaaaaaaaaugcaucccccccccccccccccccccccccccccccaaaggcucuuuucagagccaccagaauu

SEQ ID NO: 9999 - RNA, 1145 nt, Artificial Sequence
  mRNA product Design h-3 comprising derived and/or modified sequence from HRSV(A2)__P0DOE7.1__M (opt2)
gggagacccgugacccggaaguuguacggcuacgcgacuuucccucccacaaacccucgcgcccuuccuuuccuacuugggcccggcagaaagcuuaccauggagaccuacgucaacaagcuccacgagggcuccaccuacaccgccgccguccaguacaacguccucgagaaggacgacgaccccgccucccucaccaucuggguccccauguuccaguccuccaugcccgccgaccuccucaucaaggagcucgccaacgucaacauccucgucaagcagaucuccacccccaagggccccucccuccgcgucaugaucaacucccgcuccgccguccucgcccagaugcccuccaaguucaccaucugcgccaacgucucccucgacgagcgcuccaagcucgccuacgacgucaccacccccugcgagaucaaggccugcucccucaccugccucaaguccaagaacaugcucaccaccgucaaggaccucaccaugaagacccucaaccccacccacgacaucaucgcccucugcgaguucgagaacaucgucaccuccaagaaggucaucauccccaccuaccuccgcuccaucuccguccgcaacaaggaccucaacacccucgagaacaucaccaccaccgaguucaagaacgccaucaccaacgccaagaucauccccuacuccggccuccuccucgucaucaccgucaccgacaacaagggcgccuucaaguacaucaagccccagucccaguucaucgucgaccucggcgccuaccucgagaaggaguccaucuacuacgucaccaccaacuggaagcacaccgccacccgcuucgccaucaagcccauggaggacugaggacuaguggaagcauuuuccuggcugauuaaaagaaauuacucagcuauggucaucuguuccuguuagaaggcuaugcagcauauuauauacuaugcgcauguuaugaaaugcauaauaaaaaauuuuaaaaaaucuaaaagaucuaaaaaaaaaaaaaaaaaaaaaaaaaaaaaaaaaaaaaaaaaaaaaaaaaaaaaaaaaaaaaaaaugcaucccccccccccccccccccccccccccccccaaaggcucuuuucagagccaccagaauu

SEQ ID NO: 10000 - RNA, 1145 nt, Artificial Sequence
  mRNA product Design h-3 comprising derived and/or modified sequence from HRSV(A2)__P0DOE7.1__M (opt3)
gggagacccgugacccggaaguuguacggcuacgcgacuuucccucccacaaacccucgcgcccuuccuuuccuacuugggcccggcagaaagcuuaccauggagaccuacgugaacaagcugcacgaaggcagcacauauacugccgcuguccaguacaauguucucgagaaagacgaugaccccgcaucccuuacgaucugggugccuauguuccaaucuucaaugccagccgaucuguugauuaaggaauuagcgaacguaaauauacuggugaaacagaucaguaccccgaaggggcccagccuaagagucaugauuaacuccaggucugcugugcucgcccagaugccuucgaaauuuacaaucugcgcaaauguuucacuggacgagcggagcaaacuugccuaugaugugacuaccccaugugaaauuaaggcuugcagucugacauguuugaaguccaagaacaugcucaccacugucaaagaccugacaaugaagacccugaaucccacgcaugauaucauagcacucugcgaguucgagaacaucgugacuucuaaaaagguaauuaucccuaccuacuuacgcagcauuuccguucgaaauaaggaccugaacacacuugaaaauaucacuaccacagaguuuaaaaacgccauaaccaaugcuaagauuaucccauauucaggauugcugcuagugauuacggucacugauaacaaaggugccuucaaguacaucaaaccccagagucaauuuaucguggaccucggcgcguaucuggaaaaggagagcauuuacuacgugacaaccaauuggaaacacacugcaacacguuucgccauaaagccuauggaggauugaggacuaguggaagcauuuuccuggcugauuaaaagaaauuacucagcuauggucaucuguuccuguuagaaggcuaugcagcauauuauauacuaugcgcauguuaugaaaugcauaauaaaaaauuuuaaaaaaucuaaaagaucuaaaaaaaaaaaaaaaaaaaaaaaaaaaaaaaaaaaaaaaaaaaaaaaaaaaaaaaaaaaaaaaaugcaucccccccccccccccccccccccccccccccaaaggcucuuuucagagccaccagaauu

SEQ ID NO: 10001 - RNA, 1145 nt, Artificial Sequence
  mRNA product Design h-3 comprising derived and/or modified sequence from HRSV(A2)__P0DOE7.1__M (opt4)
gggagacccgugacccggaaguuguacggcuacgcgacuuucccucccacaaacccucgcgcccuuccuuuccuacuugggcccggcagaaagcuuaccauggagaccuacgugaacaagcugcacgagggcagcaccuacaccgccgccgugcaguacaacgugcuggagaaggacgacgaccccgccagccugaccaucugggugcccauguuccagagcagcaugcccgccgaccugcugaucaaggagcuggccaacgugaacauccuggugaagcagaucagcacccccaagggccccagccugagagugaugaucaacagcagaagcgccgugcuggcccagaugcccagcaaguucaccaucugcgccaacgugagccuggacgagagaagcaagcuggccuacgacgugaccacccccugcgagaucaaggccugcagccugaccugccugaagagcaagaacaugcugaccaccgugaaggaccugaccaugaagacccugaaccccacccacgacaucaucgcccugugcgaguucgagaacaucgugaccagcaagaaggugaucauccccaccuaccugagaagcaucagcgugagaaacaaggaccugaacacccuggagaacaucaccaccaccgaguucaagaacgccaucaccaacgccaagaucauccccuacagcggccugcugcuggugaucaccgugaccgacaacaagggcgccuucaaguacaucaagccccagagccaguucaucguggaccugggcgccuaccuggagaaggagagcaucuacuacgugaccaccaacuggaagcacaccgccaccagauucgccaucaagcccauggaggacugaggacuaguggaagcauuuuccuggcugauuaaaagaaauuacucagcuauggucaucuguuccuguuagaaggcuaugcagcauauuauauacuaugcgcauguuaugaaaugcauaauaaaaaauuuuaaaaaaucuaaaagaucuaaaaaaaaaaaaaaaaaaaaaaaaaaaaaaaaaaaaaaaaaaaaaaaaaaaaaaaaaaaaaaaaugcaucccccccccccccccccccccccccccccccaaaggcucuuuucagagccaccagaauu

SEQ ID NO: 10002 - RNA, 1145 nt, Artificial Sequence
  mRNA product Design h-3 comprising derived and/or modified sequence from HRSV(A2)__P0DOE7.1__M (opt5)
gggagacccgugacccggaaguuguacggcuacgcgacuuucccucccacaaacccucgcgcccuuccuuuccuacuugggcccggcagaaagcuuaccauggagaccuacgugaacaagcugcacgaaggcagcacauauacggccgcuguccaguacaauguucucgagaaagacgaugaccccgccucccugaccaucugggugccuauguuccaaucuagcaugccggcggaucuucugauuaaggaacucgcuaacgugaauauccuggucaaacagauuuccacacccaaggggccuucucuuagagugaugaucaacagccgguccgccguucuggcccagaugcccucuaaauuuaccauuugcgcuaaugugagccucgacgagcgcuccaagcuggccuaugaugucacaaccccuugugaaaucaaggcuugcagccugacaugucucaaaucuaagaacaugcugaccacggugaaagaccuuaccaugaagacacugaaucccacccaugauaucauugcccucugcgaguucgagaacaucguuacauccaaaaaggugauuaucccuaccuaccugagaagcauuucuguccggaauaaggaccuuaacacgcuggaaaauaucacaaccacagaguuuaaaaacgcgauuaccaaugccaagaucaucccguauuccggacuccugcuggugauuaccgugacagauaacaaaggcgcuuucaaguacaucaaaccccagagccaauuuauugucgaccucggggccuaucuggaaaaggagucuaucuacuacguuacgaccaauuggaaacacacagcuacccgcuucgccauuaagccuauggaggauugaggacuaguggaagcauuuuccuggcugauuaaaagaaauuacucagcuauggucaucuguuccuguuagaaggcuaugcagcauauuauauacuaugcgcauguuaugaaaugcauaauaaaaaauuuuaaaaaaucuaaaagaucuaaaaaaaaaaaaaaaaaaaaaaaaaaaaaaaaaaaaaaaaaaaaaaaaaaaaaaaaaaaaaaaaugcaucccccccccccccccccccccccccccccccaaaggcucuuuucagagccaccagaauu

SEQ ID NO: 10003 - RNA, 1145 nt, Artificial Sequence
  mRNA product Design h-3 comprising derived and/or modified sequence from HRSV(A2)__P0DOE7.1__M (opt6)
gggagacccgugacccggaaguuguacggcuacgcgacuuucccucccacaaacccucgcgcccuuccuuuccuacuugggcccggcagaaagcuuaccauggaaacauacguaaacaaacuacacgaaggauccacauacacagcagcaguacaauacaacguacuagaaaaagacgacgacccagcaucuuuaaccauauggguaccaauguuccaaucaucaaugccagcagaccucuuaauaaaagaacuagcaaacguaaacauccuagucaaacaaauaucaacacccaaaggaccaucccucagaguaaugaucaacucaagaucagcaguacuagcacaaaugccaucaaaauucacaauaugcgccaacguuucuuuagacgaacgaucaaaauuagccuacgacguaacaacacccugcgaaauaaaagcaugcucacuaacaugccuaaaaucaaaaaacaugcucacuacaguaaaagaccuaaccaugaaaacacucaacccaacacacgacauaauagcccuaugcgaauuugaaaacauaguaacaucaaaaaaaguaauaaucccaacauacuuaagaucgaucucagucagaaacaaagaccuaaauacacucgaaaacauaacaacaacagaauuuaaaaacgcaauaacaaacgcaaaaauaauaccauacucaggacuacuccuaguaauaacaguaacagacaacaaaggagcauucaaauacauaaaaccacaaucacaauucaucguagaccucggagcauaccuagaaaaagaaucaauauacuacguaacaacaaacuggaaacacaccgccacaagauucgcaauaaaacccauggaagacuaaggacuaguggaagcauuuuccuggcugauuaaaagaaauuacucagcuauggucaucuguuccuguuagaaggcuaugcagcauauuauauacuaugcgcauguuaugaaaugcauaauaaaaaauuuuaaaaaaucuaaaagaucuaaaaaaaaaaaaaaaaaaaaaaaaaaaaaaaaaaaaaaaaaaaaaaaaaaaaaaaaaaaaaaaaugcaucccccccccccccccccccccccccccccccaaaggcucuuuucagagccaccagaauu

SEQ ID NO: 10004 - RNA, 1145 nt, Artificial Sequence
  mRNA product Design h-3 comprising derived and/or modified sequence from HRSV(A2)__P0DOE7.1__M (opt11)
gggagacccgugacccggaaguuguacggcuacgcgacuuucccucccacaaacccucgcgcccuuccuuuccuacuugggcccggcagaaagcuuaccauggaaaccuacgucaacaaacuacacgaaggcucaaccuacaccgccgccguccaauacaacguccucgaaaaagacgacgaccccgccucccuaaccaucuggguucccauguuccaaucauccaugcccgccgaccuccucauaaaagaacuagccaacgucaacauccuagucaaacaaaucagcacccccaaaggccccucccuccgcguaaugaucaacucccgcuccgccguccuagcccaaaugcccuccaaauuuacaaucugcgccaacgucucccucgacgaacgcucaaaacucgccuacgacgucaccacacccugcgaaaucaaagccugcucccucaccugccucaaaagcaaaaauaugcuaaccaccgucaaagaccuuaccaugaaaacccucaaccccacucacgacaucauagcccucugcgaauuugaaaacaucgucaccuccaaaaaagucaucauccccacauaccuccgcuccaucuccguccgcaacaaagaccucaacacccucgaaaacaucaccaccaccgaauuuaaaaacgccaucaccaacgccaaaaucauccccuacuccggccuccuccucgucaucaccguuaccgacaacaaaggcgccuucaaauacaucaaaccccaaucccaauucaucgucgaccucggagccuaccuugaaaaagaguccaucuacuacgucaccaccaacuggaaacacaccgccacccgauucgccaucaaacccauggaagacuaaggacuaguggaagcauuuuccuggcugauuaaaagaaauuacucagcuauggucaucuguuccuguuagaaggcuaugcagcauauuauauacuaugcgcauguuaugaaaugcauaauaaaaaauuuuaaaaaaucuaaaagaucuaaaaaaaaaaaaaaaaaaaaaaaaaaaaaaaaaaaaaaaaaaaaaaaaaaaaaaaaaaaaaaaaugcaucccccccccccccccccccccccccccccccaaaggcucuuuucagagccaccagaauu

SEQ ID NO: 10005 - RNA, 1208 nt, Artificial Sequence
  mRNA product Design h-4 comprising derived and/or modified sequence from HRSV(A2)__P0DOE7.1__M (wt)
gggagagggcgcuuggcuugcaaggacccugagcugcggcauugaagcacacccaacccaacucgacugaagucagccucacugaaccggaucugagaaucuucucucucugggcuugccagggcucuccgaaccuagcuagcauccucuucaauuccaacuagaaagcuuaccauggaaacauacgugaacaagcuucacgaaggcuccacauacacagcugcuguucaauacaaugucuuagaaaaagacgaugacccugcaucacuuacaauaugggugcccauguuccaaucaucuaugccagcagauuuacuuauaaaagaacuagcuaaugucaacauacuagugaaacaaauauccacacccaagggaccuucacuaagagucaugauaaacucaagaagugcagugcuagcacaaaugcccagcaaauuuaccauaugcgcuaauguguccuuggaugaaagaagcaaacuagcauaugauguaaccacacccugugaaaucaaggcauguagucuaacaugccuaaaaucaaaaaauauguugacuacaguuaaagaucucacuaugaagacacucaacccuacacaugauauuauugcuuuaugugaauuugaaaacauaguaacaucaaaaaaagucauaauaccaacauaccuaagauccaucagugucagaaauaaagaucugaacacacuugaaaauauaacaaccacugaauucaaaaaugcuaucacaaaugcaaaaaucaucccuuacucaggauuacuauuagucaucacagugacugacaacaaaggagcauucaaauacauaaagccacaaagucaauucauaguagaucuuggagcuuaccuagaaaaagaaaguauauauuauguuaccacaaauuggaagcacacagcuacacgauuugcaaucaaacccauggaagauuaaggacuaguaauaaggaaacuguaugaaugucugugggcaggaagugaagagauccuucuguaaagguuuuuggaauuaugucugcugaauaauaaacuuuuuugaaauaauaaaucugguagaaaaaugagaucuaaaaaaaaaaaaaaaaaaaaaaaaaaaaaaaaaaaaaaaaaaaaaaaaaaaaaaaaaaaaaaaaugcaucccccccccccccccccccccccccccccccaaaggcucuuuucagagccaccagaauu

SEQ ID NO: 10006 - RNA, 1208 nt, Artificial Sequence
  mRNA product Design h-4 comprising derived and/or modified sequence from HRSV(A2)__P0DOE7.1__M (opt1)
gggagagggcgcuuggcuugcaaggacccugagcugcggcauugaagcacacccaacccaacucgacugaagucagccucacugaaccggaucugagaaucuucucucucugggcuugccagggcucuccgaaccuagcuagcauccucuucaauuccaacuagaaagcuuaccauggagaccuacgugaacaagcugcacgagggcagcaccuacacggccgccguccaguacaacgugcucgagaaggacgacgaccccgcgucccugaccaucugggugccgauguuccagagcuccaugcccgccgaccugcucaucaaggagcuggccaacgucaacauccuggugaagcagaucagcacccccaaggggcccucccuccgcgugaugaucaacagccgguccgccguccuggcccagaugccgagcaaguucaccaucugcgcgaacgugucccuggacgagcgcagcaagcucgccuacgacgugacgacccccugcgagaucaaggccugcucccugaccugccucaagagcaagaacaugcugaccacggucaaggaccugaccaugaagacccugaaccccacccacgacaucaucgcccucugcgaguucgagaacaucgugacguccaagaaggugaucauccccaccuaccugcggagcaucuccguccgcaacaaggaccugaacacccucgagaacaucaccacgaccgaguucaagaacgcgaucaccaacgccaagaucaucccguacagcggccugcugcucgugaucaccgugacggacaacaagggggccuucaaguacaucaagccccagucccaguucaucgucgaccugggcgccuaccuggagaaggagagcaucuacuacgugaccaccaacuggaagcacaccgccacgcgguucgcgaucaagcccauggaggacugaggacuaguaauaaggaaacuguaugaaugucugugggcaggaagugaagagauccuucuguaaagguuuuuggaauuaugucugcugaauaauaaacuuuuuugaaauaauaaaucugguagaaaaaugagaucuaaaaaaaaaaaaaaaaaaaaaaaaaaaaaaaaaaaaaaaaaaaaaaaaaaaaaaaaaaaaaaaaugcaucccccccccccccccccccccccccccccccaaaggcucuuuucagagccaccagaauu

SEQ ID NO: 10007 - RNA, 1208 nt, Artificial Sequence
  mRNA product Design h-4 comprising derived and/or modified sequence from HRSV(A2)__P0DOE7.1__M (opt2)
gggagagggcgcuuggcuugcaaggacccugagcugcggcauugaagcacacccaacccaacucgacugaagucagccucacugaaccggaucugagaaucuucucucucugggcuugccagggcucuccgaaccuagcuagcauccucuucaauuccaacuagaaagcuuaccauggagaccuacgucaacaagcuccacgagggcuccaccuacaccgccgccguccaguacaacguccucgagaaggacgacgaccccgccucccucaccaucuggguccccauguuccaguccuccaugcccgccgaccuccucaucaaggagcucgccaacgucaacauccucgucaagcagaucuccacccccaagggccccucccuccgcgucaugaucaacucccgcuccgccguccucgcccagaugcccuccaaguucaccaucugcgccaacgucucccucgacgagcgcuccaagcucgccuacgacgucaccacccccugcgagaucaaggccugcucccucaccugccucaaguccaagaacaugcucaccaccgucaaggaccucaccaugaagacccucaaccccacccacgacaucaucgcccucugcgaguucgagaacaucgucaccuccaagaaggucaucauccccaccuaccuccgcuccaucuccguccgcaacaaggaccucaacacccucgagaacaucaccaccaccgaguucaagaacgccaucaccaacgccaagaucauccccuacuccggccuccuccucgucaucaccgucaccgacaacaagggcgccuucaaguacaucaagccccagucccaguucaucgucgaccucggcgccuaccucgagaaggaguccaucuacuacgucaccaccaacuggaagcacaccgccacccgcuucgccaucaagcccauggaggacugaggacuaguaauaaggaaacuguaugaaugucugugggcaggaagugaagagauccuucuguaaagguuuuuggaauuaugucugcugaauaauaaacuuuuuugaaauaauaaaucugguagaaaaaugagaucuaaaaaaaaaaaaaaaaaaaaaaaaaaaaaaaaaaaaaaaaaaaaaaaaaaaaaaaaaaaaaaaaugcaucccccccccccccccccccccccccccccccaaaggcucuuuucagagccaccagaauu

SEQ ID NO: 10008 - RNA, 1208 nt, Artificial Sequence
  mRNA product Design h-4 comprising derived and/or modified sequence from HRSV(A2)__P0DOE7.1__M (opt3)
gggagagggcgcuuggcuugcaaggacccugagcugcggcauugaagcacacccaacccaacucgacugaagucagccucacugaaccggaucugagaaucuucucucucugggcuugccagggcucuccgaaccuagcuagcauccucuucaauuccaacuagaaagcuuaccauggagaccuacgugaacaagcugcacgaaggcagcacauauacugccgcuguccaguacaauguucucgagaaagacgaugaccccgcaucccuuacgaucugggugccuauguuccaaucuucaaugccagccgaucuguugauuaaggaauuagcgaacguaaauauacuggugaaacagaucaguaccccgaaggggcccagccuaagagucaugauuaacuccaggucugcugugcucgcccagaugccuucgaaauuuacaaucugcgcaaauguuucacuggacgagcggagcaaacuugccuaugaugugacuaccccaugugaaauuaaggcuugcagucugacauguuugaaguccaagaacaugcucaccacugucaaagaccugacaaugaagacccugaaucccacgcaugauaucauagcacucugcgaguucgagaacaucgugacuucuaaaaagguaauuaucccuaccuacuuacgcagcauuuccguucgaaauaaggaccugaacacacuugaaaauaucacuaccacagaguuuaaaaacgccauaaccaaugcuaagauuaucccauauucaggauugcugcuagugauuacggucacugauaacaaaggugccuucaaguacaucaaaccccagagucaauuuaucguggaccucggcgcguaucuggaaaaggagagcauuuacuacgugacaaccaauuggaaacacacugcaacacguuucgccauaaagccuauggaggauugaggacuaguaauaaggaaacuguaugaaugucugugggcaggaagugaagagauccuucuguaaagguuuuuggaauuaugucugcugaauaauaaacuuuuuugaaauaauaaaucugguagaaaaaugagaucuaaaaaaaaaaaaaaaaaaaaaaaaaaaaaaaaaaaaaaaaaaaaaaaaaaaaaaaaaaaaaaaaugcaucccccccccccccccccccccccccccccccaaaggcucuuuucagagccaccagaauu

SEQ ID NO: 10009 - RNA, 1208 nt, Artificial Sequence
  mRNA product Design h-4 comprising derived and/or modified sequence from HRSV(A2)__P0DOE7.1__M (opt4)
gggagagggcgcuuggcuugcaaggacccugagcugcggcauugaagcacacccaacccaacucgacugaagucagccucacugaaccggaucugagaaucuucucucucugggcuugccagggcucuccgaaccuagcuagcauccucuucaauuccaacuagaaagcuuaccauggagaccuacgugaacaagcugcacgagggcagcaccuacaccgccgccgugcaguacaacgugcuggagaaggacgacgaccccgccagccugaccaucugggugcccauguuccagagcagcaugcccgccgaccugcugaucaaggagcuggccaacgugaacauccuggugaagcagaucagcacccccaagggccccagccugagagugaugaucaacagcagaagcgccgugcuggcccagaugcccagcaaguucaccaucugcgccaacgugagccuggacgagagaagcaagcuggccuacgacgugaccacccccugcgagaucaaggccugcagccugaccugccugaagagcaagaacaugcugaccaccgugaaggaccugaccaugaagacccugaaccccacccacgacaucaucgcccugugcgaguucgagaacaucgugaccagcaagaaggugaucauccccaccuaccugagaagcaucagcgugagaaacaaggaccugaacacccuggagaacaucaccaccaccgaguucaagaacgccaucaccaacgccaagaucauccccuacagcggccugcugcuggugaucaccgugaccgacaacaagggcgccuucaaguacaucaagccccagagccaguucaucguggaccugggcgccuaccuggagaaggagagcaucuacuacgugaccaccaacuggaagcacaccgccaccagauucgccaucaagcccauggaggacugaggacuaguaauaaggaaacuguaugaaugucugugggcaggaagugaagagauccuucuguaaagguuuuuggaauuaugucugcugaauaauaaacuuuuuugaaauaauaaaucugguagaaaaaugagaucuaaaaaaaaaaaaaaaaaaaaaaaaaaaaaaaaaaaaaaaaaaaaaaaaaaaaaaaaaaaaaaaaugcaucccccccccccccccccccccccccccccccaaaggcucuuuucagagccaccagaauu

SEQ ID NO: 10010 - RNA, 1208 nt, Artificial Sequence
  mRNA product Design h-4 comprising derived and/or modified sequence from HRSV(A2)__P0DOE7.1__M (opt5)
gggagagggcgcuuggcuugcaaggacccugagcugcggcauugaagcacacccaacccaacucgacugaagucagccucacugaaccggaucugagaaucuucucucucugggcuugccagggcucuccgaaccuagcuagcauccucuucaauuccaacuagaaagcuuaccauggagaccuacgugaacaagcugcacgaaggcagcacauauacggccgcuguccaguacaauguucucgagaaagacgaugaccccgccucccugaccaucugggugccuauguuccaaucuagcaugccggcggaucuucugauuaaggaacucgcuaacgugaauauccuggucaaacagauuuccacacccaaggggccuucucuuagagugaugaucaacagccgguccgccguucuggcccagaugcccucuaaauuuaccauuugcgcuaaugugagccucgacgagcgcuccaagcuggccuaugaugucacaaccccuugugaaaucaaggcuugcagccugacaugucucaaaucuaagaacaugcugaccacggugaaagaccuuaccaugaagacacugaaucccacccaugauaucauugcccucugcgaguucgagaacaucguuacauccaaaaaggugauuaucccuaccuaccugagaagcauuucuguccggaauaaggaccuuaacacgcuggaaaauaucacaaccacagaguuuaaaaacgcgauuaccaaugccaagaucaucccguauuccggacuccugcuggugauuaccgugacagauaacaaaggcgcuuucaaguacaucaaaccccagagccaauuuauugucgaccucggggccuaucuggaaaaggagucuaucuacuacguuacgaccaauuggaaacacacagcuacccgcuucgccauuaagccuauggaggauugaggacuaguaauaaggaaacuguaugaaugucugugggcaggaagugaagagauccuucuguaaagguuuuuggaauuaugucugcugaauaauaaacuuuuuugaaauaauaaaucugguagaaaaaugagaucuaaaaaaaaaaaaaaaaaaaaaaaaaaaaaaaaaaaaaaaaaaaaaaaaaaaaaaaaaaaaaaaaugcaucccccccccccccccccccccccccccccccaaaggcucuuuucagagccaccagaauu

SEQ ID NO: 10011 - RNA, 1208 nt, Artificial Sequence
  mRNA product Design h-4 comprising derived and/or modified sequence from HRSV(A2)__P0DOE7.1__M (opt6)
gggagagggcgcuuggcuugcaaggacccugagcugcggcauugaagcacacccaacccaacucgacugaagucagccucacugaaccggaucugagaaucuucucucucugggcuugccagggcucuccgaaccuagcuagcauccucuucaauuccaacuagaaagcuuaccauggaaacauacguaaacaaacuacacgaaggauccacauacacagcagcaguacaauacaacguacuagaaaaagacgacgacccagcaucuuuaaccauauggguaccaauguuccaaucaucaaugccagcagaccucuuaauaaaagaacuagcaaacguaaacauccuagucaaacaaauaucaacacccaaaggaccaucccucagaguaaugaucaacucaagaucagcaguacuagcacaaaugccaucaaaauucacaauaugcgccaacguuucuuuagacgaacgaucaaaauuagccuacgacguaacaacacccugcgaaauaaaagcaugcucacuaacaugccuaaaaucaaaaaacaugcucacuacaguaaaagaccuaaccaugaaaacacucaacccaacacacgacauaauagcccuaugcgaauuugaaaacauaguaacaucaaaaaaaguaauaaucccaacauacuuaagaucgaucucagucagaaacaaagaccuaaauacacucgaaaacauaacaacaacagaauuuaaaaacgcaauaacaaacgcaaaaauaauaccauacucaggacuacuccuaguaauaacaguaacagacaacaaaggagcauucaaauacauaaaaccacaaucacaauucaucguagaccucggagcauaccuagaaaaagaaucaauauacuacguaacaacaaacuggaaacacaccgccacaagauucgcaauaaaacccauggaagacuaaggacuaguaauaaggaaacuguaugaaugucugugggcaggaagugaagagauccuucuguaaagguuuuuggaauuaugucugcugaauaauaaacuuuuuugaaauaauaaaucugguagaaaaaugagaucuaaaaaaaaaaaaaaaaaaaaaaaaaaaaaaaaaaaaaaaaaaaaaaaaaaaaaaaaaaaaaaaaugcaucccccccccccccccccccccccccccccccaaaggcucuuuucagagccaccagaauu

SEQ ID NO: 10012 - RNA, 1208 nt, Artificial Sequence
  mRNA product Design h-4 comprising derived and/or modified sequence from HRSV(A2)__P0DOE7.1__M (opt11)
gggagagggcgcuuggcuugcaaggacccugagcugcggcauugaagcacacccaacccaacucgacugaagucagccucacugaaccggaucugagaaucuucucucucugggcuugccagggcucuccgaaccuagcuagcauccucuucaauuccaacuagaaagcuuaccauggaaaccuacgucaacaaacuacacgaaggcucaaccuacaccgccgccguccaauacaacguccucgaaaaagacgacgaccccgccucccuaaccaucuggguucccauguuccaaucauccaugcccgccgaccuccucauaaaagaacuagccaacgucaacauccuagucaaacaaaucagcacccccaaaggccccucccuccgcguaaugaucaacucccgcuccgccguccuagcccaaaugcccuccaaauuuacaaucugcgccaacgucucccucgacgaacgcucaaaacucgccuacgacgucaccacacccugcgaaaucaaagccugcucccucaccugccucaaaagcaaaaauaugcuaaccaccgucaaagaccuuaccaugaaaacccucaaccccacucacgacaucauagcccucugcgaauuugaaaacaucgucaccuccaaaaaagucaucauccccacauaccuccgcuccaucuccguccgcaacaaagaccucaacacccucgaaaacaucaccaccaccgaauuuaaaaacgccaucaccaacgccaaaaucauccccuacuccggccuccuccucgucaucaccguuaccgacaacaaaggcgccuucaaauacaucaaaccccaaucccaauucaucgucgaccucggagccuaccuugaaaaagaguccaucuacuacgucaccaccaacuggaaacacaccgccacccgauucgccaucaaacccauggaagacuaaggacuaguaauaaggaaacuguaugaaugucugugggcaggaagugaagagauccuucuguaaagguuuuuggaauuaugucugcugaauaauaaacuuuuuugaaauaauaaaucugguagaaaaaugagaucuaaaaaaaaaaaaaaaaaaaaaaaaaaaaaaaaaaaaaaaaaaaaaaaaaaaaaaaaaaaaaaaaugcaucccccccccccccccccccccccccccccccaaaggcucuuuucagagccaccagaauu

SEQ ID NO: 10013 - RNA, 1224 nt, Artificial Sequence
  mRNA product Design h-5 comprising derived and/or modified sequence from HRSV(A2)__P0DOE7.1__M (wt)
gggagagggcgcuuggcuugcaaggacccugagcugcggcauugaagcacacccaacccaacucgacugaagucagccucacugaaccggaucugagaaucuucucucucugggcuugccagggcucuccgaaccuagcuagcauccucuucaauuccaacuagaaagcuuaccauggaaacauacgugaacaagcuucacgaaggcuccacauacacagcugcuguucaauacaaugucuuagaaaaagacgaugacccugcaucacuuacaauaugggugcccauguuccaaucaucuaugccagcagauuuacuuauaaaagaacuagcuaaugucaacauacuagugaaacaaauauccacacccaagggaccuucacuaagagucaugauaaacucaagaagugcagugcuagcacaaaugcccagcaaauuuaccauaugcgcuaauguguccuuggaugaaagaagcaaacuagcauaugauguaaccacacccugugaaaucaaggcauguagucuaacaugccuaaaaucaaaaaauauguugacuacaguuaaagaucucacuaugaagacacucaacccuacacaugauauuauugcuuuaugugaauuugaaaacauaguaacaucaaaaaaagucauaauaccaacauaccuaagauccaucagugucagaaauaaagaucugaacacacuugaaaauauaacaaccacugaauucaaaaaugcuaucacaaaugcaaaaaucaucccuuacucaggauuacuauuagucaucacagugacugacaacaaaggagcauucaaauacauaaagccacaaagucaauucauaguagaucuuggagcuuaccuagaaaaagaaaguauauauuauguuaccacaaauuggaagcacacagcuacacgauuugcaaucaaacccauggaagauuaaggacuaguacuggcugcaucucccuuuccucuguccuccauccuucucccaggauggugaagggggaccugguacccagugauccccaccccaggauccuaaaucaugacuuaccugcuaauaaaaacucauuggaaaagugagaagaucuaaaaaaaaaaaaaaaaaaaaaaaaaaaaaaaaaaaaaaaaaaaaaaaaaaaaaaaaaaaaaaaaugcaucccccccccccccccccccccccccccccccaaaggcucuuuucagagccaccagaauu

SEQ ID NO: 10014 - RNA, 1224 nt, Artificial Sequence
  mRNA product Design h-5 comprising derived and/or modified sequence from HRSV(A2)__P0DOE7.1__M (opt1)
gggagagggcgcuuggcuugcaaggacccugagcugcggcauugaagcacacccaacccaacucgacugaagucagccucacugaaccggaucugagaaucuucucucucugggcuugccagggcucuccgaaccuagcuagcauccucuucaauuccaacuagaaagcuuaccauggagaccuacgugaacaagcugcacgagggcagcaccuacacggccgccguccaguacaacgugcucgagaaggacgacgaccccgcgucccugaccaucugggugccgauguuccagagcuccaugcccgccgaccugcucaucaaggagcuggccaacgucaacauccuggugaagcagaucagcacccccaaggggcccucccuccgcgugaugaucaacagccgguccgccguccuggcccagaugccgagcaaguucaccaucugcgcgaacgugucccuggacgagcgcagcaagcucgccuacgacgugacgacccccugcgagaucaaggccugcucccugaccugccucaagagcaagaacaugcugaccacggucaaggaccugaccaugaagacccugaaccccacccacgacaucaucgcccucugcgaguucgagaacaucgugacguccaagaaggugaucauccccaccuaccugcggagcaucuccguccgcaacaaggaccugaacacccucgagaacaucaccacgaccgaguucaagaacgcgaucaccaacgccaagaucaucccguacagcggccugcugcucgugaucaccgugacggacaacaagggggccuucaaguacaucaagccccagucccaguucaucgucgaccugggcgccuaccuggagaaggagagcaucuacuacgugaccaccaacuggaagcacaccgccacgcgguucgcgaucaagcccauggaggacugaggacuaguacuggcugcaucucccuuuccucuguccuccauccuucucccaggauggugaagggggaccugguacccagugauccccaccccaggauccuaaaucaugacuuaccugcuaauaaaaacucauuggaaaagugagaagaucuaaaaaaaaaaaaaaaaaaaaaaaaaaaaaaaaaaaaaaaaaaaaaaaaaaaaaaaaaaaaaaaaugcaucccccccccccccccccccccccccccccccaaaggcucuuuucagagccaccagaauu

SEQ ID NO: 10015 - RNA, 1224 nt, Artificial Sequence
  mRNA product Design h-5 comprising derived and/or modified sequence from HRSV(A2)__P0DOE7.1__M (opt2)
gggagagggcgcuuggcuugcaaggacccugagcugcggcauugaagcacacccaacccaacucgacugaagucagccucacugaaccggaucugagaaucuucucucucugggcuugccagggcucuccgaaccuagcuagcauccucuucaauuccaacuagaaagcuuaccauggagaccuacgucaacaagcuccacgagggcuccaccuacaccgccgccguccaguacaacguccucgagaaggacgacgaccccgccucccucaccaucuggguccccauguuccaguccuccaugcccgccgaccuccucaucaaggagcucgccaacgucaacauccucgucaagcagaucuccacccccaagggccccucccuccgcgucaugaucaacucccgcuccgccguccucgcccagaugcccuccaaguucaccaucugcgccaacgucucccucgacgagcgcuccaagcucgccuacgacgucaccacccccugcgagaucaaggccugcucccucaccugccucaaguccaagaacaugcucaccaccgucaaggaccucaccaugaagacccucaaccccacccacgacaucaucgcccucugcgaguucgagaacaucgucaccuccaagaaggucaucauccccaccuaccuccgcuccaucuccguccgcaacaaggaccucaacacccucgagaacaucaccaccaccgaguucaagaacgccaucaccaacgccaagaucauccccuacuccggccuccuccucgucaucaccgucaccgacaacaagggcgccuucaaguacaucaagccccagucccaguucaucgucgaccucggcgccuaccucgagaaggaguccaucuacuacgucaccaccaacuggaagcacaccgccacccgcuucgccaucaagcccauggaggacugaggacuaguacuggcugcaucucccuuuccucuguccuccauccuucucccaggauggugaagggggaccugguacccagugauccccaccccaggauccuaaaucaugacuuaccugcuaauaaaaacucauuggaaaagugagaagaucuaaaaaaaaaaaaaaaaaaaaaaaaaaaaaaaaaaaaaaaaaaaaaaaaaaaaaaaaaaaaaaaaugcaucccccccccccccccccccccccccccccccaaaggcucuuuucagagccaccagaauu

SEQ ID NO: 10016 - RNA, 1224 nt, Artificial Sequence
  mRNA product Design h-5 comprising derived and/or modified sequence from HRSV(A2)__P0DOE7.1__M (opt3)
gggagagggcgcuuggcuugcaaggacccugagcugcggcauugaagcacacccaacccaacucgacugaagucagccucacugaaccggaucugagaaucuucucucucugggcuugccagggcucuccgaaccuagcuagcauccucuucaauuccaacuagaaagcuuaccauggagaccuacgugaacaagcugcacgaaggcagcacauauacugccgcuguccaguacaauguucucgagaaagacgaugaccccgcaucccuuacgaucugggugccuauguuccaaucuucaaugccagccgaucuguugauuaaggaauuagcgaacguaaauauacuggugaaacagaucaguaccccgaaggggcccagccuaagagucaugauuaacuccaggucugcugugcucgcccagaugccuucgaaauuuacaaucugcgcaaauguuucacuggacgagcggagcaaacuugccuaugaugugacuaccccaugugaaauuaaggcuugcagucugacauguuugaaguccaagaacaugcucaccacugucaaagaccugacaaugaagacccugaaucccacgcaugauaucauagcacucugcgaguucgagaacaucgugacuucuaaaaagguaauuaucccuaccuacuuacgcagcauuuccguucgaaauaaggaccugaacacacuugaaaauaucacuaccacagaguuuaaaaacgccauaaccaaugcuaagauuaucccauauucaggauugcugcuagugauuacggucacugauaacaaaggugccuucaaguacaucaaaccccagagucaauuuaucguggaccucggcgcguaucuggaaaaggagagcauuuacuacgugacaaccaauuggaaacacacugcaacacguuucgccauaaagccuauggaggauugaggacuaguacuggcugcaucucccuuuccucuguccuccauccuucucccaggauggugaagggggaccugguacccagugauccccaccccaggauccuaaaucaugacuuaccugcuaauaaaaacucauuggaaaagugagaagaucuaaaaaaaaaaaaaaaaaaaaaaaaaaaaaaaaaaaaaaaaaaaaaaaaaaaaaaaaaaaaaaaaugcaucccccccccccccccccccccccccccccccaaaggcucuuuucagagccaccagaauu

SEQ ID NO: 10017 - RNA, 1224 nt, Artificial Sequence
  mRNA product Design h-5 comprising derived and/or modified sequence from HRSV(A2)__P0DOE7.1__M (opt4)
gggagagggcgcuuggcuugcaaggacccugagcugcggcauugaagcacacccaacccaacucgacugaagucagccucacugaaccggaucugagaaucuucucucucugggcuugccagggcucuccgaaccuagcuagcauccucuucaauuccaacuagaaagcuuaccauggagaccuacgugaacaagcugcacgagggcagcaccuacaccgccgccgugcaguacaacgugcuggagaaggacgacgaccccgccagccugaccaucugggugcccauguuccagagcagcaugcccgccgaccugcugaucaaggagcuggccaacgugaacauccuggugaagcagaucagcacccccaagggccccagccugagagugaugaucaacagcagaagcgccgugcuggcccagaugcccagcaaguucaccaucugcgccaacgugagccuggacgagagaagcaagcuggccuacgacgugaccacccccugcgagaucaaggccugcagccugaccugccugaagagcaagaacaugcugaccaccgugaaggaccugaccaugaagacccugaaccccacccacgacaucaucgcccugugcgaguucgagaacaucgugaccagcaagaaggugaucauccccaccuaccugagaagcaucagcgugagaaacaaggaccugaacacccuggagaacaucaccaccaccgaguucaagaacgccaucaccaacgccaagaucauccccuacagcggccugcugcuggugaucaccgugaccgacaacaagggcgccuucaaguacaucaagccccagagccaguucaucguggaccugggcgccuaccuggagaaggagagcaucuacuacgugaccaccaacuggaagcacaccgccaccagauucgccaucaagcccauggaggacugaggacuaguacuggcugcaucucccuuuccucuguccuccauccuucucccaggauggugaagggggaccugguacccagugauccccaccccaggauccuaaaucaugacuuaccugcuaauaaaaacucauuggaaaagugagaagaucuaaaaaaaaaaaaaaaaaaaaaaaaaaaaaaaaaaaaaaaaaaaaaaaaaaaaaaaaaaaaaaaaugcaucccccccccccccccccccccccccccccccaaaggcucuuuucagagccaccagaauu

SEQ ID NO: 10018 - RNA, 1224 nt, Artificial Sequence
  mRNA product Design h-5 comprising derived and/or modified sequence from HRSV(A2)__P0DOE7.1__M (opt5)
gggagagggcgcuuggcuugcaaggacccugagcugcggcauugaagcacacccaacccaacucgacugaagucagccucacugaaccggaucugagaaucuucucucucugggcuugccagggcucuccgaaccuagcuagcauccucuucaauuccaacuagaaagcuuaccauggagaccuacgugaacaagcugcacgaaggcagcacauauacggccgcuguccaguacaauguucucgagaaagacgaugaccccgccucccugaccaucugggugccuauguuccaaucuagcaugccggcggaucuucugauuaaggaacucgcuaacgugaauauccuggucaaacagauuuccacacccaaggggccuucucuuagagugaugaucaacagccgguccgccguucuggcccagaugcccucuaaauuuaccauuugcgcuaaugugagccucgacgagcgcuccaagcuggccuaugaugucacaaccccuugugaaaucaaggcuugcagccugacaugucucaaaucuaagaacaugcugaccacggugaaagaccuuaccaugaagacacugaaucccacccaugauaucauugcccucugcgaguucgagaacaucguuacauccaaaaaggugauuaucccuaccuaccugagaagcauuucuguccggaauaaggaccuuaacacgcuggaaaauaucacaaccacagaguuuaaaaacgcgauuaccaaugccaagaucaucccguauuccggacuccugcuggugauuaccgugacagauaacaaaggcgcuuucaaguacaucaaaccccagagccaauuuauugucgaccucggggccuaucuggaaaaggagucuaucuacuacguuacgaccaauuggaaacacacagcuacccgcuucgccauuaagccuauggaggauugaggacuaguacuggcugcaucucccuuuccucuguccuccauccuucucccaggauggugaagggggaccugguacccagugauccccaccccaggauccuaaaucaugacuuaccugcuaauaaaaacucauuggaaaagugagaagaucuaaaaaaaaaaaaaaaaaaaaaaaaaaaaaaaaaaaaaaaaaaaaaaaaaaaaaaaaaaaaaaaaugcaucccccccccccccccccccccccccccccccaaaggcucuuuucagagccaccagaauu

SEQ ID NO: 10019 - RNA, 1224 nt, Artificial Sequence
  mRNA product Design h-5 comprising derived and/or modified sequence from HRSV(A2)__P0DOE7.1__M (opt6)
gggagagggcgcuuggcuugcaaggacccugagcugcggcauugaagcacacccaacccaacucgacugaagucagccucacugaaccggaucugagaaucuucucucucugggcuugccagggcucuccgaaccuagcuagcauccucuucaauuccaacuagaaagcuuaccauggaaacauacguaaacaaacuacacgaaggauccacauacacagcagcaguacaauacaacguacuagaaaaagacgacgacccagcaucuuuaaccauauggguaccaauguuccaaucaucaaugccagcagaccucuuaauaaaagaacuagcaaacguaaacauccuagucaaacaaauaucaacacccaaaggaccaucccucagaguaaugaucaacucaagaucagcaguacuagcacaaaugccaucaaaauucacaauaugcgccaacguuucuuuagacgaacgaucaaaauuagccuacgacguaacaacacccugcgaaauaaaagcaugcucacuaacaugccuaaaaucaaaaaacaugcucacuacaguaaaagaccuaaccaugaaaacacucaacccaacacacgacauaauagcccuaugcgaauuugaaaacauaguaacaucaaaaaaaguaauaaucccaacauacuuaagaucgaucucagucagaaacaaagaccuaaauacacucgaaaacauaacaacaacagaauuuaaaaacgcaauaacaaacgcaaaaauaauaccauacucaggacuacuccuaguaauaacaguaacagacaacaaaggagcauucaaauacauaaaaccacaaucacaauucaucguagaccucggagcauaccuagaaaaagaaucaauauacuacguaacaacaaacuggaaacacaccgccacaagauucgcaauaaaacccauggaagacuaaggacuaguacuggcugcaucucccuuuccucuguccuccauccuucucccaggauggugaagggggaccugguacccagugauccccaccccaggauccuaaaucaugacuuaccugcuaauaaaaacucauuggaaaagugagaagaucuaaaaaaaaaaaaaaaaaaaaaaaaaaaaaaaaaaaaaaaaaaaaaaaaaaaaaaaaaaaaaaaaugcaucccccccccccccccccccccccccccccccaaaggcucuuuucagagccaccagaauu

SEQ ID NO: 10020 - RNA, 1224 nt, Artificial Sequence
  mRNA product Design h-5 comprising derived and/or modified sequence from HRSV(A2)__P0DOE7.1__M (opt11)
gggagagggcgcuuggcuugcaaggacccugagcugcggcauugaagcacacccaacccaacucgacugaagucagccucacugaaccggaucugagaaucuucucucucugggcuugccagggcucuccgaaccuagcuagcauccucuucaauuccaacuagaaagcuuaccauggaaaccuacgucaacaaacuacacgaaggcucaaccuacaccgccgccguccaauacaacguccucgaaaaagacgacgaccccgccucccuaaccaucuggguucccauguuccaaucauccaugcccgccgaccuccucauaaaagaacuagccaacgucaacauccuagucaaacaaaucagcacccccaaaggccccucccuccgcguaaugaucaacucccgcuccgccguccuagcccaaaugcccuccaaauuuacaaucugcgccaacgucucccucgacgaacgcucaaaacucgccuacgacgucaccacacccugcgaaaucaaagccugcucccucaccugccucaaaagcaaaaauaugcuaaccaccgucaaagaccuuaccaugaaaacccucaaccccacucacgacaucauagcccucugcgaauuugaaaacaucgucaccuccaaaaaagucaucauccccacauaccuccgcuccaucuccguccgcaacaaagaccucaacacccucgaaaacaucaccaccaccgaauuuaaaaacgccaucaccaacgccaaaaucauccccuacuccggccuccuccucgucaucaccguuaccgacaacaaaggcgccuucaaauacaucaaaccccaaucccaauucaucgucgaccucggagccuaccuugaaaaagaguccaucuacuacgucaccaccaacuggaaacacaccgccacccgauucgccaucaaacccauggaagacuaaggacuaguacuggcugcaucucccuuuccucuguccuccauccuucucccaggauggugaagggggaccugguacccagugauccccaccccaggauccuaaaucaugacuuaccugcuaauaaaaacucauuggaaaagugagaagaucuaaaaaaaaaaaaaaaaaaaaaaaaaaaaaaaaaaaaaaaaaaaaaaaaaaaaaaaaaaaaaaaaugcaucccccccccccccccccccccccccccccccaaaggcucuuuucagagccaccagaauu

SEQ ID NO: 10021 - RNA, 1157 nt, Artificial Sequence
  mRNA product Design i-1 comprising derived and/or modified sequence from HRSV(A2)__P0DOE7.1__M (wt)
gggagagggcgcuuggcuugcaaggacccugagcugcggcauugaagcacacccaacccaacucgacugaagucagccucacugaaccggaucugagaaucuucucucucugggcuugccagggcucuccgaaccuagcuagcauccucuucaauuccaacuagaaagcuuaccauggaaacauacgugaacaagcuucacgaaggcuccacauacacagcugcuguucaauacaaugucuuagaaaaagacgaugacccugcaucacuuacaauaugggugcccauguuccaaucaucuaugccagcagauuuacuuauaaaagaacuagcuaaugucaacauacuagugaaacaaauauccacacccaagggaccuucacuaagagucaugauaaacucaagaagugcagugcuagcacaaaugcccagcaaauuuaccauaugcgcuaauguguccuuggaugaaagaagcaaacuagcauaugauguaaccacacccugugaaaucaaggcauguagucuaacaugccuaaaaucaaaaaauauguugacuacaguuaaagaucucacuaugaagacacucaacccuacacaugauauuauugcuuuaugugaauuugaaaacauaguaacaucaaaaaaagucauaauaccaacauaccuaagauccaucagugucagaaauaaagaucugaacacacuugaaaauauaacaaccacugaauucaaaaaugcuaucacaaaugcaaaaaucaucccuuacucaggauuacuauuagucaucacagugacugacaacaaaggagcauucaaauacauaaagccacaaagucaauucauaguagaucuuggagcuuaccuagaaaaagaaaguauauauuauguuaccacaaauuggaagcacacagcuacacgauuugcaaucaaacccauggaagauuaaggacuaguguccaccugucccuccugggcugcuggauugucucguuuuccugccaaauaaacaggaucagcgcuuuacagaucuaaaaaaaaaaaaaaaaaaaaaaaaaaaaaaaaaaaaaaaaaaaaaaaaaaaaaaaaaaaaaaaaugcaucccccccccccccccccccccccccccccccaaaggcucuuuucagagccaccagaauu

SEQ ID NO: 10022 - RNA, 1157 nt, Artificial Sequence
  mRNA product Design i-1 comprising derived and/or modified sequence from HRSV(A2)__P0DOE7.1__M (opt1)
gggagagggcgcuuggcuugcaaggacccugagcugcggcauugaagcacacccaacccaacucgacugaagucagccucacugaaccggaucugagaaucuucucucucugggcuugccagggcucuccgaaccuagcuagcauccucuucaauuccaacuagaaagcuuaccauggagaccuacgugaacaagcugcacgagggcagcaccuacacggccgccguccaguacaacgugcucgagaaggacgacgaccccgcgucccugaccaucugggugccgauguuccagagcuccaugcccgccgaccugcucaucaaggagcuggccaacgucaacauccuggugaagcagaucagcacccccaaggggcccucccuccgcgugaugaucaacagccgguccgccguccuggcccagaugccgagcaaguucaccaucugcgcgaacgugucccuggacgagcgcagcaagcucgccuacgacgugacgacccccugcgagaucaaggccugcucccugaccugccucaagagcaagaacaugcugaccacggucaaggaccugaccaugaagacccugaaccccacccacgacaucaucgcccucugcgaguucgagaacaucgugacguccaagaaggugaucauccccaccuaccugcggagcaucuccguccgcaacaaggaccugaacacccucgagaacaucaccacgaccgaguucaagaacgcgaucaccaacgccaagaucaucccguacagcggccugcugcucgugaucaccgugacggacaacaagggggccuucaaguacaucaagccccagucccaguucaucgucgaccugggcgccuaccuggagaaggagagcaucuacuacgugaccaccaacuggaagcacaccgccacgcgguucgcgaucaagcccauggaggacugaggacuaguguccaccugucccuccugggcugcuggauugucucguuuuccugccaaauaaacaggaucagcgcuuuacagaucuaaaaaaaaaaaaaaaaaaaaaaaaaaaaaaaaaaaaaaaaaaaaaaaaaaaaaaaaaaaaaaaaugcaucccccccccccccccccccccccccccccccaaaggcucuuuucagagccaccagaauu

SEQ ID NO: 10023 - RNA, 1157 nt, Artificial Sequence
  mRNA product Design i-1 comprising derived and/or modified sequence from HRSV(A2)__P0DOE7.1__M (opt2)
gggagagggcgcuuggcuugcaaggacccugagcugcggcauugaagcacacccaacccaacucgacugaagucagccucacugaaccggaucugagaaucuucucucucugggcuugccagggcucuccgaaccuagcuagcauccucuucaauuccaacuagaaagcuuaccauggagaccuacgucaacaagcuccacgagggcuccaccuacaccgccgccguccaguacaacguccucgagaaggacgacgaccccgccucccucaccaucuggguccccauguuccaguccuccaugcccgccgaccuccucaucaaggagcucgccaacgucaacauccucgucaagcagaucuccacccccaagggccccucccuccgcgucaugaucaacucccgcuccgccguccucgcccagaugcccuccaaguucaccaucugcgccaacgucucccucgacgagcgcuccaagcucgccuacgacgucaccacccccugcgagaucaaggccugcucccucaccugccucaaguccaagaacaugcucaccaccgucaaggaccucaccaugaagacccucaaccccacccacgacaucaucgcccucugcgaguucgagaacaucgucaccuccaagaaggucaucauccccaccuaccuccgcuccaucuccguccgcaacaaggaccucaacacccucgagaacaucaccaccaccgaguucaagaacgccaucaccaacgccaagaucauccccuacuccggccuccuccucgucaucaccgucaccgacaacaagggcgccuucaaguacaucaagccccagucccaguucaucgucgaccucggcgccuaccucgagaaggaguccaucuacuacgucaccaccaacuggaagcacaccgccacccgcuucgccaucaagcccauggaggacugaggacuaguguccaccugucccuccugggcugcuggauugucucguuuuccugccaaauaaacaggaucagcgcuuuacagaucuaaaaaaaaaaaaaaaaaaaaaaaaaaaaaaaaaaaaaaaaaaaaaaaaaaaaaaaaaaaaaaaaugcaucccccccccccccccccccccccccccccccaaaggcucuuuucagagccaccagaauu

SEQ ID NO: 10024 - RNA, 1157 nt, Artificial Sequence
  mRNA product Design i-1 comprising derived and/or modified sequence from HRSV(A2)__P0DOE7.1__M (opt3)
gggagagggcgcuuggcuugcaaggacccugagcugcggcauugaagcacacccaacccaacucgacugaagucagccucacugaaccggaucugagaaucuucucucucugggcuugccagggcucuccgaaccuagcuagcauccucuucaauuccaacuagaaagcuuaccauggagaccuacgugaacaagcugcacgaaggcagcacauauacugccgcuguccaguacaauguucucgagaaagacgaugaccccgcaucccuuacgaucugggugccuauguuccaaucuucaaugccagccgaucuguugauuaaggaauuagcgaacguaaauauacuggugaaacagaucaguaccccgaaggggcccagccuaagagucaugauuaacuccaggucugcugugcucgcccagaugccuucgaaauuuacaaucugcgcaaauguuucacuggacgagcggagcaaacuugccuaugaugugacuaccccaugugaaauuaaggcuugcagucugacauguuugaaguccaagaacaugcucaccacugucaaagaccugacaaugaagacccugaaucccacgcaugauaucauagcacucugcgaguucgagaacaucgugacuucuaaaaagguaauuaucccuaccuacuuacgcagcauuuccguucgaaauaaggaccugaacacacuugaaaauaucacuaccacagaguuuaaaaacgccauaaccaaugcuaagauuaucccauauucaggauugcugcuagugauuacggucacugauaacaaaggugccuucaaguacaucaaaccccagagucaauuuaucguggaccucggcgcguaucuggaaaaggagagcauuuacuacgugacaaccaauuggaaacacacugcaacacguuucgccauaaagccuauggaggauugaggacuaguguccaccugucccuccugggcugcuggauugucucguuuuccugccaaauaaacaggaucagcgcuuuacagaucuaaaaaaaaaaaaaaaaaaaaaaaaaaaaaaaaaaaaaaaaaaaaaaaaaaaaaaaaaaaaaaaaugcaucccccccccccccccccccccccccccccccaaaggcucuuuucagagccaccagaauu

SEQ ID NO: 10025 - RNA, 1157 nt, Artificial Sequence
  mRNA product Design i-1 comprising derived and/or modified sequence from HRSV(A2)__P0DOE7.1__M (opt4)
gggagagggcgcuuggcuugcaaggacccugagcugcggcauugaagcacacccaacccaacucgacugaagucagccucacugaaccggaucugagaaucuucucucucugggcuugccagggcucuccgaaccuagcuagcauccucuucaauuccaacuagaaagcuuaccauggagaccuacgugaacaagcugcacgagggcagcaccuacaccgccgccgugcaguacaacgugcuggagaaggacgacgaccccgccagccugaccaucugggugcccauguuccagagcagcaugcccgccgaccugcugaucaaggagcuggccaacgugaacauccuggugaagcagaucagcacccccaagggccccagccugagagugaugaucaacagcagaagcgccgugcuggcccagaugcccagcaaguucaccaucugcgccaacgugagccuggacgagagaagcaagcuggccuacgacgugaccacccccugcgagaucaaggccugcagccugaccugccugaagagcaagaacaugcugaccaccgugaaggaccugaccaugaagacccugaaccccacccacgacaucaucgcccugugcgaguucgagaacaucgugaccagcaagaaggugaucauccccaccuaccugagaagcaucagcgugagaaacaaggaccugaacacccuggagaacaucaccaccaccgaguucaagaacgccaucaccaacgccaagaucauccccuacagcggccugcugcuggugaucaccgugaccgacaacaagggcgccuucaaguacaucaagccccagagccaguucaucguggaccugggcgccuaccuggagaaggagagcaucuacuacgugaccaccaacuggaagcacaccgccaccagauucgccaucaagcccauggaggacugaggacuaguguccaccugucccuccugggcugcuggauugucucguuuuccugccaaauaaacaggaucagcgcuuuacagaucuaaaaaaaaaaaaaaaaaaaaaaaaaaaaaaaaaaaaaaaaaaaaaaaaaaaaaaaaaaaaaaaaugcaucccccccccccccccccccccccccccccccaaaggcucuuuucagagccaccagaauu

SEQ ID NO: 10026 - RNA, 1157 nt, Artificial Sequence
  mRNA product Design i-1 comprising derived and/or modified sequence from HRSV(A2)__P0DOE7.1__M (opt5)
gggagagggcgcuuggcuugcaaggacccugagcugcggcauugaagcacacccaacccaacucgacugaagucagccucacugaaccggaucugagaaucuucucucucugggcuugccagggcucuccgaaccuagcuagcauccucuucaauuccaacuagaaagcuuaccauggagaccuacgugaacaagcugcacgaaggcagcacauauacggccgcuguccaguacaauguucucgagaaagacgaugaccccgccucccugaccaucugggugccuauguuccaaucuagcaugccggcggaucuucugauuaaggaacucgcuaacgugaauauccuggucaaacagauuuccacacccaaggggccuucucuuagagugaugaucaacagccgguccgccguucuggcccagaugcccucuaaauuuaccauuugcgcuaaugugagccucgacgagcgcuccaagcuggccuaugaugucacaaccccuugugaaaucaaggcuugcagccugacaugucucaaaucuaagaacaugcugaccacggugaaagaccuuaccaugaagacacugaaucccacccaugauaucauugcccucugcgaguucgagaacaucguuacauccaaaaaggugauuaucccuaccuaccugagaagcauuucuguccggaauaaggaccuuaacacgcuggaaaauaucacaaccacagaguuuaaaaacgcgauuaccaaugccaagaucaucccguauuccggacuccugcuggugauuaccgugacagauaacaaaggcgcuuucaaguacaucaaaccccagagccaauuuauugucgaccucggggccuaucuggaaaaggagucuaucuacuacguuacgaccaauuggaaacacacagcuacccgcuucgccauuaagccuauggaggauugaggacuaguguccaccugucccuccugggcugcuggauugucucguuuuccugccaaauaaacaggaucagcgcuuuacagaucuaaaaaaaaaaaaaaaaaaaaaaaaaaaaaaaaaaaaaaaaaaaaaaaaaaaaaaaaaaaaaaaaugcaucccccccccccccccccccccccccccccccaaaggcucuuuucagagccaccagaauu

SEQ ID NO: 10027 - RNA, 1157 nt, Artificial Sequence
  mRNA product Design i-1 comprising derived and/or modified sequence from HRSV(A2)__P0DOE7.1__M (opt6)
gggagagggcgcuuggcuugcaaggacccugagcugcggcauugaagcacacccaacccaacucgacugaagucagccucacugaaccggaucugagaaucuucucucucugggcuugccagggcucuccgaaccuagcuagcauccucuucaauuccaacuagaaagcuuaccauggaaacauacguaaacaaacuacacgaaggauccacauacacagcagcaguacaauacaacguacuagaaaaagacgacgacccagcaucuuuaaccauauggguaccaauguuccaaucaucaaugccagcagaccucuuaauaaaagaacuagcaaacguaaacauccuagucaaacaaauaucaacacccaaaggaccaucccucagaguaaugaucaacucaagaucagcaguacuagcacaaaugccaucaaaauucacaauaugcgccaacguuucuuuagacgaacgaucaaaauuagccuacgacguaacaacacccugcgaaauaaaagcaugcucacuaacaugccuaaaaucaaaaaacaugcucacuacaguaaaagaccuaaccaugaaaacacucaacccaacacacgacauaauagcccuaugcgaauuugaaaacauaguaacaucaaaaaaaguaauaaucccaacauacuuaagaucgaucucagucagaaacaaagaccuaaauacacucgaaaacauaacaacaacagaauuuaaaaacgcaauaacaaacgcaaaaauaauaccauacucaggacuacuccuaguaauaacaguaacagacaacaaaggagcauucaaauacauaaaaccacaaucacaauucaucguagaccucggagcauaccuagaaaaagaaucaauauacuacguaacaacaaacuggaaacacaccgccacaagauucgcaauaaaacccauggaagacuaaggacuaguguccaccugucccuccugggcugcuggauugucucguuuuccugccaaauaaacaggaucagcgcuuuacagaucuaaaaaaaaaaaaaaaaaaaaaaaaaaaaaaaaaaaaaaaaaaaaaaaaaaaaaaaaaaaaaaaaugcaucccccccccccccccccccccccccccccccaaaggcucuuuucagagccaccagaauu

SEQ ID NO: 10028 - RNA, 1157 nt, Artificial Sequence
  mRNA product Design i-1 comprising derived and/or modified sequence from HRSV(A2)__P0DOE7.1__M (opt11)
gggagagggcgcuuggcuugcaaggacccugagcugcggcauugaagcacacccaacccaacucgacugaagucagccucacugaaccggaucugagaaucuucucucucugggcuugccagggcucuccgaaccuagcuagcauccucuucaauuccaacuagaaagcuuaccauggaaaccuacgucaacaaacuacacgaaggcucaaccuacaccgccgccguccaauacaacguccucgaaaaagacgacgaccccgccucccuaaccaucuggguucccauguuccaaucauccaugcccgccgaccuccucauaaaagaacuagccaacgucaacauccuagucaaacaaaucagcacccccaaaggccccucccuccgcguaaugaucaacucccgcuccgccguccuagcccaaaugcccuccaaauuuacaaucugcgccaacgucucccucgacgaacgcucaaaacucgccuacgacgucaccacacccugcgaaaucaaagccugcucccucaccugccucaaaagcaaaaauaugcuaaccaccgucaaagaccuuaccaugaaaacccucaaccccacucacgacaucauagcccucugcgaauuugaaaacaucgucaccuccaaaaaagucaucauccccacauaccuccgcuccaucuccguccgcaacaaagaccucaacacccucgaaaacaucaccaccaccgaauuuaaaaacgccaucaccaacgccaaaaucauccccuacuccggccuccuccucgucaucaccguuaccgacaacaaaggcgccuucaaauacaucaaaccccaaucccaauucaucgucgaccucggagccuaccuugaaaaagaguccaucuacuacgucaccaccaacuggaaacacaccgccacccgauucgccaucaaacccauggaagacuaaggacuaguguccaccugucccuccugggcugcuggauugucucguuuuccugccaaauaaacaggaucagcgcuuuacagaucuaaaaaaaaaaaaaaaaaaaaaaaaaaaaaaaaaaaaaaaaaaaaaaaaaaaaaaaaaaaaaaaaugcaucccccccccccccccccccccccccccccccaaaggcucuuuucagagccaccagaauu

SEQ ID NO: 10029 - RNA, 1157 nt, Artificial Sequence
  mRNA product Design i-2 comprising derived and/or modified sequence from HRSV(A2)__P0DOE7.1__M (wt)
gggagaggcgcugccuacggagguggcagccaucuccuucucggcaucaagcuuaccauggaaacauacgugaacaagcuucacgaaggcuccacauacacagcugcuguucaauacaaugucuuagaaaaagacgaugacccugcaucacuuacaauaugggugcccauguuccaaucaucuaugccagcagauuuacuuauaaaagaacuagcuaaugucaacauacuagugaaacaaauauccacacccaagggaccuucacuaagagucaugauaaacucaagaagugcagugcuagcacaaaugcccagcaaauuuaccauaugcgcuaauguguccuuggaugaaagaagcaaacuagcauaugauguaaccacacccugugaaaucaaggcauguagucuaacaugccuaaaaucaaaaaauauguugacuacaguuaaagaucucacuaugaagacacucaacccuacacaugauauuauugcuuuaugugaauuugaaaacauaguaacaucaaaaaaagucauaauaccaacauaccuaagauccaucagugucagaaauaaagaucugaacacacuugaaaauauaacaaccacugaauucaaaaaugcuaucacaaaugcaaaaaucaucccuuacucaggauuacuauuagucaucacagugacugacaacaaaggagcauucaaauacauaaagccacaaagucaauucauaguagaucuuggagcuuaccuagaaaaagaaaguauauauuauguuaccacaaauuggaagcacacagcuacacgauuugcaaucaaacccauggaagauuaaggacuagugcaucacauuuaaaagcaucucagccuaccaugagaauaagagaaagaaaaugaagaucaauagcuuauucaucucuuuuucuuuuucguugguguaaagccaacacccugucuaaaaaacauaaauuucuuuaaucauuuugccucuuuucucugugcuucaauuaauaaaaaauggaaagaaccuagaucuaaaaaaaaaaaaaaaaaaaaaaaaaaaaaaaaaaaaaaaaaaaaaaaaaaaaaaaaaaaaaaaaugcaucccccccccccccccccccccccccccccccaaaggcucuuuucagagccaccagaauu

SEQ ID NO: 10030 - RNA, 1157 nt, Artificial Sequence
  mRNA product Design i-2 comprising derived and/or modified sequence from HRSV(A2)__P0DOE7.1__M (opt1)
gggagaggcgcugccuacggagguggcagccaucuccuucucggcaucaagcuuaccauggagaccuacgugaacaagcugcacgagggcagcaccuacacggccgccguccaguacaacgugcucgagaaggacgacgaccccgcgucccugaccaucugggugccgauguuccagagcuccaugcccgccgaccugcucaucaaggagcuggccaacgucaacauccuggugaagcagaucagcacccccaaggggcccucccuccgcgugaugaucaacagccgguccgccguccuggcccagaugccgagcaaguucaccaucugcgcgaacgugucccuggacgagcgcagcaagcucgccuacgacgugacgacccccugcgagaucaaggccugcucccugaccugccucaagagcaagaacaugcugaccacggucaaggaccugaccaugaagacccugaaccccacccacgacaucaucgcccucugcgaguucgagaacaucgugacguccaagaaggugaucauccccaccuaccugcggagcaucuccguccgcaacaaggaccugaacacccucgagaacaucaccacgaccgaguucaagaacgcgaucaccaacgccaagaucaucccguacagcggccugcugcucgugaucaccgugacggacaacaagggggccuucaaguacaucaagccccagucccaguucaucgucgaccugggcgccuaccuggagaaggagagcaucuacuacgugaccaccaacuggaagcacaccgccacgcgguucgcgaucaagcccauggaggacugaggacuagugcaucacauuuaaaagcaucucagccuaccaugagaauaagagaaagaaaaugaagaucaauagcuuauucaucucuuuuucuuuuucguugguguaaagccaacacccugucuaaaaaacauaaauuucuuuaaucauuuugccucuuuucucugugcuucaauuaauaaaaaauggaaagaaccuagaucuaaaaaaaaaaaaaaaaaaaaaaaaaaaaaaaaaaaaaaaaaaaaaaaaaaaaaaaaaaaaaaaaugcaucccccccccccccccccccccccccccccccaaaggcucuuuucagagccaccagaauu

SEQ ID NO: 10031 - RNA, 1157 nt, Artificial Sequence
  mRNA product Design i-2 comprising derived and/or modified sequence from HRSV(A2)__P0DOE7.1__M (opt2)
gggagaggcgcugccuacggagguggcagccaucuccuucucggcaucaagcuuaccauggagaccuacgucaacaagcuccacgagggcuccaccuacaccgccgccguccaguacaacguccucgagaaggacgacgaccccgccucccucaccaucuggguccccauguuccaguccuccaugcccgccgaccuccucaucaaggagcucgccaacgucaacauccucgucaagcagaucuccacccccaagggccccucccuccgcgucaugaucaacucccgcuccgccguccucgcccagaugcccuccaaguucaccaucugcgccaacgucucccucgacgagcgcuccaagcucgccuacgacgucaccacccccugcgagaucaaggccugcucccucaccugccucaaguccaagaacaugcucaccaccgucaaggaccucaccaugaagacccucaaccccacccacgacaucaucgcccucugcgaguucgagaacaucgucaccuccaagaaggucaucauccccaccuaccuccgcuccaucuccguccgcaacaaggaccucaacacccucgagaacaucaccaccaccgaguucaagaacgccaucaccaacgccaagaucauccccuacuccggccuccuccucgucaucaccgucaccgacaacaagggcgccuucaaguacaucaagccccagucccaguucaucgucgaccucggcgccuaccucgagaaggaguccaucuacuacgucaccaccaacuggaagcacaccgccacccgcuucgccaucaagcccauggaggacugaggacuagugcaucacauuuaaaagcaucucagccuaccaugagaauaagagaaagaaaaugaagaucaauagcuuauucaucucuuuuucuuuuucguugguguaaagccaacacccugucuaaaaaacauaaauuucuuuaaucauuuugccucuuuucucugugcuucaauuaauaaaaaauggaaagaaccuagaucuaaaaaaaaaaaaaaaaaaaaaaaaaaaaaaaaaaaaaaaaaaaaaaaaaaaaaaaaaaaaaaaaugcaucccccccccccccccccccccccccccccccaaaggcucuuuucagagccaccagaauu

SEQ ID NO: 10032 - RNA, 1157 nt, Artificial Sequence
  mRNA product Design i-2 comprising derived and/or modified sequence from HRSV(A2)__P0DOE7.1__M (opt3)
gggagaggcgcugccuacggagguggcagccaucuccuucucggcaucaagcuuaccauggagaccuacgugaacaagcugcacgaaggcagcacauauacugccgcuguccaguacaauguucucgagaaagacgaugaccccgcaucccuuacgaucugggugccuauguuccaaucuucaaugccagccgaucuguugauuaaggaauuagcgaacguaaauauacuggugaaacagaucaguaccccgaaggggcccagccuaagagucaugauuaacuccaggucugcugugcucgcccagaugccuucgaaauuuacaaucugcgcaaauguuucacuggacgagcggagcaaacuugccuaugaugugacuaccccaugugaaauuaaggcuugcagucugacauguuugaaguccaagaacaugcucaccacugucaaagaccugacaaugaagacccugaaucccacgcaugauaucauagcacucugcgaguucgagaacaucgugacuucuaaaaagguaauuaucccuaccuacuuacgcagcauuuccguucgaaauaaggaccugaacacacuugaaaauaucacuaccacagaguuuaaaaacgccauaaccaaugcuaagauuaucccauauucaggauugcugcuagugauuacggucacugauaacaaaggugccuucaaguacaucaaaccccagagucaauuuaucguggaccucggcgcguaucuggaaaaggagagcauuuacuacgugacaaccaauuggaaacacacugcaacacguuucgccauaaagccuauggaggauugaggacuagugcaucacauuuaaaagcaucucagccuaccaugagaauaagagaaagaaaaugaagaucaauagcuuauucaucucuuuuucuuuuucguugguguaaagccaacacccugucuaaaaaacauaaauuucuuuaaucauuuugccucuuuucucugugcuucaauuaauaaaaaauggaaagaaccuagaucuaaaaaaaaaaaaaaaaaaaaaaaaaaaaaaaaaaaaaaaaaaaaaaaaaaaaaaaaaaaaaaaaugcaucccccccccccccccccccccccccccccccaaaggcucuuuucagagccaccagaauu

SEQ ID NO: 10033 - RNA, 1157 nt, Artificial Sequence
  mRNA product Design i-2 comprising derived and/or modified sequence from HRSV(A2)__P0DOE7.1__M (opt4)
gggagaggcgcugccuacggagguggcagccaucuccuucucggcaucaagcuuaccauggagaccuacgugaacaagcugcacgagggcagcaccuacaccgccgccgugcaguacaacgugcuggagaaggacgacgaccccgccagccugaccaucugggugcccauguuccagagcagcaugcccgccgaccugcugaucaaggagcuggccaacgugaacauccuggugaagcagaucagcacccccaagggccccagccugagagugaugaucaacagcagaagcgccgugcuggcccagaugcccagcaaguucaccaucugcgccaacgugagccuggacgagagaagcaagcuggccuacgacgugaccacccccugcgagaucaaggccugcagccugaccugccugaagagcaagaacaugcugaccaccgugaaggaccugaccaugaagacccugaaccccacccacgacaucaucgcccugugcgaguucgagaacaucgugaccagcaagaaggugaucauccccaccuaccugagaagcaucagcgugagaaacaaggaccugaacacccuggagaacaucaccaccaccgaguucaagaacgccaucaccaacgccaagaucauccccuacagcggccugcugcuggugaucaccgugaccgacaacaagggcgccuucaaguacaucaagccccagagccaguucaucguggaccugggcgccuaccuggagaaggagagcaucuacuacgugaccaccaacuggaagcacaccgccaccagauucgccaucaagcccauggaggacugaggacuagugcaucacauuuaaaagcaucucagccuaccaugagaauaagagaaagaaaaugaagaucaauagcuuauucaucucuuuuucuuuuucguugguguaaagccaacacccugucuaaaaaacauaaauuucuuuaaucauuuugccucuuuucucugugcuucaauuaauaaaaaauggaaagaaccuagaucuaaaaaaaaaaaaaaaaaaaaaaaaaaaaaaaaaaaaaaaaaaaaaaaaaaaaaaaaaaaaaaaaugcaucccccccccccccccccccccccccccccccaaaggcucuuuucagagccaccagaauu

SEQ ID NO: 10034 - RNA, 1157 nt, Artificial Sequence
  mRNA product Design i-2 comprising derived and/or modified sequence from HRSV(A2)__P0DOE7.1__M (opt5)
gggagaggcgcugccuacggagguggcagccaucuccuucucggcaucaagcuuaccauggagaccuacgugaacaagcugcacgaaggcagcacauauacggccgcuguccaguacaauguucucgagaaagacgaugaccccgccucccugaccaucugggugccuauguuccaaucuagcaugccggcggaucuucugauuaaggaacucgcuaacgugaauauccuggucaaacagauuuccacacccaaggggccuucucuuagagugaugaucaacagccgguccgccguucuggcccagaugcccucuaaauuuaccauuugcgcuaaugugagccucgacgagcgcuccaagcuggccuaugaugucacaaccccuugugaaaucaaggcuugcagccugacaugucucaaaucuaagaacaugcugaccacggugaaagaccuuaccaugaagacacugaaucccacccaugauaucauugcccucugcgaguucgagaacaucguuacauccaaaaaggugauuaucccuaccuaccugagaagcauuucuguccggaauaaggaccuuaacacgcuggaaaauaucacaaccacagaguuuaaaaacgcgauuaccaaugccaagaucaucccguauuccggacuccugcuggugauuaccgugacagauaacaaaggcgcuuucaaguacaucaaaccccagagccaauuuauugucgaccucggggccuaucuggaaaaggagucuaucuacuacguuacgaccaauuggaaacacacagcuacccgcuucgccauuaagccuauggaggauugaggacuagugcaucacauuuaaaagcaucucagccuaccaugagaauaagagaaagaaaaugaagaucaauagcuuauucaucucuuuuucuuuuucguugguguaaagccaacacccugucuaaaaaacauaaauuucuuuaaucauuuugccucuuuucucugugcuucaauuaauaaaaaauggaaagaaccuagaucuaaaaaaaaaaaaaaaaaaaaaaaaaaaaaaaaaaaaaaaaaaaaaaaaaaaaaaaaaaaaaaaaugcaucccccccccccccccccccccccccccccccaaaggcucuuuucagagccaccagaauu

SEQ ID NO: 10035 - RNA, 1157 nt, Artificial Sequence
  mRNA product Design i-2 comprising derived and/or modified sequence from HRSV(A2)__P0DOE7.1__M (opt6)
gggagaggcgcugccuacggagguggcagccaucuccuucucggcaucaagcuuaccauggaaacauacguaaacaaacuacacgaaggauccacauacacagcagcaguacaauacaacguacuagaaaaagacgacgacccagcaucuuuaaccauauggguaccaauguuccaaucaucaaugccagcagaccucuuaauaaaagaacuagcaaacguaaacauccuagucaaacaaauaucaacacccaaaggaccaucccucagaguaaugaucaacucaagaucagcaguacuagcacaaaugccaucaaaauucacaauaugcgccaacguuucuuuagacgaacgaucaaaauuagccuacgacguaacaacacccugcgaaauaaaagcaugcucacuaacaugccuaaaaucaaaaaacaugcucacuacaguaaaagaccuaaccaugaaaacacucaacccaacacacgacauaauagcccuaugcgaauuugaaaacauaguaacaucaaaaaaaguaauaaucccaacauacuuaagaucgaucucagucagaaacaaagaccuaaauacacucgaaaacauaacaacaacagaauuuaaaaacgcaauaacaaacgcaaaaauaauaccauacucaggacuacuccuaguaauaacaguaacagacaacaaaggagcauucaaauacauaaaaccacaaucacaauucaucguagaccucggagcauaccuagaaaaagaaucaauauacuacguaacaacaaacuggaaacacaccgccacaagauucgcaauaaaacccauggaagacuaaggacuagugcaucacauuuaaaagcaucucagccuaccaugagaauaagagaaagaaaaugaagaucaauagcuuauucaucucuuuuucuuuuucguugguguaaagccaacacccugucuaaaaaacauaaauuucuuuaaucauuuugccucuuuucucugugcuucaauuaauaaaaaauggaaagaaccuagaucuaaaaaaaaaaaaaaaaaaaaaaaaaaaaaaaaaaaaaaaaaaaaaaaaaaaaaaaaaaaaaaaaugcaucccccccccccccccccccccccccccccccaaaggcucuuuucagagccaccagaauu

SEQ ID NO: 10036 - RNA, 1157 nt, Artificial Sequence
  mRNA product Design i-2 comprising derived and/or modified sequence from HRSV(A2)__P0DOE7.1__M (opt11)
gggagaggcgcugccuacggagguggcagccaucuccuucucggcaucaagcuuaccauggaaaccuacgucaacaaacuacacgaaggcucaaccuacaccgccgccguccaauacaacguccucgaaaaagacgacgaccccgccucccuaaccaucuggguucccauguuccaaucauccaugcccgccgaccuccucauaaaagaacuagccaacgucaacauccuagucaaacaaaucagcacccccaaaggccccucccuccgcguaaugaucaacucccgcuccgccguccuagcccaaaugcccuccaaauuuacaaucugcgccaacgucucccucgacgaacgcucaaaacucgccuacgacgucaccacacccugcgaaaucaaagccugcucccucaccugccucaaaagcaaaaauaugcuaaccaccgucaaagaccuuaccaugaaaacccucaaccccacucacgacaucauagcccucugcgaauuugaaaacaucgucaccuccaaaaaagucaucauccccacauaccuccgcuccaucuccguccgcaacaaagaccucaacacccucgaaaacaucaccaccaccgaauuuaaaaacgccaucaccaacgccaaaaucauccccuacuccggccuccuccucgucaucaccguuaccgacaacaaaggcgccuucaaauacaucaaaccccaaucccaauucaucgucgaccucggagccuaccuugaaaaagaguccaucuacuacgucaccaccaacuggaaacacaccgccacccgauucgccaucaaacccauggaagacuaaggacuagugcaucacauuuaaaagcaucucagccuaccaugagaauaagagaaagaaaaugaagaucaauagcuuauucaucucuuuuucuuuuucguugguguaaagccaacacccugucuaaaaaacauaaauuucuuuaaucauuuugccucuuuucucugugcuucaauuaauaaaaaauggaaagaaccuagaucuaaaaaaaaaaaaaaaaaaaaaaaaaaaaaaaaaaaaaaaaaaaaaaaaaaaaaaaaaaaaaaaaugcaucccccccccccccccccccccccccccccccaaaggcucuuuucagagccaccagaauu

SEQ ID NO: 10037 - RNA, 1153 nt, Artificial Sequence
  mRNA product Design i-2 comprising derived and/or modified sequence from HRSV(A2)__P0DOE7.1__M (wt)
ggggcgcugccuacggagguggcagccaucuccuucucggcaucaagcuuaccauggaaacauacgugaacaagcuucacgaaggcuccacauacacagcugcuguucaauacaaugucuuagaaaaagacgaugacccugcaucacuuacaauaugggugcccauguuccaaucaucuaugccagcagauuuacuuauaaaagaacuagcuaaugucaacauacuagugaaacaaauauccacacccaagggaccuucacuaagagucaugauaaacucaagaagugcagugcuagcacaaaugcccagcaaauuuaccauaugcgcuaauguguccuuggaugaaagaagcaaacuagcauaugauguaaccacacccugugaaaucaaggcauguagucuaacaugccuaaaaucaaaaaauauguugacuacaguuaaagaucucacuaugaagacacucaacccuacacaugauauuauugcuuuaugugaauuugaaaacauaguaacaucaaaaaaagucauaauaccaacauaccuaagauccaucagugucagaaauaaagaucugaacacacuugaaaauauaacaaccacugaauucaaaaaugcuaucacaaaugcaaaaaucaucccuuacucaggauuacuauuagucaucacagugacugacaacaaaggagcauucaaauacauaaagccacaaagucaauucauaguagaucuuggagcuuaccuagaaaaagaaaguauauauuauguuaccacaaauuggaagcacacagcuacacgauuugcaaucaaacccauggaagauuaaggacuagugcaucacauuuaaaagcaucucagccuaccaugagaauaagagaaagaaaaugaagaucaauagcuuauucaucucuuuuucuuuuucguugguguaaagccaacacccugucuaaaaaacauaaauuucuuuaaucauuuugccucuuuucucugugcuucaauuaauaaaaaauggaaagaaccuagaucuaaaaaaaaaaaaaaaaaaaaaaaaaaaaaaaaaaaaaaaaaaaaaaaaaaaaaaaaaaaaaaaaugcaucccccccccccccccccccccccccccccccaaaggcucuuuucagagccaccagaauu

SEQ ID NO: 10038 - RNA, 1153 nt, Artificial Sequence
  mRNA product Design i-2 comprising derived and/or modified sequence from HRSV(A2)__P0DOE7.1__M (opt1)
ggggcgcugccuacggagguggcagccaucuccuucucggcaucaagcuuaccauggagaccuacgugaacaagcugcacgagggcagcaccuacacggccgccguccaguacaacgugcucgagaaggacgacgaccccgcgucccugaccaucugggugccgauguuccagagcuccaugcccgccgaccugcucaucaaggagcuggccaacgucaacauccuggugaagcagaucagcacccccaaggggcccucccuccgcgugaugaucaacagccgguccgccguccuggcccagaugccgagcaaguucaccaucugcgcgaacgugucccuggacgagcgcagcaagcucgccuacgacgugacgacccccugcgagaucaaggccugcucccugaccugccucaagagcaagaacaugcugaccacggucaaggaccugaccaugaagacccugaaccccacccacgacaucaucgcccucugcgaguucgagaacaucgugacguccaagaaggugaucauccccaccuaccugcggagcaucuccguccgcaacaaggaccugaacacccucgagaacaucaccacgaccgaguucaagaacgcgaucaccaacgccaagaucaucccguacagcggccugcugcucgugaucaccgugacggacaacaagggggccuucaaguacaucaagccccagucccaguucaucgucgaccugggcgccuaccuggagaaggagagcaucuacuacgugaccaccaacuggaagcacaccgccacgcgguucgcgaucaagcccauggaggacugaggacuagugcaucacauuuaaaagcaucucagccuaccaugagaauaagagaaagaaaaugaagaucaauagcuuauucaucucuuuuucuuuuucguugguguaaagccaacacccugucuaaaaaacauaaauuucuuuaaucauuuugccucuuuucucugugcuucaauuaauaaaaaauggaaagaaccuagaucuaaaaaaaaaaaaaaaaaaaaaaaaaaaaaaaaaaaaaaaaaaaaaaaaaaaaaaaaaaaaaaaaugcaucccccccccccccccccccccccccccccccaaaggcucuuuucagagccaccagaauu

SEQ ID NO: 10039 - RNA, 1153 nt, Artificial Sequence
  mRNA product Design i-2 comprising derived and/or modified sequence from HRSV(A2)__P0DOE7.1__M (opt2)
ggggcgcugccuacggagguggcagccaucuccuucucggcaucaagcuuaccauggagaccuacgucaacaagcuccacgagggcuccaccuacaccgccgccguccaguacaacguccucgagaaggacgacgaccccgccucccucaccaucuggguccccauguuccaguccuccaugcccgccgaccuccucaucaaggagcucgccaacgucaacauccucgucaagcagaucuccacccccaagggccccucccuccgcgucaugaucaacucccgcuccgccguccucgcccagaugcccuccaaguucaccaucugcgccaacgucucccucgacgagcgcuccaagcucgccuacgacgucaccacccccugcgagaucaaggccugcucccucaccugccucaaguccaagaacaugcucaccaccgucaaggaccucaccaugaagacccucaaccccacccacgacaucaucgcccucugcgaguucgagaacaucgucaccuccaagaaggucaucauccccaccuaccuccgcuccaucuccguccgcaacaaggaccucaacacccucgagaacaucaccaccaccgaguucaagaacgccaucaccaacgccaagaucauccccuacuccggccuccuccucgucaucaccgucaccgacaacaagggcgccuucaaguacaucaagccccagucccaguucaucgucgaccucggcgccuaccucgagaaggaguccaucuacuacgucaccaccaacuggaagcacaccgccacccgcuucgccaucaagcccauggaggacugaggacuagugcaucacauuuaaaagcaucucagccuaccaugagaauaagagaaagaaaaugaagaucaauagcuuauucaucucuuuuucuuuuucguugguguaaagccaacacccugucuaaaaaacauaaauuucuuuaaucauuuugccucuuuucucugugcuucaauuaauaaaaaauggaaagaaccuagaucuaaaaaaaaaaaaaaaaaaaaaaaaaaaaaaaaaaaaaaaaaaaaaaaaaaaaaaaaaaaaaaaaugcaucccccccccccccccccccccccccccccccaaaggcucuuuucagagccaccagaauu

SEQ ID NO: 10040 - RNA, 1153 nt, Artificial Sequence
  mRNA product Design i-2 comprising derived and/or modified sequence from HRSV(A2)__P0DOE7.1__M (opt3)
ggggcgcugccuacggagguggcagccaucuccuucucggcaucaagcuuaccauggagaccuacgugaacaagcugcacgaaggcagcacauauacugccgcuguccaguacaauguucucgagaaagacgaugaccccgcaucccuuacgaucugggugccuauguuccaaucuucaaugccagccgaucuguugauuaaggaauuagcgaacguaaauauacuggugaaacagaucaguaccccgaaggggcccagccuaagagucaugauuaacuccaggucugcugugcucgcccagaugccuucgaaauuuacaaucugcgcaaauguuucacuggacgagcggagcaaacuugccuaugaugugacuaccccaugugaaauuaaggcuugcagucugacauguuugaaguccaagaacaugcucaccacugucaaagaccugacaaugaagacccugaaucccacgcaugauaucauagcacucugcgaguucgagaacaucgugacuucuaaaaagguaauuaucccuaccuacuuacgcagcauuuccguucgaaauaaggaccugaacacacuugaaaauaucacuaccacagaguuuaaaaacgccauaaccaaugcuaagauuaucccauauucaggauugcugcuagugauuacggucacugauaacaaaggugccuucaaguacaucaaaccccagagucaauuuaucguggaccucggcgcguaucuggaaaaggagagcauuuacuacgugacaaccaauuggaaacacacugcaacacguuucgccauaaagccuauggaggauugaggacuagugcaucacauuuaaaagcaucucagccuaccaugagaauaagagaaagaaaaugaagaucaauagcuuauucaucucuuuuucuuuuucguugguguaaagccaacacccugucuaaaaaacauaaauuucuuuaaucauuuugccucuuuucucugugcuucaauuaauaaaaaauggaaagaaccuagaucuaaaaaaaaaaaaaaaaaaaaaaaaaaaaaaaaaaaaaaaaaaaaaaaaaaaaaaaaaaaaaaaaugcaucccccccccccccccccccccccccccccccaaaggcucuuuucagagccaccagaauu

SEQ ID NO: 10041 - RNA, 1153 nt, Artificial Sequence
  mRNA product Design i-2 comprising derived and/or modified sequence from HRSV(A2)__P0DOE7.1__M (opt4)
ggggcgcugccuacggagguggcagccaucuccuucucggcaucaagcuuaccauggagaccuacgugaacaagcugcacgagggcagcaccuacaccgccgccgugcaguacaacgugcuggagaaggacgacgaccccgccagccugaccaucugggugcccauguuccagagcagcaugcccgccgaccugcugaucaaggagcuggccaacgugaacauccuggugaagcagaucagcacccccaagggccccagccugagagugaugaucaacagcagaagcgccgugcuggcccagaugcccagcaaguucaccaucugcgccaacgugagccuggacgagagaagcaagcuggccuacgacgugaccacccccugcgagaucaaggccugcagccugaccugccugaagagcaagaacaugcugaccaccgugaaggaccugaccaugaagacccugaaccccacccacgacaucaucgcccugugcgaguucgagaacaucgugaccagcaagaaggugaucauccccaccuaccugagaagcaucagcgugagaaacaaggaccugaacacccuggagaacaucaccaccaccgaguucaagaacgccaucaccaacgccaagaucauccccuacagcggccugcugcuggugaucaccgugaccgacaacaagggcgccuucaaguacaucaagccccagagccaguucaucguggaccugggcgccuaccuggagaaggagagcaucuacuacgugaccaccaacuggaagcacaccgccaccagauucgccaucaagcccauggaggacugaggacuagugcaucacauuuaaaagcaucucagccuaccaugagaauaagagaaagaaaaugaagaucaauagcuuauucaucucuuuuucuuuuucguugguguaaagccaacacccugucuaaaaaacauaaauuucuuuaaucauuuugccucuuuucucugugcuucaauuaauaaaaaauggaaagaaccuagaucuaaaaaaaaaaaaaaaaaaaaaaaaaaaaaaaaaaaaaaaaaaaaaaaaaaaaaaaaaaaaaaaaugcaucccccccccccccccccccccccccccccccaaaggcucuuuucagagccaccagaauu

SEQ ID NO: 10042 - RNA, 1153 nt, Artificial Sequence
  mRNA product Design i-2 comprising derived and/or modified sequence from HRSV(A2)__P0DOE7.1__M (opt5)
ggggcgcugccuacggagguggcagccaucuccuucucggcaucaagcuuaccauggagaccuacgugaacaagcugcacgaaggcagcacauauacggccgcuguccaguacaauguucucgagaaagacgaugaccccgccucccugaccaucugggugccuauguuccaaucuagcaugccggcggaucuucugauuaaggaacucgcuaacgugaauauccuggucaaacagauuuccacacccaaggggccuucucuuagagugaugaucaacagccgguccgccguucuggcccagaugcccucuaaauuuaccauuugcgcuaaugugagccucgacgagcgcuccaagcuggccuaugaugucacaaccccuugugaaaucaaggcuugcagccugacaugucucaaaucuaagaacaugcugaccacggugaaagaccuuaccaugaagacacugaaucccacccaugauaucauugcccucugcgaguucgagaacaucguuacauccaaaaaggugauuaucccuaccuaccugagaagcauuucuguccggaauaaggaccuuaacacgcuggaaaauaucacaaccacagaguuuaaaaacgcgauuaccaaugccaagaucaucccguauuccggacuccugcuggugauuaccgugacagauaacaaaggcgcuuucaaguacaucaaaccccagagccaauuuauugucgaccucggggccuaucuggaaaaggagucuaucuacuacguuacgaccaauuggaaacacacagcuacccgcuucgccauuaagccuauggaggauugaggacuagugcaucacauuuaaaagcaucucagccuaccaugagaauaagagaaagaaaaugaagaucaauagcuuauucaucucuuuuucuuuuucguugguguaaagccaacacccugucuaaaaaacauaaauuucuuuaaucauuuugccucuuuucucugugcuucaauuaauaaaaaauggaaagaaccuagaucuaaaaaaaaaaaaaaaaaaaaaaaaaaaaaaaaaaaaaaaaaaaaaaaaaaaaaaaaaaaaaaaaugcaucccccccccccccccccccccccccccccccaaaggcucuuuucagagccaccagaauu

SEQ ID NO: 10043 - RNA, 1153 nt, Artificial Sequence
  mRNA product Design i-2 comprising derived and/or modified sequence from HRSV(A2)__P0DOE7.1__M (opt6)
ggggcgcugccuacggagguggcagccaucuccuucucggcaucaagcuuaccauggaaacauacguaaacaaacuacacgaaggauccacauacacagcagcaguacaauacaacguacuagaaaaagacgacgacccagcaucuuuaaccauauggguaccaauguuccaaucaucaaugccagcagaccucuuaauaaaagaacuagcaaacguaaacauccuagucaaacaaauaucaacacccaaaggaccaucccucagaguaaugaucaacucaagaucagcaguacuagcacaaaugccaucaaaauucacaauaugcgccaacguuucuuuagacgaacgaucaaaauuagccuacgacguaacaacacccugcgaaauaaaagcaugcucacuaacaugccuaaaaucaaaaaacaugcucacuacaguaaaagaccuaaccaugaaaacacucaacccaacacacgacauaauagcccuaugcgaauuugaaaacauaguaacaucaaaaaaaguaauaaucccaacauacuuaagaucgaucucagucagaaacaaagaccuaaauacacucgaaaacauaacaacaacagaauuuaaaaacgcaauaacaaacgcaaaaauaauaccauacucaggacuacuccuaguaauaacaguaacagacaacaaaggagcauucaaauacauaaaaccacaaucacaauucaucguagaccucggagcauaccuagaaaaagaaucaauauacuacguaacaacaaacuggaaacacaccgccacaagauucgcaauaaaacccauggaagacuaaggacuagugcaucacauuuaaaagcaucucagccuaccaugagaauaagagaaagaaaaugaagaucaauagcuuauucaucucuuuuucuuuuucguugguguaaagccaacacccugucuaaaaaacauaaauuucuuuaaucauuuugccucuuuucucugugcuucaauuaauaaaaaauggaaagaaccuagaucuaaaaaaaaaaaaaaaaaaaaaaaaaaaaaaaaaaaaaaaaaaaaaaaaaaaaaaaaaaaaaaaaugcaucccccccccccccccccccccccccccccccaaaggcucuuuucagagccaccagaauu

SEQ ID NO: 10044 - RNA, 1153 nt, Artificial Sequence
  mRNA product Design i-2 comprising derived and/or modified sequence from HRSV(A2)__P0DOE7.1__M (opt11)
ggggcgcugccuacggagguggcagccaucuccuucucggcaucaagcuuaccauggaaaccuacgucaacaaacuacacgaaggcucaaccuacaccgccgccguccaauacaacguccucgaaaaagacgacgaccccgccucccuaaccaucuggguucccauguuccaaucauccaugcccgccgaccuccucauaaaagaacuagccaacgucaacauccuagucaaacaaaucagcacccccaaaggccccucccuccgcguaaugaucaacucccgcuccgccguccuagcccaaaugcccuccaaauuuacaaucugcgccaacgucucccucgacgaacgcucaaaacucgccuacgacgucaccacacccugcgaaaucaaagccugcucccucaccugccucaaaagcaaaaauaugcuaaccaccgucaaagaccuuaccaugaaaacccucaaccccacucacgacaucauagcccucugcgaauuugaaaacaucgucaccuccaaaaaagucaucauccccacauaccuccgcuccaucuccguccgcaacaaagaccucaacacccucgaaaacaucaccaccaccgaauuuaaaaacgccaucaccaacgccaaaaucauccccuacuccggccuccuccucgucaucaccguuaccgacaacaaaggcgccuucaaauacaucaaaccccaaucccaauucaucgucgaccucggagccuaccuugaaaaagaguccaucuacuacgucaccaccaacuggaaacacaccgccacccgauucgccaucaaacccauggaagacuaaggacuagugcaucacauuuaaaagcaucucagccuaccaugagaauaagagaaagaaaaugaagaucaauagcuuauucaucucuuuuucuuuuucguugguguaaagccaacacccugucuaaaaaacauaaauuucuuuaaucauuuugccucuuuucucugugcuucaauuaauaaaaaauggaaagaaccuagaucuaaaaaaaaaaaaaaaaaaaaaaaaaaaaaaaaaaaaaaaaaaaaaaaaaaaaaaaaaaaaaaaaugcaucccccccccccccccccccccccccccccccaaaggcucuuuucagagccaccagaauu

SEQ ID NO: 10045 - RNA, 988 nt, Artificial Sequence
  mRNA product Design i-3 comprising derived and/or modified sequence from HRSV(A2)__P0DOE7.1__M (wt)
gggagaaagcuuaccauggaaacauacgugaacaagcuucacgaaggcuccacauacacagcugcuguucaauacaaugucuuagaaaaagacgaugacccugcaucacuuacaauaugggugcccauguuccaaucaucuaugccagcagauuuacuuauaaaagaacuagcuaaugucaacauacuagugaaacaaauauccacacccaagggaccuucacuaagagucaugauaaacucaagaagugcagugcuagcacaaaugcccagcaaauuuaccauaugcgcuaauguguccuuggaugaaagaagcaaacuagcauaugauguaaccacacccugugaaaucaaggcauguagucuaacaugccuaaaaucaaaaaauauguugacuacaguuaaagaucucacuaugaagacacucaacccuacacaugauauuauugcuuuaugugaauuugaaaacauaguaacaucaaaaaaagucauaauaccaacauaccuaagauccaucagugucagaaauaaagaucugaacacacuugaaaauauaacaaccacugaauucaaaaaugcuaucacaaaugcaaaaaucaucccuuacucaggauuacuauuagucaucacagugacugacaacaaaggagcauucaaauacauaaagccacaaagucaauucauaguagaucuuggagcuuaccuagaaaaagaaaguauauauuauguuaccacaaauuggaagcacacagcuacacgauuugcaaucaaacccauggaagauuaaggacuaguuauaagacugacuagcccgaugggccucccaacgggcccuccuccccuccuugcaccgagauuaauaaaaaaaaaaaaaaaaaaaaaaaaaaaaaaaaaaaaaaaaaaaaaaaaaaaaaaaaaaaaaaaaugcaucccccccccccccccccccccccccccccccaaaggcucuuuucagagccaccagaauu

SEQ ID NO: 10046 - RNA, 988 nt, Artificial Sequence
  mRNA product Design i-3 comprising derived and/or modified sequence from HRSV(A2)__P0DOE7.1__M (opt1) R7595
gggagaaagcuuaccauggagaccuacgugaacaagcugcacgagggcagcaccuacacggccgccguccaguacaacgugcucgagaaggacgacgaccccgcgucccugaccaucugggugccgauguuccagagcuccaugcccgccgaccugcucaucaaggagcuggccaacgucaacauccuggugaagcagaucagcacccccaaggggcccucccuccgcgugaugaucaacagccgguccgccguccuggcccagaugccgagcaaguucaccaucugcgcgaacgugucccuggacgagcgcagcaagcucgccuacgacgugacgacccccugcgagaucaaggccugcucccugaccugccucaagagcaagaacaugcugaccacggucaaggaccugaccaugaagacccugaaccccacccacgacaucaucgcccucugcgaguucgagaacaucgugacguccaagaaggugaucauccccaccuaccugcggagcaucuccguccgcaacaaggaccugaacacccucgagaacaucaccacgaccgaguucaagaacgcgaucaccaacgccaagaucaucccguacagcggccugcugcucgugaucaccgugacggacaacaagggggccuucaaguacaucaagccccagucccaguucaucgucgaccugggcgccuaccuggagaaggagagcaucuacuacgugaccaccaacuggaagcacaccgccacgcgguucgcgaucaagcccauggaggacugaggacuaguuauaagacugacuagcccgaugggccucccaacgggcccuccuccccuccuugcaccgagauuaauaaaaaaaaaaaaaaaaaaaaaaaaaaaaaaaaaaaaaaaaaaaaaaaaaaaaaaaaaaaaaaaaugcaucccccccccccccccccccccccccccccccaaaggcucuuuucagagccaccagaauu

SEQ ID NO: 10047 - RNA, 988 nt, Artificial Sequence
  mRNA product Design i-3 comprising derived and/or modified sequence from HRSV(A2)__P0DOE7.1__M (opt2)
gggagaaagcuuaccauggagaccuacgucaacaagcuccacgagggcuccaccuacaccgccgccguccaguacaacguccucgagaaggacgacgaccccgccucccucaccaucuggguccccauguuccaguccuccaugcccgccgaccuccucaucaaggagcucgccaacgucaacauccucgucaagcagaucuccacccccaagggccccucccuccgcgucaugaucaacucccgcuccgccguccucgcccagaugcccuccaaguucaccaucugcgccaacgucucccucgacgagcgcuccaagcucgccuacgacgucaccacccccugcgagaucaaggccugcucccucaccugccucaaguccaagaacaugcucaccaccgucaaggaccucaccaugaagacccucaaccccacccacgacaucaucgcccucugcgaguucgagaacaucgucaccuccaagaaggucaucauccccaccuaccuccgcuccaucuccguccgcaacaaggaccucaacacccucgagaacaucaccaccaccgaguucaagaacgccaucaccaacgccaagaucauccccuacuccggccuccuccucgucaucaccgucaccgacaacaagggcgccuucaaguacaucaagccccagucccaguucaucgucgaccucggcgccuaccucgagaaggaguccaucuacuacgucaccaccaacuggaagcacaccgccacccgcuucgccaucaagcccauggaggacugaggacuaguuauaagacugacuagcccgaugggccucccaacgggcccuccuccccuccuugcaccgagauuaauaaaaaaaaaaaaaaaaaaaaaaaaaaaaaaaaaaaaaaaaaaaaaaaaaaaaaaaaaaaaaaaaugcaucccccccccccccccccccccccccccccccaaaggcucuuuucagagccaccagaauu

SEQ ID NO: 10048 - RNA, 988 nt, Artificial Sequence
  mRNA product Design i-3 comprising derived and/or modified sequence from HRSV(A2)__P0DOE7.1__M (opt3)
gggagaaagcuuaccauggagaccuacgugaacaagcugcacgaaggcagcacauauacugccgcuguccaguacaauguucucgagaaagacgaugaccccgcaucccuuacgaucugggugccuauguuccaaucuucaaugccagccgaucuguugauuaaggaauuagcgaacguaaauauacuggugaaacagaucaguaccccgaaggggcccagccuaagagucaugauuaacuccaggucugcugugcucgcccagaugccuucgaaauuuacaaucugcgcaaauguuucacuggacgagcggagcaaacuugccuaugaugugacuaccccaugugaaauuaaggcuugcagucugacauguuugaaguccaagaacaugcucaccacugucaaagaccugacaaugaagacccugaaucccacgcaugauaucauagcacucugcgaguucgagaacaucgugacuucuaaaaagguaauuaucccuaccuacuuacgcagcauuuccguucgaaauaaggaccugaacacacuugaaaauaucacuaccacagaguuuaaaaacgccauaaccaaugcuaagauuaucccauauucaggauugcugcuagugauuacggucacugauaacaaaggugccuucaaguacaucaaaccccagagucaauuuaucguggaccucggcgcguaucuggaaaaggagagcauuuacuacgugacaaccaauuggaaacacacugcaacacguuucgccauaaagccuauggaggauugaggacuaguuauaagacugacuagcccgaugggccucccaacgggcccuccuccccuccuugcaccgagauuaauaaaaaaaaaaaaaaaaaaaaaaaaaaaaaaaaaaaaaaaaaaaaaaaaaaaaaaaaaaaaaaaaugcaucccccccccccccccccccccccccccccccaaaggcucuuuucagagccaccagaauu

SEQ ID NO: 10049 - RNA, 988 nt, Artificial Sequence
  mRNA product Design i-3 comprising derived and/or modified sequence from HRSV(A2)__P0DOE7.1__M (opt4)
gggagaaagcuuaccauggagaccuacgugaacaagcugcacgagggcagcaccuacaccgccgccgugcaguacaacgugcuggagaaggacgacgaccccgccagccugaccaucugggugcccauguuccagagcagcaugcccgccgaccugcugaucaaggagcuggccaacgugaacauccuggugaagcagaucagcacccccaagggccccagccugagagugaugaucaacagcagaagcgccgugcuggcccagaugcccagcaaguucaccaucugcgccaacgugagccuggacgagagaagcaagcuggccuacgacgugaccacccccugcgagaucaaggccugcagccugaccugccugaagagcaagaacaugcugaccaccgugaaggaccugaccaugaagacccugaaccccacccacgacaucaucgcccugugcgaguucgagaacaucgugaccagcaagaaggugaucauccccaccuaccugagaagcaucagcgugagaaacaaggaccugaacacccuggagaacaucaccaccaccgaguucaagaacgccaucaccaacgccaagaucauccccuacagcggccugcugcuggugaucaccgugaccgacaacaagggcgccuucaaguacaucaagccccagagccaguucaucguggaccugggcgccuaccuggagaaggagagcaucuacuacgugaccaccaacuggaagcacaccgccaccagauucgccaucaagcccauggaggacugaggacuaguuauaagacugacuagcccgaugggccucccaacgggcccuccuccccuccuugcaccgagauuaauaaaaaaaaaaaaaaaaaaaaaaaaaaaaaaaaaaaaaaaaaaaaaaaaaaaaaaaaaaaaaaaaugcaucccccccccccccccccccccccccccccccaaaggcucuuuucagagccaccagaauu

SEQ ID NO: 10050 - RNA, 988 nt, Artificial Sequence
  mRNA product Design i-3 comprising derived and/or modified sequence from HRSV(A2)__P0DOE7.1__M (opt5)
gggagaaagcuuaccauggagaccuacgugaacaagcugcacgaaggcagcacauauacggccgcuguccaguacaauguucucgagaaagacgaugaccccgccucccugaccaucugggugccuauguuccaaucuagcaugccggcggaucuucugauuaaggaacucgcuaacgugaauauccuggucaaacagauuuccacacccaaggggccuucucuuagagugaugaucaacagccgguccgccguucuggcccagaugcccucuaaauuuaccauuugcgcuaaugugagccucgacgagcgcuccaagcuggccuaugaugucacaaccccuugugaaaucaaggcuugcagccugacaugucucaaaucuaagaacaugcugaccacggugaaagaccuuaccaugaagacacugaaucccacccaugauaucauugcccucugcgaguucgagaacaucguuacauccaaaaaggugauuaucccuaccuaccugagaagcauuucuguccggaauaaggaccuuaacacgcuggaaaauaucacaaccacagaguuuaaaaacgcgauuaccaaugccaagaucaucccguauuccggacuccugcuggugauuaccgugacagauaacaaaggcgcuuucaaguacaucaaaccccagagccaauuuauugucgaccucggggccuaucuggaaaaggagucuaucuacuacguuacgaccaauuggaaacacacagcuacccgcuucgccauuaagccuauggaggauugaggacuaguuauaagacugacuagcccgaugggccucccaacgggcccuccuccccuccuugcaccgagauuaauaaaaaaaaaaaaaaaaaaaaaaaaaaaaaaaaaaaaaaaaaaaaaaaaaaaaaaaaaaaaaaaaugcaucccccccccccccccccccccccccccccccaaaggcucuuuucagagccaccagaauu

SEQ ID NO: 10051 - RNA, 988 nt, Artificial Sequence
  mRNA product Design i-3 comprising derived and/or modified sequence from HRSV(A2)__P0DOE7.1__M (opt6)
gggagaaagcuuaccauggaaacauacguaaacaaacuacacgaaggauccacauacacagcagcaguacaauacaacguacuagaaaaagacgacgacccagcaucuuuaaccauauggguaccaauguuccaaucaucaaugccagcagaccucuuaauaaaagaacuagcaaacguaaacauccuagucaaacaaauaucaacacccaaaggaccaucccucagaguaaugaucaacucaagaucagcaguacuagcacaaaugccaucaaaauucacaauaugcgccaacguuucuuuagacgaacgaucaaaauuagccuacgacguaacaacacccugcgaaauaaaagcaugcucacuaacaugccuaaaaucaaaaaacaugcucacuacaguaaaagaccuaaccaugaaaacacucaacccaacacacgacauaauagcccuaugcgaauuugaaaacauaguaacaucaaaaaaaguaauaaucccaacauacuuaagaucgaucucagucagaaacaaagaccuaaauacacucgaaaacauaacaacaacagaauuuaaaaacgcaauaacaaacgcaaaaauaauaccauacucaggacuacuccuaguaauaacaguaacagacaacaaaggagcauucaaauacauaaaaccacaaucacaauucaucguagaccucggagcauaccuagaaaaagaaucaauauacuacguaacaacaaacuggaaacacaccgccacaagauucgcaauaaaacccauggaagacuaaggacuaguuauaagacugacuagcccgaugggccucccaacgggcccuccuccccuccuugcaccgagauuaauaaaaaaaaaaaaaaaaaaaaaaaaaaaaaaaaaaaaaaaaaaaaaaaaaaaaaaaaaaaaaaaaugcaucccccccccccccccccccccccccccccccaaaggcucuuuucagagccaccagaauu

SEQ ID NO: 10052 - RNA, 988 nt, Artificial Sequence
  mRNA product Design i-3 comprising derived and/or modified sequence from HRSV(A2)__P0DOE7.1__M (opt11)
gggagaaagcuuaccauggaaaccuacgucaacaaacuacacgaaggcucaaccuacaccgccgccguccaauacaacguccucgaaaaagacgacgaccccgccucccuaaccaucuggguucccauguuccaaucauccaugcccgccgaccuccucauaaaagaacuagccaacgucaacauccuagucaaacaaaucagcacccccaaaggccccucccuccgcguaaugaucaacucccgcuccgccguccuagcccaaaugcccuccaaauuuacaaucugcgccaacgucucccucgacgaacgcucaaaacucgccuacgacgucaccacacccugcgaaaucaaagccugcucccucaccugccucaaaagcaaaaauaugcuaaccaccgucaaagaccuuaccaugaaaacccucaaccccacucacgacaucauagcccucugcgaauuugaaaacaucgucaccuccaaaaaagucaucauccccacauaccuccgcuccaucuccguccgcaacaaagaccucaacacccucgaaaacaucaccaccaccgaauuuaaaaacgccaucaccaacgccaaaaucauccccuacuccggccuccuccucgucaucaccguuaccgacaacaaaggcgccuucaaauacaucaaaccccaaucccaauucaucgucgaccucggagccuaccuugaaaaagaguccaucuacuacgucaccaccaacuggaaacacaccgccacccgauucgccaucaaacccauggaagacuaaggacuaguuauaagacugacuagcccgaugggccucccaacgggcccuccuccccuccuugcaccgagauuaauaaaaaaaaaaaaaaaaaaaaaaaaaaaaaaaaaaaaaaaaaaaaaaaaaaaaaaaaaaaaaaaaugcaucccccccccccccccccccccccccccccccaaaggcucuuuucagagccaccagaauu

SEQ ID NO: 10053 - protein, 256 aa, Artificial Sequence; identical to SEQ ID NO: 9684
  derived and/or modified protein sequence (wt) from HRSV(Memphis-37)__AIY60638.1__M

SEQ ID NO: 10054 - protein, 256 aa, Artificial Sequence
  derived and/or modified protein sequence (wt) from HRSV__O42049.1__M
METYVNKLHEGSTYTAAVQYNVLEKDDDPASLTIWVPMFQSSVPADLLIKELASINILVKQISTPKGPSLRVTINSRSAVLAQMPSNFIISANVSLDERSKLAYDVTTPCEIKACSLTCLKVKSMLTTVKDLTMKTFNPTHEIIALCEFENIMTSKRVIIPTYLRPISVKNKDLNSLENIATTEFKNAITNAKIIPYAGLVLVITVTDNKGAFKYIKPQSQFIVDLGAYLEKESIYYVTTNWKHTATRFSIKPLED

SEQ ID NO: 10055 - protein, 256 aa, Artificial Sequence
  derived and/or modified protein sequence (wt) from HRSV__AAR14263.1__M
METYVNKLHEGSTYTAAVQYNVLEKDDDPASLTIWVPMFQSSVPADLLIKELASINILVKQISTPKGPSLRVTINSRSAVLAQMPSNFIISANVSLDERSKLAYDVTTPCEIKACSLTCLKVKSMLTTVKDLTMKTFNPTHEIIALCEFENIMTSKRVIIPTYLRSISVKNKDLNSLENIATTEFKNAITNAKIIPYAGLVLVITVTDNKGAFKYIKPQSQFIVDLGAYLEKESIYYVTTNWKHTATRFSIKPLED

SEQ ID NO: 10056 - protein, 256 aa, Artificial Sequence
  derived and/or modified protein sequence (wt) from HRSV__AAX23991.1__M
METYVNKLHEGSTYTAAVQYNVLEKDDDPASLTIWVPMFQSSMPADLLIKELANVNILVKQISTPKGPSLRVMINSRSALLAQMPSKFTICANVSLDERSKLAYDVTTPCEIKACSLTCLKSKNMLTTVKDLTMKTLNPTHDIIALCEFENIVTSKKVIIPTYLRSISVRNKDLNTLENITTTEFKNAITNAKIIPYSGLLLVITVTDNKGAFKYIKPQSQFIVDLGAYLEKESIYYVTTNWKHTATRFAIKPMED

SEQ ID NO: 10057 - protein, 256 aa, Artificial Sequence
  derived and/or modified protein sequence (wt) from HRSV__AEQ63375.1__M
METYVNKLHEGSTYTAAVQYNVLEKDDDPASLTIWVPMFQSSMPADLLIKELANVNILVKQISTPKGPSLRVMINSRSAVLAQMPSKFTICANVSLDERSKLAYDITTPCEIKACSLTCLKSKNMLTTVKDLTMKTLNPTHDIIALCEFENIVTSKKVIIPTYLRSISVRNKDLNTLENITTTEFKNAITNAKIIPYSGLLLVITVTDNKGAFKYIKPQSQFIVDLGAYLEKESIYYVTTNWKHTATRFAIKPMED

SEQ ID NO: 10058 - protein, 256 aa, Artificial Sequence
  derived and/or modified protein sequence (wt) from HRSV__AEQ63408.1__M
METYVNKLHEGSTYTAAVQYNVLEKDDDPASLTIWVPMFQSSMPADLLIKELANVNILVKQISTPKGPSLRVMINSRSAVLAQMPSKFTICANVSLDERSKLAYDVTTPCEIKACSLTCLKSKNMLTTVKDLTMKTLNPTHDIIALCEFENIVTSKRVIIPTYLRSISVRNKDLNTLENITTTEFKNAITNAKIIPYSGLLLVITVTDNKGAFKYIKPQSQFIVDLGAYLEKESIYYVTTNWKHTATRFAIKPMED

SEQ ID NO: 10059 - protein, 256 aa, Artificial Sequence
  derived and/or modified protein sequence (wt) from HRSV__AEQ63441.1__M
METYVNKLHEGSTYTAAVQYNVLEKDDDPASLTIWVPMFQSSMPADSLIKELANVNILVKQISTPKGPSLRVMINSRSAVLAQMPSKFTICANVSLDERSKLAYDVTTPCEIKACSLTCLKSKNMLTTVKDLTMKTLNPTHDIIALCEFENIVTSKKVIIPTYLRSISVRNKDLNTLENITTTEFKNAITNAKIIPYSGLLLVITVTDNKGAFKYIKPQSQFIVDLGAYLEKESIYYVTTNWKHTATRFAIKPMED

SEQ ID NO: 10060 - protein, 256 aa, Artificial Sequence
  derived and/or modified protein sequence (wt) from HRSV__AEQ63517.1__M
METYVNKLHEGSTYTAAVQYNVLEKDDDPASLTIWVPMFQSSMPADLLIKELANVNILVKQISTPKGPSLRVMINSRSAVLAQMPSKFTICANVSLDERSKLAYDVTTPCEIKACSLTCLKSKNMLTTVKDLTMKTLNPTHDIIALCEFENIVTSKKVIIPTYLRSISVRNKDLNTLENITTTEFKNAITNAKIIPYSGLLLVITVTDNKGAFKYIKPQSQFIVBLGAYLEKESIYYVTTNWKHTATRFAIKPMED

SEQ ID NO: 10061 - protein, 256 aa, Artificial Sequence
  derived and/or modified protein sequence (wt) from HRSV__AEQ63583.1__M
METYVNKLHEGSTYTAAVQYNVLEKDDDPASLTIWVPMFQSSVPADLLIKELASINILVKQISTPKGPSLRVTINSRSAVLAQMPSNFTISANVSLDERSKLAYDVTTPCEIKACSLTCLKVKSMLTTVKDLTMKTFNPTHEIIALCEFENIMTSKRVIIPTYLRSISVKNKDLNSLENIATTEFKNAITNAKIIPYAGLVLVITVTDNKGAFKYIKPQSQFIVDLGAYLEKESIYYVTTNWKHTATRFSIKPLED

SEQ ID NO: 10062 - protein, 256 aa, Artificial Sequence
  derived and/or modified protein sequence (wt) from HRSV__AFM55219.1__M
METYVNKLHEGSTYTAAVQYNVLEKDDDPASLTIWVPMFQSSMSADLLIKELANVNILVKQISTPKGPSLRVMINSRSAVLAQMPSKFTICANVSLDERSKLAYDVTTPCEIKACSLTCLKSKNMLTTVKDLTMKTLNPTHDIIALCEFENIVTSKKVIIPTYLRSISIRNKDLNTLENITTTEFKNAITNAKIIPYSGLLLVITVTDNKGAFKYIKPQSQFIVDLGAYLEKESIYYVTTNWKHTATRFAIKPMED

SEQ ID NO: 10063 - protein, 256 aa, Artificial Sequence
  derived and/or modified protein sequence (wt) from HRSV__AFM55516.1__M
METYVNKLHEGSTYTAAVQYNVLEKDDDPASLTIWVPMFQSSMPADLLIKELANVNILVKQISTPKGPSLRVMINSRSAVLAQMPSKFTICANVSLDERSKLAYDVTTPCEIKACSLTCLKSKNMLTTVKDLTMKTLNPTHDIIALCEFENIVTSKKIIIPTYLRSISVRNKDLNTLENITTTEFKNAITNAKIIPYSGLLLVITVTDNKGAFKYIKPQSQFIVDLGAYLEKESIYYVTTNWKHTATRFAIKPMED

SEQ ID NO: 10064 - protein, 256 aa, Artificial Sequence
  derived and/or modified protein sequence (wt) from HRSV__AFM55549.1__M
METYVNKLHEGSTYTAAVQYNVLEKDDDPASLTIWVPMFQSSMPADLLIKELANVNILVKQISTPKGPSLRVMINSRSAVLAQMPSKFTICANVSLDERSKLAYDVTTPCEIKACSLTCLKSKNMLTTVKDLTMKTLNPTHDIIALCEFENIVTSKKVIIPTYLRSISVRNKDLNTLENITTTEFKNAITNAKIIPYSGLLLVITVTDNKGAFKYIKPQSQFIVDLGAYLEKESIYYVTTNWKHTATRFAIKPIED

SEQ ID NO: 10065 - protein, 256 aa, Artificial Sequence
  derived and/or modified protein sequence (wt) from HRSV__AFM95387.1__M
METYVNKLHEGSTYTAAVQYNVLEKDDDPASLTIWVPMFQSSMPADLLIKELANVNILVKQISTPKGPSLRVMINSRSAMLAQMPSKFTICANVSLDERSKLAYDVTTPCEIKACSLTCLKSKNMLTTVKDLTMKTLNPTHDIIALCEFENIVTSKKVIIPTYLRSISVRNKDLNTLENITTTEFKNAITNAKIIPYSGLLLVITVTDNKGAFKYIKPQSQFIVDLGAYLEKESIYYVTTNWKHTATRFAIKPMED

SEQ ID NO: 10066 - protein, 256 aa, Artificial Sequence
  derived and/or modified protein sequence (wt) from HRSV__AGN28503.1__M
METYVNKLHEGSTYTAAVQYNVLEKDDDPASLTIWVPMFQSSVPADLLIKELASINILVKQISTPKGPSLRVTINSRSAVLAQMPSNFTISANVSLDERSKLAYDVTTPCEIKACSLTCLKVKSMLTTVKDLTMKTFNPTHEIIALCEFENIMTSKRVIIPTYLRSISVKNKDLNSLENIATTEFKNAITNAKIIPYAGLVLVITVTDNKGAFKYIKPQSQFIVDLGAYLEKESIYYVTTNWKHTATRFSIRPLED

SEQ ID NO: 10067 - protein, 256 aa, Artificial Sequence
  derived and/or modified protein sequence (wt) from HRSV__AGN28525.1__M
METYVNKLHEGSTYTAAVQYNVLEKDDDPASLTIWVPMFQSSVPADLLIKELASINILVKQISTPKGPSLRVTINSRSAVLAQMPSNFTISANVSLDERSKLAYDVTTPCEIKACSLTCLKVKSMLTTVKDLTMKTFNPTHEIIALCEFENIMTSKKVIIPTYLRSISVKNKDLNSLENIATTEFKNAITNAKIIPYAGLVLVITVTDNKGAFKYIKPQSQFIVDLGAYLEKESIYYVTTNWKHTATRFSIKPLED

SEQ ID NO: 10068 - protein, 256 aa, Artificial Sequence
  derived and/or modified protein sequence (wt) from HRSV__AGN28547.1__M
METYVNKLHEGSTYTAAVQYNVLEKDDDPASLTIWVPMFQSSVPADLLIKELASINILVKQISTPKGPSLRVTINSRSAVLAQMPSNFIISANVSLDERSKLAYDVTTPCEIKACSLTCLKVKSMLTTVKDLTMKTFNPTHEIIALCEFENIMTSKRIIIPTYLRSISVKNKDLNSLENIATTEFKNAITNAKIIPYAGLVLVITVTDNKGAFKYIKPQSQFIVDLGAYLEKESIYYVTTNWKHTATRFSIKPLED

SEQ ID NO: 10069 - protein, 256 aa, Artificial Sequence
  derived and/or modified protein sequence (wt) from HRSV__AGN28679.1__M
METYVNKLHEGSTYTAAVQYNVLEKDDDPASLTIWVPMFQSSVPADLLIKELASINILVKQISTPKGPSLRVTINSRSAVLAQMPSNFTISANVSLDERSKLPYDVTTPCEIKACSLTCLKVKSMLTTVKDLTMKTFNPTHEIIALCEFENSMPSKRVVIPTYIRSISLKNKDLNSLENIATTEFKNAITNAKIIPYAGLVLVITVTDNKGAFKYIKPQSQFIVDLGAYLEKESIYYVTTNWKHTATRFSIKPLED

SEQ ID NO: 10070 - protein, 256 aa, Artificial Sequence
  derived and/or modified protein sequence (wt) from HRSV__AGN92845.1__M
METYVNKLHEGSTYTAAVQYNVLEKDDDPASLTIWVPMFQSSMPADLLIKELANVNILVKQISTPKGPSLRVMINSRSAVLAQMPSKFTICANVSLDERSKLAYDVTTPCEIKACSLTCLKSKNMLTTVKDLTMKTLNPTHDIIALCEFENIVTSKKVIIPTYLRSINVRNKDLNTLENITTTEFKNAITNAKIIPYSGLLLVITVTDNKGAFKYIKPQSQFIVDLGAYLEKESIYYVTTNWKHTATRFAIKPMED

SEQ ID NO: 10071 - protein, 256 aa, Artificial Sequence
  derived and/or modified protein sequence (wt) from HRSV__AGT75332.1__M
METYVNKLHEGSTYTAAVQYNVLEKDDDPASLTIWVPMFQSSMPADLLIKELANVNILVKQISTPKGPSLRVMINSRSAVLAQMPSKFTICANVSLDERSKLAYDVTTPCEIKACSLTCLKSKNMLTTVKDLTMKTLNPTHDIIALCEFENIVTSKKVIIPTYLRSISVRNKDLNTLENITTTEFKNAITNAKIIPYSGLLLVITVTDNKGAFKYIKPQSQFIVDLGAHLEKESIYYVTTNWKHTATRFAIKPMED

SEQ ID NO: 10072 - protein, 256 aa, Artificial Sequence
  derived and/or modified protein sequence (wt) from HRSV__AHA83627.1__M
METYVNKLHEGSTYTAAVQYNVLEKDDDPASLTIWVPMFQSSMPADLLIKELANVNILVKQISTPKGPSLRVMINSRSAVLAQMPSKFTISANVSLDERSKLAYDVTTPCEIKACSLTCLKSKNMLTTVKDLTMKTLNPTHDIIALCEFENIVTSKKVIIPTYLRSISVRNKDLNTLENITTTEFKNAITNAKIIPYSGLLLVITVTDNKGAFKYIKPQSQFIVDLGAYLEKESIYYVTTNWKHTATRFAIKPMED

SEQ ID NO: 10073 - protein, 256 aa, Artificial Sequence
  derived and/or modified protein sequence (wt) from HRSV__AHA83757.1__M
METYVNKLHEGSTYTAAVQYNVLEKDDDPASLTIWVPMFQSSMPADQLIKELANVNILVKQISTPKGPSLRVMINSRSAVLAQMPSKFTICANVSLDERSKLAYDVTTPCEIKACSLTCLKSKNMLTTVKDLTMKTLNPTHDIIALCEFENIVTSKKVIIPTYLRSISVRNKDLNTLENITTTEFKNAITNAKIIPYSGLLLVITVTDNKGAFKYIKPQSQFIVDLGAYLEKESIYYVTTNWKHTATRFAIKPMED

SEQ ID NO: 10074 - protein, 256 aa, Artificial Sequence
  derived and/or modified protein sequence (wt) from HRSV__AHA83921.1__M
METYVNKLHEGSTYTAAVQYNVLEKDDNPASLTIWVPMFQSSVPADLLIKELASINILVKQISTPKGPSLRVTINSRSAVLAQMPSNFIISANVSLDERSKLAYDVTTPCEIKACSLTCLKVKSMLTTVKDLTMKTFNPTHEIIALCEFENIMTSKRVIIPTYLRSISVKNKDLNSLENIATTEFKNAITNAKIIPYAGLVLVITVTDNKGAFKYIKPQSQFIVDLGAYLEKESIYYVTTNWKHTATRFSIKPLED

SEQ ID NO: 10075 - protein, 256 aa, Artificial Sequence
  derived and/or modified protein sequence (wt) from HRSV__AHA84064.1__M
METYVNKLHEGSTYTAAVQYNVLEKDDDPASLTIWVPMFQSSVPADLLIKELASINILVKQISTPKGPSLRVTINSRSAVLAQMPSNFTISANVSLDERSKLAYDVTTPCEIKACSLTCLKVKSMLTTVKDLTMKAFNPTHEIIALCEFENIMTSKRVIIPTYLRSISVKNKDLNSLENIATTEFKNAITNAKIIPYAGLVLVITVTDNKGAFKYIKPQSQFIVDLGAYLEKESIYYVTTNWKHTATRFSIKPLED

SEQ ID NO: 10076 - protein, 256 aa, Artificial Sequence
  derived and/or modified protein sequence (wt) from HRSV__AHJ60040.1__M
METYVNKLHEGSTYTAAVQYNVLEKDDDPASLTIWVPMFQSSVPADLLIKELASINILVKQISTPTGPSLRVTINSRSAVLAQMPSNFIISANVSLDERSKLAYDVTTPCEIKACSLTCLKVKSMLTTVKDLTMKTFNPTHEIIALCEFENIMTSKRVIIPTYLRSISVKNKDLNSLENIATTEFKNAITNAKIIPYAGLVLVITVTDNKGAFKYIKPQSQFIVDLGAYLEKESIYYVTTNWKHTATRFSIKPLED

SEQ ID NO: 10077 - protein, 256 aa, Artificial Sequence
  derived and/or modified protein sequence (wt) from HRSV__AHW80767.1__M
METYVNKLHEGSTYTAAVQYNVLEKDDDPASLTIWVPMFQSSMPADLLIKELANVNILVKQISTPKGPSLRVMINSRSAVLAQMPSKFTICANVSLDERSKLAYDVTTPCEIKACSLTCLKSKNMLTTVKDLTMKTLNPTHDIIALCKFENIVTSKKVIIPTYLRSISVRNKDLNTLENITTTEFKNAITNAKIIPYSGLLLVITVTDNKGAFKYIKPQSQFIVDLGAYLEKESIYYVTTNWKHTATRFAIKPMED

SEQ ID NO: 10078 - protein, 256 aa, Artificial Sequence
  derived and/or modified protein sequence (wt) from HRSV__AHW80797.1__M
METYVNKLHEGSTYTAAVQYNVLEKDDDPASLTIWVPMFQSSMPADLLIKELANVNILVKQISTPKGPSLRVMINSRSAVLAQMPSKFTICANVSLDERSKLAYDVTTPCEIKACSLTCLKSKNMLTTVKDLTMKTLNPTHDIIALCEFENIVTSKKVIIPTYLRSISVRNKDLNTLENVTTTEFKNAITNAKIIPYSGLLLVITVTDNKGAFKYIKPQSQFIVDLGAYLEKESIYYVTTNWKHTATRFAIKPMED

SEQ ID NO: 10079 - protein, 256 aa, Artificial Sequence
  derived and/or modified protein sequence (wt) from HRSV__AHW80987.1__M
METYVNKLHEGSTYTAAVQYNVLEKDDDPASLTIWVPMFQSSMPADSLIKELANVNILVKQISTPKGPSLRVMINSRSAVLAQMPSKFTICANVSLDERSKLAYDVTTPCEIKACSLTCLKSKNMLTTVKDLTMKTLNPTHDIIALCEFENIVTSKKVTIPTYLRSISVRNKDLNTLENITTTEFKNAITNAKIIPYSGLLLVITVTDNKGAFKYIKPQSQFIVDLGAYLEKESIYYVTTNWKHTATRFAIKPMED

SEQ ID NO: 10080 - protein, 256 aa, Artificial Sequence
  derived and/or modified protein sequence (wt) from HRSV__AHW81377.1__M
METYVNKLHEGSTYTAAVQYNVLEKDDDPASLTIWVPMFQSSIPADLLIKELANVNILVKQISTPKGPSLRVMINSRSAVLAQMPSKFTICANVSLDERSKLAYDVTTPCEIKACSLTCLKSKNMLTTVKDLTMKTLNPTHDIIALCEFENIVTSKKVIIPTYLRSISVRNKDLNTLENITTTEFKNAITNAKIIPYSGLLLVITVTDNKGAFKYIKPQSQFIVDLGAYLEKESIYYVTTNWKHTATRFAIKPMED

SEQ ID NO: 10081 - protein, 256 aa, Artificial Sequence
  derived and/or modified protein sequence (wt) from HRSV__AHW81387.1__M
METYVNKLHEGSTYTAAVQYNVLEKDDDPASLTIWVPMFQSSIPADLLIKELANVNILVKQISTPKGPSLRIMINSRSAVLAQMPSKFTICANVSLDERSKLAYDVTTPCEIKACSLTCLKSKNMLTTVKDLTMKTLNPTHDIIALCEFENIVTSKKVIIPTYLRSISVRNKDLNTLENITTTEFKNAITNAKIIPYSGLLLVITVTDNKGAFKYIKPQSQFIVDLGAYLEKESIYYVTTNWKHTATRFAIKPMED

SEQ ID NO: 10082 - protein, 256 aa, Artificial Sequence
  derived and/or modified protein sequence (wt) from HRSV__AHX57072.1__M
METYVNKLHEGSTYTAAVQYNVLEKDDDPASLTIWVPMFQSSIPADLLIKELANVNILVKQISTPKGPSLRVMINSRSAVLAQMPSKFTICANVSLDERSKLAYDVTTPCEIKACSLTCLKSKNMLTTVKDLTMKTLNPTHDIIALCEFENIVTSKKVIIPTYLRSISVRNKDLSTLENITTTEFKNAITNAKIIPYSGLLLVITVTDNKGAFKYIKPQSQFIVDLGAYLEKESIYYVTTNWKHTATRFAIKPMED

SEQ ID NO: 10083 - protein, 256 aa, Artificial Sequence
  derived and/or modified protein sequence (wt) from HRSV__AHY21394.1__M
METYVNKLHEGSTYTAAVQYNVLEKDDDPASLTIWVPMFQSSVPADLLIKELASINILVKQISTPKGPSLRVTINSRSAVLAQMPSNFIISANVSLDERSKLAYDVTTPCEIKACSLTCLKVKSMLTTVKDLTMKTFNPTHEIIALCEFENIMTSKKVIIPTYLRSISVKNKDLNSLENIATTEFKNAITNAKIIPYAGLVLVITVTDNKGAFKYIKPQSQFIVDLGAYLEKESIYYVTTNWKHTATRFSIKPLED

SEQ ID NO: 10084 - protein, 256 aa, Artificial Sequence
  derived and/or modified protein sequence (wt) from HRSV__AIA63191.1__M
METYVNKLHEGSTYTAAVQYNVLEKDDDPASLTIWVPMFQSSMPADLLIKELANVNILVKQISTPKGPSLRVMINSRSAVLAQMPSKFTICANVSLDERSKLAYDVTTPCEIKACSLTCLKSKNMLTTVKDLTMKTLNPTHDIIALSDVENIVTSKKVIIPTYLRSISVRNKDLNTLENITTTEFKNAITNAKIIPYSGLLLVITVTDNKGAFKYIKPQSQFIVDLGAYLEKESIYYVTTNWKHTATRFAIKPMED

SEQ ID NO: 10085 - protein, 256 aa, Artificial Sequence
  derived and/or modified protein sequence (wt) from HRSV__AIY70195.1__M
METYVNKLHEGSTYTAAVQYNVLEKDDDPASLTIWVPMFQSSMPADLLIKELANVNILVKQISTLKGPSLRVMINSRSAVLAQMPSKFTICANVSLDERSKLAYDVTTPCEIKACSLTCLKSENMLTTVKDLTMKTLNPTHDIIALCEFENIVTSKKVIIPTYLRSISVRNKDLNTLENITTTEFKNAITNAKIIPYSGLLLVITVTDNKGAFKYIKPQSQFIVDLGAYLEKESIYYVTTNWKHTATRFAIKPMED

SEQ ID NO: 10086 - protein, 256 aa, Artificial Sequence
  derived and/or modified protein sequence (wt) from HRSV__AIY70239.1__M
METYVNKLHEGSTYTAAVQYNVLEKDDDPASLTIWVPMFQSSMPADLLIKELANVNILVKQISTLKGPSLRVMINSRSAVLAQMPSKFTICANVSLDERSKLAYDVTTPCEIKACSLTCLKSKNMLTTVKDLTMKTLNPTHDIIALCEFENIVTSKKVIIPTYLRSISVRNKDLNTLENITTTEFKNAITNAKIIPYSGLLLVITVTDNKGAFKYIKPQSQFIVDLGAYLEKESIYYVTTNWKHTATRFAIKPMED

SEQ ID NO: 10087 - protein, 256 aa, Artificial Sequence
  derived and/or modified protein sequence (wt) from HRSV__AIZ95978.1__M
METYVNKLHEGSTYTAAVQYNVLEKDDDPASLTIWVPMFQSSMPADLLIKELANVSILVKQISTPKGPSLRVMINSRSAVLAQMPSKFTISANVSLDERSKLAYDVTTPCEIKACSLTCLKSKNMLTTVKDLTMKTLNPTHDIIALCEFENIVTSKKVIIPTYLRSISVRNKDLNTLENITTTEFKNAITNAKIIPYSGLLLVITVTDNKGAFKYIKPQSQFIVDLGAYLEKESIYYVTTNWKHTATRFAIKPMED

SEQ ID NO: 10088 - protein, 256 aa, Artificial Sequence
  derived and/or modified protein sequence (wt) from HRSV__AIZ96022.1__M
METYVNKLHEGSTYTAAVQYNVLEKDDDPASLTIWVPMFQSSVPADLLIKELASINILVKQISTPKGPSLRVTINSRSAVLAQMPSNFTISANVSLDERSKLAYDVTTPCEIKACSLTCLKVKSMLTTVKDLTMKTFNPTHEIIALCEFENIMTSKSVIIPTYLRSISVKNKDLNSLENIATTEFKNAITNAKIIPYAGLVLVITVTDNKGAFKYIKPQSQFIVDLGAYLEKESIYYVTTNWKHTATRFSIKPLED

SEQ ID NO: 10089 - protein, 256 aa, Artificial Sequence
  derived and/or modified protein sequence (wt) from HRSV__AJF44523.1__M
METYVNKLHEGSTYTAAVQYNVLEKDDDPASLTIWVPMFQSSVPADLLIKELASINILVKQISTPKGPSLRVTINSRSAVLAQMPSSFIISANVSLDERSKLAYDVTTPCEIKACSLTCLKVKSMLTTVKDLTMKTFNPTHEIIALCEFENIMTSKKVIIPTYLRSISVKNKDLNSLENIATTEFKNAITNAKIIPYAGLVLVITVTDNKGAFKFIKPQSQFIVDLGAYLEKESIYYVTTNWKHTATRFSIKPLED

SEQ ID NO: 10090 - protein, 256 aa, Artificial Sequence
  derived and/or modified protein sequence (wt) from HRSV__AJF44599.1__M
METYVNKLHEGSTYTAAVQYNVLEKDDDPASLTIWVPMFQSSVPADLLIKELANINILVKQISTPKGPSLRVTINSRSAVLAQMPSNFTISANVSLDERSKLAYDVTTPCEIKACSLTCLKVKSMLTTVKDLTMKTFNPTHEIIALCEFENIMTSKRVIIPTYLRSISVKNKDLNSLENIATTEFKNAITNAKIIPYAGLVLVITVTDNKGAFKYIKPQSQFIVDLGAYLEKESIYYVTTNWKHTATRFSIKPLED

SEQ ID NO: 10091 - protein, 256 aa, Artificial Sequence
  derived and/or modified protein sequence (wt) from HRSV__AJF44700.1__M
METYVNKLHEGSTYTAAVQYNVLEKDDDPASLTIWVPMFQSSVPADLLIKELASINILVKQISTPKGPSLRVTINSRSAVLAQMPSSFTISANVSLDERSKLAYDVTTPCEIKACSLTCLKVKSMLTTVKDLTMKTFNPTHEIIALCEFENIMTSKKVIIPTYLRSISVKNKDLNSLENIATTEFKNAITNAKIIPYAGLVLVITVTDNKGAFKFIKPQSQFIVDLGAYLEKESIYYVTTNWKHTATRFSIKPLED

SEQ ID NO: 10092 - protein, 256 aa, Artificial Sequence
  derived and/or modified protein sequence (wt) from HRSV__AJF44768.1__M
METYVNKLHEGSTYTAAVQYNVLEKDDDPASLTIWVPMFQSSMPADLLIKELANVNILVKQISTPKGPSLRVMINSRSAVLVQMPSKFTICANVSLDERSKLAYDVTTPCEIKACSLTCLKSKNMLTTVKDLTMKTLNPTHDIIALCEFENIVTSKKVIIPTYLRSISVRNKDLNTLENITTTEFKNAITNAKIIPYSGLLLVITVTDNKGAFKYIKPQSQFIVDLGAYLEKESIYYVTTNWKHTATRFAIKPMED

SEQ ID NO: 10093 - protein, 256 aa, Artificial Sequence
  derived and/or modified protein sequence (wt) from HRSV__AJZ69877.1__M
METYVNKLHEGSTYTAAVQYNVLEKDDDPASLTIWVPMFQSSMPADLLIKELANVNILVKQISTPKGPSLRVMINSRSAVLAQMPSKFTICANVSLDERSKLAYDVTTPCEIKACSLTCLKSKNMLTTVKDLTMKTLNPTHDIIALCEFENIVTSKKVIIPTYLRSISVRNKNLNTLENITTTEFKNAITNAKIIPYSGLLLVITVTDNKGAFKYIKPQSQFIVDLGAYLEKESIYYVTTNWKHTATRFAIKPMED

SEQ ID NO: 10094 - protein, 256 aa, Artificial Sequence
  derived and/or modified protein sequence (wt) from HRSV__AKA45857.1__M
METYVNKLHEGSTYTAAVQYNILEKDDDPASLTIWVPMFQSSMPADLLIKELANVNILVKQISTPKGPSLRVMINSRSAVLAQMPSKFTICANVSLDERSKLAYDVTTPCEIKACSLTCLKSKNMLTTVKDLTMKTLNPTHDIIALCEFENIVTSKKVIIPTYLRSISVRNKDLNTLENITTTEFKNAITNAKIIPYSGLLLVITVTDNKGAFKYIKPQSQFIVDLGAYLEKESIYYVTTNWKHTATRFAIKPMED

SEQ ID NO: 10095 - protein, 256 aa, Artificial Sequence
  derived and/or modified protein sequence (wt) from HRSV__AMA66379.1__M
METYVNKLHEGSTYTAAVQYNVLEKDDDPASLTIWVPMFQSSVPADLLIKELASINILVKQISTPKGPSLRVTINSRSAVLAQMPSNFIISANVSLDERSKLAYDVTTPCEIKACSLTCLKVKSMLTTVKDLTMKTFNPTHEIIALCEFENIMTSKRVIIPTYLRSISVKNKDLNSLENIATTEFKNAITNAKIIPYAGLVLVITVTDNKGAFKYIKPQSQFIVDLGAYLEKESIYYVTTNWKHIATRFSIKPLED

SEQ ID NO: 10096 - protein, 256 aa, Artificial Sequence
  derived and/or modified protein sequence (wt) from HRSV__AMA66401.1__M
METYVNKLHEGSTYTAAVQYNVLEKDDDPASLTIWVPMFQSSMSADLLIKELANVNILVKQISTPKGPSLRVMINSRSAVLAQMPSKFTICANVSLDERSKLAYDVTTPCEIKACSLTCLKSKNMLTTVKDLTMKTLNPTHDIIALCEFENIVTSKKVIIPTYLRSISVRNKDLNTLENITTTEFKNAITNAKIIPYSGLLLVITVTDNKGAFKYIKPQSQFIVDLGAYLEKESIYYVTTNWKHTATRFAIKPMED

SEQ ID NO: 10097 - protein, 256 aa, Artificial Sequence
  derived and/or modified protein sequence (wt) from HRSV__AMA66665.1__M
METYVNKLHEGSTYTAAVQYNVLEKDDDPASLTIWVPMFQSSMPADSLIKELANVNILVKQISTPKGPSLRVMINSRSAVLAQMPSKFTISANVSLDERSKLAYDVTTPCEIKACSLTCLKSKNMLTTVKDLTMKTLNPTHDIIALCEFENIVTSKKVIIPTYLRSISVRNKDLNTLENITTTEFKNAITNAKIIPYSGLLLVITVTDNKGAFKYIKPQSQFIVDLGAYLEKESIYYVTTNWKHTATRFAIKPMED

SEQ ID NO: 10098 - protein, 256 aa, Artificial Sequence
  derived and/or modified protein sequence (wt) from HRSV__AMA66995.1__M
METYVNKLHEGSTYTAAVQYNVLEKDDDPASLTIWVPMFQSSMPADLLIKELANVNILVKQISTPKGPSLRVMINSRSAVLAQMPSKFTICANVSLDERSKLAYDVTTPCEIKACSLTCLKSKNMLTTVKDLTMKTLNPTHDIIALCEFENIVTSKKVIIPTYLRSISVRNKDLNTLENITTTEFKNAITNAKIIPYSGLLLVITVTDNKGAFKYIKPQSQFIVDLGAYLEKESIYYITTNWKHTATRFAIKPMED

SEQ ID NO: 10099 - protein, 256 aa, Artificial Sequence
  derived and/or modified protein sequence (wt) from HRSV__AMT77696.1__M
METYVNKLHEGSTYTAAVQYNVLEKDDDPASLTIWVPMFQSSVPADLLIKELASISILVKQISTPKGPSLRVTINSRSAVLAQMPSNFTISANVSLDERSKLAYDVTTPCEIKACSLTCLKVKSMLTTVKDLTMKTFNPTHEIIALCEFENIMTSKRVIIPTYLRSISVKNKDLNSLENIATTEFKNAITNAKIIPYAGLVLVITVTDNKGAFKYIKPQSQFIVDLGAYLEKESIYYVTTNWKHTATRFSIKPLED

SEQ ID NO: 10100 - protein, 256 aa, Artificial Sequence
  derived and/or modified protein sequence (wt) from HRSV__AMT78378.1__M
METYVNKLHEGSTYTAAVQYNVLEKDDDPASLTIWVPMFQSSVPADLLIKELASINILVKQISTPKGPSLRVTINSRSAVLAQMPSNFTISANVSLDERSKLAYDVTTPCEIKACSLTCLKVKSMLTTVKDLTMKTFNPTHEIIALCEFENIVTSKRVIIPTYLRSISVKNKDLNSLENIATTEFKNAITNAKIIPYAGLVLVITVTDNKGAFKYIKPQSQFIVDLGAYLEKESIYYVTTNWKHTATRFSIKPLED

SEQ ID NO: 10101 - protein, 256 aa, Artificial Sequence
  derived and/or modified protein sequence (wt) from HRSV__ANZ80064.1__M
METYVNKLHEGSTYTAAVQYNVLEKDDDPASLTIWVPMFQSSVPADLLIKELASINILVKQISTPKGPSLRVTINSRSAVLAQMPSSFTISANVSLDERSKLAYDVTTPCEIKACSLTCLKVKSMLTTVKDLTMKTFNPTHEIIALCEFENIMTSKRVIIPTYLRSISVKNKDLNSLENIATTEFKNAITNAKIIPYAGLVLVITVTDNKGAFKYIKPQSQFIVDLGAYLEKESIYYVTTNWKHTATRFSIKPLED

SEQ ID NO: 10102 - protein, 256 aa, Artificial Sequence
  derived and/or modified protein sequence (wt) from HRSV__ANZ80075.1__M
METYVNKLHEGSTYTAAVQYNVLEKDDDPASLTIWVPMFQSSMPADLLIKELANVNILVKQISTTKGPSLRVMINSRSAVLAQMPSKFTICANVSLDERSKLAYDVTTPCEIKACSLTCLKSKNMLTTVKDLTMKTLNPTHDIIALCEFENIVTSKKVIIPTYLRSISVRNKDLNTLENITTTEFKNAITNAKIIPYSGLLLVITVTDNKGAFKYIKPQSQFIVDLGAYLEKESIYYVTTNWKHTATRFAIKPMED

SEQ ID NO: 10103 - protein, 256 aa, Artificial Sequence
  derived and/or modified protein sequence (wt) from HRSV__ANZ80152.1__M
METYVNKLHEGSTYTAAVQYNVLEKDDDPASLTIWVPMFQSSMPADLLIKELANVNILVKQISTSKGPSLRVMINSRSAVLAQMPSKFTICANVSLDERSKLAYDVTTPCEIKACSLTCLKSKNMLTTVKDLTMKTLNPTHDIIALCEFENIVTSKKVIIPTYLRSISVRNKDLNTLENITTTEFKNAITNAKIIPYSGLLLVITVTDNKGAFKYIKPQSQFIVDLGAYLEKESIYYVTTNWKHTATRFAIKPMED

SEQ ID NO: 10104 - protein, 256 aa, Artificial Sequence
  derived and/or modified protein sequence (wt) from HRSV__ANZ80196.1__M
METYVNKLHEGSTYTAAVQYNVLEKDDDPASLTIWVPMFQSSMPADLLIKELANVNILVKQISTPKGPSLRVMINSRSAVLAQMPSKFTICANVSLDERSKLAYDVTTPCEIKACSLTCLKSKNMLTTVKDLTMKTLNPTHDIIALCEFENIATSKRVIIPTYLRSISVRNKDLNTLENITTTEFKNAITNAKIIPYSGLLLVITVTDNKGAFKYIKPQSQFIVDLGAYLEKESIYYVTTNWKHTATRFAIKPMED

SEQ ID NO: 10105 - protein, 256 aa, Artificial Sequence
  derived and/or modified protein sequence (wt) from HRSV__ANZ80306.1__M
METYVNKLHEGSTYTAAVQYNVLEKDNDPASLTIWVPMFQSSMPADLLIKELANVNILVKQISTPKGPSLRVMINSRSAVLAQMPSKFTICANVSLDERSKLAYDVTTPCEIKACSLTCLKSKNMLTTVKDLTMKTLNPTHDIIALCEFENIVTSKKVIIPTYLRSISVRNKDLNTLENITTTEFKNAITNAKIIPYSGLLLVITVTDNKGAFKYIKPQSQFIVDLGAYLEKESIYYVTTNWKHTATRFAIKPMED

SEQ ID NO: 10106 - protein, 256 aa, Artificial Sequence
  derived and/or modified protein sequence (wt) from HRSV__ANZ80515.1__M
METYVNKLHEGSTYTAAVQYNVLEKDDDPASLTIWVPMFQSSMPADLLVKELANVNILVKQISTPKGPSLRVMINSRSAVLAQMPSKFTICANVSLDERSKLAYDVTTPCEIKACSLTCLKSKNMLTTVKDLTMKTLNPTHDIIALCEFENIVTSKRVIIPTYLRSISVRNKDLNTLENITTTEFKNAITNAKIIPYSGLLLVITVTDNKGAFKYIKPQSQFIVDLGAYLEKESIYYVTTNWKHTATRFAIKPMED

SEQ ID NO: 10107 - protein, 256 aa, Artificial Sequence
  derived and/or modified protein sequence (wt) from HRSV__AOS48207.1__M
METYVNKLHEGSTYTAAVQYNVLEKDDDPASLTIWVPMFQSSMPADLLIKELANVNILVKQISTPKGPSLRVMINSRSAVLAQMPSKFTICANVSLDERSKLAYDVTTPCEIKACSLTCLKSKNMLTTVKDLTMKTLNPTHDIIALCEFENIITSKKVIIPTYLRSISVRNKDLNTLENITTTEFKNAITNAKIIPYSGLLLVITVTDNKGAFKYIKPQSQFIVDLGAYLEKESIYYVTTNWKHTATRFAIKPMED

SEQ ID NO: 10108 - protein, 256 aa, Artificial Sequence
  derived and/or modified protein sequence (wt) from HRSV__AOS48306.1__M
METYVNKLHEGSTYTAAVQYNVLEKDDDPASLTIWVPMFQSSMPADLLIKELANVNILVKQISTPKGPSLRVMINSRSAVLAQMPSKFTICANVSLDERSKLAYDVTTPCEIKACSLTCLKSKNMLTTVKDLTMKTLNPTHDIIALCEFENIVTSKKVIIPTYLRSISVKNKDLNTLENITTTEFKNAITNAKIIPYSGLLLVITVTDNKGAFKYIKPQSQFIVDLGAYLEKESIYYVTTNWKHTATRFAIKPMED

SEQ ID NO: 10109 - protein, 256 aa, Artificial Sequence
  derived and/or modified protein sequence (wt) from HRSV__AOS48405.1__M
METYVNKLHEGSTYTAAVQYNVLEKDDDPASLTIWVPMFQSSVPADLLIKELASINILVKQISTPKGPSLRVTINSRSAVLAQMPSNFTISANVSLDERSKLAYDVTTPCEIKACSLTCLKVKSMLTTVKDLTMKTFNPTHEIIALCEFENIMTSKRVTIPTYLRSISVKNKDLNSLENIATTEFKNAITNAKIIPYAGLVLVITVTDNKGAFKYIKPQSQFIVDLGAYLEKESIYYVTTNWKHTATRFSIKPLED

SEQ ID NO: 10110 - protein, 256 aa, Artificial Sequence
  derived and/or modified protein sequence (wt) from HRSV__AOY38332.1__M
METYVNKLHEGSTYTAAVQYNVLEKDDDPASLTIWVPMFQSSMPADLLIKELANVNILVKQISTPKGPSLRVMINSRSALLAQMPSKFTICANVSLDERSKLAYDVTTPCEIKACSLTCLKSKNMLTTVKDLTMKTLNPTHDIIALCEFENIVTSKKVIIPTYLRSISVRNKDLNTLENITTTEFKNAITNAKIIPYSGLLLVITVIDNKGAFKYIKPQSQFIVDLGAYLEKESIYYVTTNWKHTATRFAIKPMED

SEQ ID NO: 10111 - protein, 256 aa, Artificial Sequence
  derived and/or modified protein sequence (wt) from HRSV__APW78666.1__M
METYVNKLHEGSTYTAAVQYNVLEKDDDPASLTIWVPMFQSSVPADLLIKELASINILVKQISTSKGPSLRVTINSRSAVLAQMPSNFIISANVSLDERSKLAYDVTTPCEIKACSLTCLKVKSMLTTVKDLTMKTFNPTHEIIALCEFENIMTSKRVIIPTYLRSISVKNKDLNSLENIATTEFKNAITNAKIIPYAGLVLVITVTDNKGAFKYIKPQSQFIVDLGAYLEKESIYYVTTNWKHTATRFSIKPLED

SEQ ID NO: 10112 - protein, 256 aa, Artificial Sequence
  derived and/or modified protein sequence (wt) from HRSV__APW78699.1__M
METYVNKLHEGSTYTAAVQYNVLEKDDDPASLTIWVPMFQSSVPADLLIKELASINILVKQISTPKGPSLRVTINSRSAVLAQMPSNFTISANVSLDERSKLAYDVTTPCEIKACSLTCLKVKSMLTTVKDLTMKTFKPTHEIIALCEFENTMTSKRVTIPTYLRSISVKNKDLNSLENIATTEFKNAITNAKIIPYAGLVLVITVTDNKGAFKYIKPQSQFIVDLGAYLEKESIYYVTTNWKHTATRFSIKPLED

SEQ ID NO: 10113 - protein, 256 aa, Artificial Sequence
  derived and/or modified protein sequence (wt) from HRSV__APW78908.1__M
METYVNKLHEGSTYTAAVQYNVLEKDDDPASLTIWVPMFQSSVPADLLIKELASINILVKQISTPKGPSLRVTINSRSAVLAQMPSNFTISANVSLDERSKLAYDVTTPCEIKACSLTCLKVKSMLTTVKDLTMKTFNPTHEIIALCEFENIRTSKRVIIPTYLRSISVKNKDLNSLENIATTEFKNAITNAKIIPYAGLVLVITVTDNKGAFKYIKPQSQFIVDLGAYLEKESIYYVTTNWKHTATRFSIKPLED

SEQ ID NO: 10114 - protein, 256 aa, Artificial Sequence
  derived and/or modified protein sequence (wt) from HRSV__ARB66380.1__M
METYVNKLHEGSTYTAAVQYNVLEKDDDPASLTIWVPMFQSTMPADLLIKELANVNILVKQISTPKGPSLRVMINSRSAVLAQMPSKFTICANVSLDERSKLAYDVTTPCEIKACSLTCLKSKNMLTTVKDLTMKTLNPTHDIIALCEFENIVTSKKVIIPTYLRSISVRNKDLNTLENITTTEFKNAITNAKIIPYSGLLLVITVTDNKGAFKYIKPQSQFIVDLGAYLEKESIYYVTTNWKHTATRFAIKPMED

SEQ ID NO: 10115 - protein, 256 aa, Artificial Sequence
  derived and/or modified protein sequence (wt) from HRSV__ARB66413.1__M
METYVNKLHEGSTYTAAVQYNVLEKDDDPASLTIWVPMFQSSMPADLLIKELANVNILVKQISTPKGPSLRVMINSRSAVLAQMPSKFTICANVSLDERSKLAYDVTTPCEIKACSLTCLKSKNMLTTVKDLTMKTLNPTHDIIALCEFENIVTSKKVIIPTYLRSISVRNKDLNTLENITTTEFKNANTNAKIIPYSGLLLVITVTDNKGAFKYIKPQSQFIVDLGAYLEKESIYYVTTNWKHTATRFAIKPMED

SEQ ID NO: 10116 - protein, 256 aa, Artificial Sequence
  derived and/or modified protein sequence (wt) from HRSV__ARB66446.1__M
METYVNKLHEGSTYTAAVQYNVLEKDDDPASLTIWVPMFQSSMPADLLIKELANVNILVKQISTPKGPSLRVMINSRSAVLAQMPSKFTICANVSLDERSKLAYDVTTPCEIKACSLTCLKSKNMLTTVKDLTMKTLNPTHDIIALCEFENIVTSKKVIIPTYLRSISVRNKDLNTLENITTTEFKNAITNAKIIPYSGLLLVITVTDNKGAFKYIKPQSQFIVDLGAYLEKESIYYVTTNGKHTGTRFAIKPMED

SEQ ID NO: 10117 - protein, 256 aa, Artificial Sequence
  derived and/or modified protein sequence (wt) from HRSV__ARN61504.1__M
METYVNKLHEGSTYTAAVQYNVLEKDDDPASLTIWVPMFQSSMPADLLIKELANVNILVKQISTPKGPSLRVMINSRSALLAQMPSKFTICANVSLDERSKLAYDVTTPCEIKACSLTCLKSKNMLTTVKDLTMKTLNPTHDIIALCEFENIVASKKVIIPTYLRSISVRNKDLNTLENITTTEFKNAITNAKIIPYSGLLLVITVTDNKGAFKYIKPQSQFIVDLGAYLEKESIYYVTTNWKHTATRLAIKPMED

SEQ ID NO: 10118 - protein, 256 aa, Artificial Sequence
  derived and/or modified protein sequence (wt) from HRSV__ARQ15952.1__M
METYVNKLHEGSTYTAAVQYNVLEKDDDPASLTIWVPMFQSSIPADLLIKELANVNILVKQISTPKGPSLRVMINSRSAVLAQMPSKFTICANVSLDERSKLAYDVTTPCEIKACSLTCLKSKNMLTTVKDLTMKTLNPTHDIIALCEFENIVTSKKVIIPTYLRSISVRNKDLNTLENITTTEFKNAITNAKIIPYSGLLLVITVTDNKGAFKYIKPQSQFIVDLGAYLEEESIYYVTTNWKHTATRFAIKPMED

SEQ ID NO: 10119 - protein, 256 aa, Artificial Sequence
  derived and/or modified protein sequence (wt) from HRSV__ART28380.1__M
METYVNKLHEGSTYTAAVQYNVLEKDDDPASLTIWVPMFQSSMPADLLIKELANVNILVKQISTPKGPSLRVMINSRSAVLAQMPSKFTICANVSLDERSKLAYDVTTPCEIKACSLTCLKSKNMLTTVKDLTMKTLNPTHDIIALCEFENIVTSKKVIIPTYLRSISVRNKDLSTLENITTTEFKNAITNAKIIPYSGLLLVITVTDNKGAFKYIKPQSQFIVDLGAYLEKESIYYVTTNWKHTATRFAIKPMED

SEQ ID NO: 10120 - protein, 256 aa, Artificial Sequence
  derived and/or modified protein sequence (wt) from HRSV__ART28424.1__M
METYVNKLHEGSTYTAAVQYNVLEKDDDPASLTIWVPMFQSSMPADLLIKELANVNILVKQISTPKGPSLRVMINSRSAVLAQMPSKFTICANVSLDERSKLAYDVTTSCEIKACSLTCLKSKNMLTTVKDLTMKTLNPTHDIIALCEFENIVTSKKVIIPTYLRSISVRNKDLNTLENITTTEFKNAITNAKIIPYSGLLLVITVTDNKGAFKYIKPQSQFIVDLGAYLEKESIYYVTTNWKHTATRFAIKPMED

SEQ ID NO: 10121 - protein, 256 aa, Artificial Sequence
  derived and/or modified protein sequence (wt) from HRSV__ASL69314.1__M
METYVNKLHEGSTYTAAVQYNVLEKDDDPASLTIWVPMFQSSIPADLLIKELANVNILVKQISTPKGPSLRVMINSRSAVLAQMPSKFTICANVSLDERSKLAYDVTTPCEIKACSLTCLKSKNMLTTVKDLTMKTLNPTHDIIALCEFENIVTSKKVIIPTYLRSISVRNKDLNTLENITTTEFKNAITNAKIIPYSGLLLVITVTDNKGAFKYIKPQSQFIVDLGAYLEKESIYYVTTNWRHTATRFAIKPMED

SEQ ID NO: 10122 - protein, 256 aa, Artificial Sequence
  derived and/or modified protein sequence (wt) from HRSV__ASL69346.1__M
METYVNKLHEGSTYTAAVQYNVLEKDDDPASLTIWVPMFQSSVPADLLIKELASINILVKQISTPKGPSLRVTINSRSAVLAQMPSNFIISANVSLDERSKLAYDVTTPCEIKACSLTCLKVKSMLTTVKDLTMKTFNPTHEIIALCEFENIMTSKRVIIPTYLRSIGVKNKDLNSLENIATTEFKNAITNAKIIPYAGLVLVITVTDNKGAFKYIKPQSQFIVDLGAYLEKESIYYVTTNWKHTATRFSIKPLED

SEQ ID NO: 10123 - protein, 256 aa, Artificial Sequence
  derived and/or modified protein sequence (wt) from HRSV__ASL69350.1__M
METYVNKLHEGSTYTAAVQYNVLEKDDDPASLTIWVPMFQSSVPADLLIKELASINILVKQISTPKGPSLRVTINSRSAVLAQMPSNFTISANVSLDERGKLAYDVTTPCEIKACSLTCLKVKSMLTTVKDLTMKTFNPTHEIIALCEFENIMTSKRVIIPTYLRSISVKNKDLNSLENIATTEFKNAITNAKIIPYAGLVLVITVTDNKGAFKYIKPQSQFIVDLGAYLEKESIYYVTTNWKHTATRFSIKPLED

SEQ ID NO: 10124 - protein, 256 aa, Artificial Sequence
  derived and/or modified protein sequence (wt) from HRSV__ASV49529.1__M
METYVNKLHEGSTYTAAVQYNVLEKDDDPASLTIWVPMFQSSMPADLLIKELANVNILVKQISTPKGPSLKVMINSRSAVLAQMPSKFTICANVSLDERSKLAYDVTTPCEIKACSLTCLKSKNMLTTVKDLTMKTLNPTHDIIALCEFENIVTSKKVIIPTYLRSISVRNKDLNTLENITTTEFKNAITNAKIIPYSGLLLVITVTDNKGAFKYIKPQSQFIVDLGAYLEKESIYYVTTNWKHTATRFAIKPMED

SEQ ID NO: 10125 - protein, 256 aa, Artificial Sequence
  derived and/or modified protein sequence (wt) from HRSV__ATV81351.1__M
METYVNKLPYVSTYTAAVQYNVLEKDDDPASLTIWVPMFQSSMPADLLIKELANVNILVKQISTPKGPSLRVMINSRSAVLAQMPSKFTICANVSLDERSKLAYDVTTPCEIKACSLTCLKSKNMLTTVKDLTMKTLNPTHDIIALCEFENIVTSKKVIIPTYLRSISVRNKDLNTLENITTTEFKNAITNAKIIPYSGLLLVITVTDNKGAFKYIKPQSQFIVDLGAYLEKESIYYVTTNWKHTATRFAIKPMED

SEQ ID NO: 10126 - protein, 256 aa, Artificial Sequence
  derived and/or modified protein sequence (wt) from HRSV__AUC68267.1__M
METYVNKLHEGSTYTAAVQYNVLEKDDDPASLTIWVPMFQSSVPADLLIKELASINILVKQISTPKGPSLRVTINSRSAVLAQMPSNFIISANVSLDERSKLAYDITTPCEIKACSLTCLKVKSMLTTVKDLTMKTFNPTHEIIALCEFENIMTSKRVIIPTYLRSISVKNKDLNSLENIATTEFKNAITNAKIIPYAGLVLVITVTDNKGAFKYIKPQSQFIVDLGAYLEKESIYYVTTNWKHTATRFSIKPLED

SEQ ID NO: 10127 - protein, 256 aa, Artificial Sequence
  derived and/or modified protein sequence (wt) from HRSV__AUC68332.1__M
METYVNKLHEGSTYTAAVQYNVLEKDDDPASLTIWVPMFQSSMPADLLIKELANVNILVKQISTPKGPSLRVMINSRSAVLAQMPSKFTICANVSLDERSKLAYDVTTPCEIKACSLTCLKSKNMLTTVKDLTMKPLNPTHDIIALCEFENIVTSKKVIIPTYLRSISVRNKDLNTLENITTTEFKNAITNAKIIPYSGLLLVITVTDNKGAFKYIKPQSQFIVDLGAYLEKESIYYVTTNWKHTATRFAIKPMED

SEQ ID NO: 10128 - protein, 256 aa, Artificial Sequence
  derived and/or modified protein sequence (wt) from HRSV__AUC68343.1__M
METYVNKLHEGSTYTAAVQYNVLEKDDDPASLTIWVPMFQSSVPADLLIKELASINILVKQISTPKGPSLRVTINSRSAVLAQMPSNFIISANVSLDERSKLAYDVTTPCEIKACSLTCLKVKSMLTTVKDLTMKTFNPTHEIIALCEFENTMTSKRVIIPTYLRSISVKNKDLNSLENIATTEFKNAITNAKIIPYAGLVLVITVTDNKGAFKYIKPQSQFIVDLGAYLEKESIYYVTTNWKHTATRFSIKPLED

SEQ ID NO: 10129 - protein, 256 aa, Artificial Sequence
  derived and/or modified protein sequence (wt) from HRSV__NP_044593.1__M
METYVNKLHEGSTYTAAVQYNVLEKDDDPASLTIWVPMFQSSMPADLLIKELANVNILVKQISTPNGPSLRVMINSRSAVLAQMPSKFTICANVSLDERSKLAYDVTTPCEIKACSLTCLKSKNMLTTVKDLTMKTLNPTHDIIALCEFENIVTSKKVIIPTYLRSISVRNKDLNTLENITTTEFKNAITNAKIIPYSGLLLVITVTDNKGAFKYIKPQSQFIVDLGAYLEKESIYYVTTNWKHTATRFAIKPMED

SEQ ID NO: 10130 - protein, 256 aa, Artificial Sequence
  derived and/or modified protein sequence (wt) from HRSV__P24615.1__M
METYVNKLHEGSIYTAAVQYNVIEKDDDPASLTIWVPMFQSSISADMLIKELINVNILVRQISTPKGPSLKIMINSRSAVLAQMPSKFTISANVSLDERSKLAYDITTPCEIKACSLTCLKVKNMLTTVKDLTMKTFNPTHEIIALCEFENIMTSKRVVIPTFLRSINVKAKDLDSLENIATTEFKNAITNAKIIPYAGLVLVITVTDNKGAFKYIKPQSQFIVDLGAYLEKESIYYVTTNWKHTATKFSIKPIED

SEQ ID NO: 10131 - protein, 256 aa, Artificial Sequence
  derived and/or modified protein sequence (wt) from HRSV__Q84131.1__M
METYVNKLHEGSTYTAAVQYNVLEKDDDPASLTIWVPMFQSSISADLLIKELINVNILVRQISTLKGPSLKIMINSRSAVLAQMPNKFTISANVSLDERSKLAYDITTPCEIKACSLTCLKVKNMLTTVKDLTMKTFNPTHEIIALCEFENIMTSKKVVIPTFLRSINVKAKDLDSLENIATTEFKNAITNAKIIPYAGLVLVITVTDNKGAFKYIKPQSQFIVDLGAYLEKESIYYVTTNWKHTATRFSIKPIED

SEQ ID NO: 10132 - protein, 256 aa, Artificial Sequence
  derived and/or modified protein sequence (wt) from HRSV__2VQP_A__M
METYVNKLHEGSTYTAAVQYNVLEKDDDPASLTIWVPMFQSSMPADLLIKELANVNILVKQISTPKGPSLRVMINSRSAVLAQMPSKFTICANVSLDDRSKLAYDVTTPCEIKACSLTCLKSKNMLTTVKDLTMKTLNPTHDIIALCEFENIVTSKKVIIPTYLRSISVRNKDLNTLENITTTEFKNAITNAKIIPYSGLLLVITVTDNKGAFKYIKPQSQFIVDLGAYLEKESIYYVTTNWKHTATRFAIKPRED

SEQ ID NO: 10133 - protein, 256 aa, Artificial Sequence
  derived and/or modified protein sequence (wt) from HRSV__2YKD_A__M
METYVNKLHEGSTYTAAVQYNVLEKDDDPASLTIWVPMFQSSMPADLLIKELANVNILVKQISTPKGPSLRVMINSRSAVLAQMPSKFTICANVSLDDRSKLAYDVTTPCEIKACSLTCLKSKNMLTTVKDLTMKTLNPTHDIIALCEFENIVTSKKVIIPTYLRSISVRNKDLNTLENITTTEFKNAITNAKIIPYSGLLLVITVTDNKGAFKYIKPQSQFIVDLGAYLEKESIYYVTTNWKHTATRFAIKPMED

SEQ ID NO: 10134 - protein, 391 aa, Artificial Sequence
  derived and/or modified protein sequence (wt) from HRSV(A2)__P03418.1__N
MALSKVKLNDTLNKDQLLSSSKYTIQRSTGDSIDTPNYDVQKHINKLCGMLLITEDANHKFTGLIGMLYAMSRLGREDTIKILRDAGYHVKANGVDVTTHRQDINGKEMKFEVLTLASLTTEIQINIEIESRKSYKKMLKEMGEVAPEYRHDSPDCGMIILCIAALVITKLAAGDRSGLTAVIRRANNVLKNEMKRYKGLLPKDIANSFYEVFEKHPHFIDVFVHFGIAQSSTRGGSRVEGIFAGLFMNAYGAGQVMLRWGVLAKSVKNIMLGHASVQAEMEQVVEVYEYAQKLGGEAGFYHILNNPKASLLSLTQFPHFSSVVLGNAAGLGIMGEYRGTPRNQDLYDAAKAYAEQLKENGVINYSVLDLTAEELEAIKHQLNPKDNDVEL

SEQ ID NO: 10135 - RNA, 1176 nt, Artificial Sequence
  derived and/or modified CDS sequence (wt) from HRSV(A2)__P03418.1__N
auggcucuuagcaaagucaaguugaaugauacacucaacaaagaucaacuucugucauccagcaaauacaccauccaacggagcacaggagauaguauugauacuccuaauuaugaugugcagaaacacaucaauaaguuauguggcauguuauuaaucacagaagaugcuaaucauaaauucacuggguuaauagguauguuauaugcgaugucuagguuaggaagagaagacaccauaaaaauacucagagaugcgggauaucauguaaaagcaaauggaguagauguaacaacacaucgucaagacauuaauggaaaagaaaugaaauuugaaguguuaacauuggcaagcuuaacaacugaaauucaaaucaacauugagauagaaucuagaaaauccuacaaaaaaaugcuaaaagaaaugggagagguagcuccagaauacaggcaugacucuccugauugugggaugauaauauuauguauagcagcauuaguaauaacuaaauuagcagcaggggacagaucuggucuuacagccgugauuaggagagcuaauaauguccuaaaaaaugaaaugaaacguuacaaaggcuuacuacccaaggacauagccaacagcuucuaugaaguguuugaaaaacauccccacuuuauagauguuuuuguucauuuugguauagcacaaucuucuaccagagguggcaguagaguugaagggauuuuugcaggauuguuuaugaaugccuauggugcagggcaagugauguuacgguggggagucuuagcaaaaucaguuaaaaauauuauguuaggacaugcuagugugcaagcagaaauggaacaaguuguugagguuuaugaauaugcccaaaaauuggguggugaagcaggauucuaccauauauugaacaacccaaaagcaucauuauuaucuuugacucaauuuccucacuucuccaguguaguauuaggcaaugcugcuggccuaggcauaaugggagaguacagagguacaccgaggaaucaagaucuauaugaugcagcaaaggcauaugcugaacaacucaaagaaaauggugugauuaacuacaguguacuagacuugacagcagaagaacuagaggcuaucaaacaucagcuuaauccaaaagauaaugauguagagcuuuga

SEQ ID NO: 10136 - RNA, 1176 nt, Artificial Sequence
  derived and/or modified CDS sequence (opt1) from HRSV(A2)__P03418.1__N
auggcccugagcaaggugaagcucaacgacacccugaacaaggaccagcugcucuccagcuccaaguacaccauccagcgcagcaccggcgacuccaucgacacccccaacuacgacguccagaagcacaucaacaagcugugcgggaugcugcucaucaccgaggacgccaaccacaaguucaccggccugaucgggaugcuguacgcgaugagccggcucggccgcgaggacacgaucaagauccugcgggacgccggguaccacgugaaggccaacggcguggacgucaccacccaccgccaggacaucaacggcaaggagaugaaguucgaggugcugacccucgccucccugacgaccgagauccagaucaacaucgagaucgagagccggaaguccuacaagaagaugcugaaggagaugggggagguggccccggaguaccgccacgacagccccgacugcggcaugaucauccucugcaucgcggcccuggucaucaccaagcuggccgccggggaccgguccggccucaccgcggugauccgccgggccaacaacgugcugaagaacgagaugaagcgcuacaaggggcugcuccccaaggacaucgccaacagcuucuacgaggucuucgagaagcacccccacuucaucgacguguucgugcacuucggcaucgcccaguccagcacgcggggcgggucccgcgucgagggcaucuucgccgggcuguucaugaacgcguacggcgccggccaggugaugcugcgguggggcgugcucgccaagagcgucaagaacaucaugcuggggcacgccuccgugcaggccgagauggagcaggucguggagguguacgaguacgcgcagaagcucgggggcgaggccggguucuaccacauccugaacaacccgaaggccagccugcugucccucacccaguucccccacuucagcagcgugguccugggcaacgccgccggccuggggaucaugggcgaguaccgcgggacgccccggaaccaggaccucuacgacgcggccaaggccuacgccgagcagcugaaggagaacggcgugaucaacuacuccgugcuggaccucaccgccgaggagcuggaggcgaucaagcaccagcugaaccccaaggacaacgacgucgagcucuga

SEQ ID NO: 10137 - RNA, 1176 nt, Artificial Sequence
  derived and/or modified CDS sequence (opt2) from HRSV(A2)__P03418.1__N
auggcccucuccaaggucaagcucaacgacacccucaacaaggaccagcuccucuccuccuccaaguacaccauccagcgcuccaccggcgacuccaucgacacccccaacuacgacguccagaagcacaucaacaagcucugcggcaugcuccucaucaccgaggacgccaaccacaaguucaccggccucaucggcaugcucuacgccaugucccgccucggccgcgaggacaccaucaagauccuccgcgacgccggcuaccacgucaaggccaacggcgucgacgucaccacccaccgccaggacaucaacggcaaggagaugaaguucgagguccucacccucgccucccucaccaccgagauccagaucaacaucgagaucgagucccgcaaguccuacaagaagaugcucaaggagaugggcgaggucgcccccgaguaccgccacgacucccccgacugcggcaugaucauccucugcaucgccgcccucgucaucaccaagcucgccgccggcgaccgcuccggccucaccgccgucauccgccgcgccaacaacguccucaagaacgagaugaagcgcuacaagggccuccuccccaaggacaucgccaacuccuucuacgaggucuucgagaagcacccccacuucaucgacgucuucguccacuucggcaucgcccaguccuccacccgcggcggcucccgcgucgagggcaucuucgccggccucuucaugaacgccuacggcgccggccaggucaugcuccgcuggggcguccucgccaaguccgucaagaacaucaugcucggccacgccuccguccaggccgagauggagcaggucgucgaggucuacgaguacgcccagaagcucggcggcgaggccggcuucuaccacauccucaacaaccccaaggccucccuccucucccucacccaguucccccacuucuccuccgucguccucggcaacgccgccggccucggcaucaugggcgaguaccgcggcaccccccgcaaccaggaccucuacgacgccgccaaggccuacgccgagcagcucaaggagaacggcgucaucaacuacuccguccucgaccucaccgccgaggagcucgaggccaucaagcaccagcucaaccccaaggacaacgacgucgagcucuga

SEQ ID NO: 10138 - RNA, 1176 nt, Artificial Sequence
  derived and/or modified CDS sequence (opt3) from HRSV(A2)__P03418.1__N
auggcccugagcaaggugaaacucaacgacacccuuaauaaggaucagcuguuguccucuucaaaauacacaauccaaagaaguacuggcgacagcauugauacgcccaacuaugacguccagaagcacauaaauaaauuaugcgggaugcugcuaaucaccgaggaugcuaaccauaaguucacaggacucauugguaugcuguacgcaauguccaggcuuggccgggaagacacuaucaagauucugcgcgaugccggguaucacguuaaagcgaauggaguggacguaaccacacaucgacaggauaucaacggcaaggagaugaaauuugaaguguugacccucgcuucucugacuacagagauacagaucaauauugaaaucgagucgcguaagucauacaaaaagaugcugaaggagaugggugaagucgccccugaguauagacacgacagcccagauugugggaugauuauccucugcauagcagccuuagugauuaccaaacuggcugcaggagacaggaguggccuuacggccguuauccggcgcgcuaacaauguguugaagaacgaaaugaaaagauacaagggccugcuaccgaaagauauugccaauuccuucuaugaggucuuugagaagcauccccacuucaucgacguguuuguacacuucgggaucgcgcaaucuagcacuaggggagguucccggguugaaggcauuuuugcaggacucuucaugaacgccuacggggcuggccaggugaugcugcgcugggguguccuugccaaaucagugaagaauauaaugcuggggcaugcaagugugcaggcugagauggaacaggucguugagguguacgaauaugcccaaaaguugggaggcgaggcgggcuuuuaccacauccucaacaauccuaaagccagccuguuaucucugacccaguucccacauuuuuccucaguagugcucgggaacgcagcuggacuugguauuaugggcgaguaucgagggacacccagaaaccaggaccuguacgaugccgcuaaggccuaugcagaacaguugaaagagaauggagucaucaacuacagcgugcuagaccugacugccgaggaacucgaagcuauaaagcaccaacugaauccuaaagauaacgacguugagcuuuga

SEQ ID NO: 10139 - RNA, 1176 nt, Artificial Sequence
  derived and/or modified CDS sequence (opt4) from HRSV(A2)__P03418.1__N
auggcccugagcaaggugaagcugaacgacacccugaacaaggaccagcugcugagcagcagcaaguacaccauccagagaagcaccggcgacagcaucgacacccccaacuacgacgugcagaagcacaucaacaagcugugcggcaugcugcugaucaccgaggacgccaaccacaaguucaccggccugaucggcaugcuguacgccaugagcagacugggcagagaggacaccaucaagauccugagagacgccggcuaccacgugaaggccaacggcguggacgugaccacccacagacaggacaucaacggcaaggagaugaaguucgaggugcugacccuggccagccugaccaccgagauccagaucaacaucgagaucgagagcagaaagagcuacaagaagaugcugaaggagaugggcgagguggcccccgaguacagacacgacagccccgacugcggcaugaucauccugugcaucgccgcccuggugaucaccaagcuggccgccggcgacagaagcggccugaccgccgugaucagaagagccaacaacgugcugaagaacgagaugaagagauacaagggccugcugcccaaggacaucgccaacagcuucuacgagguguucgagaagcacccccacuucaucgacguguucgugcacuucggcaucgcccagagcagcaccagaggcggcagcagaguggagggcaucuucgccggccuguucaugaacgccuacggcgccggccaggugaugcugagauggggcgugcuggccaagagcgugaagaacaucaugcugggccacgccagcgugcaggccgagauggagcaggugguggagguguacgaguacgcccagaagcugggcggcgaggccggcuucuaccacauccugaacaaccccaaggccagccugcugagccugacccaguucccccacuucagcagcguggugcugggcaacgccgccggccugggcaucaugggcgaguacagaggcacccccagaaaccaggaccuguacgacgccgccaaggccuacgccgagcagcugaaggagaacggcgugaucaacuacagcgugcuggaccugaccgccgaggagcuggaggccaucaagcaccagcugaaccccaaggacaacgacguggagcuguga

SEQ ID NO: 10140 - RNA, 1176 nt, Artificial Sequence
  derived and/or modified CDS sequence (opt5) from HRSV(A2)__P03418.1__N
auggcccugagcaaggugaaacucaacgacacccugaauaaggaucagcuucuguccucuagcaaauacacaauccaaagauccacgggcgacucuauugauacccccaacuaugacguccagaagcacaucaauaaacucugcgggaugcugcuuauuacagaggaugcuaaccauaaguucaccggacugaucggcaugcucuacgccaugagccggcuggggcgcgaagacacaauuaagauccugagagaugcgggauaucacguuaaagcuaauggcguggacgugaccacacaucggcaggauaucaacgggaaggagaugaaauuugaaguccucacccuggccucccuuacgaccgagauucagaucaauauugaaaucgagucucgcaagagcuacaaaaagaugcugaaggagaugggagaaguggccccugaguauagacacgacuccccggauuguggcaugauuauccucugcauugcugcccugguuaucacaaaacuugcugccggcgaccggagcgggcugaccgcggugauccgcagagccaacaauguccucaagaacgaaaugaaacgguacaagggacugcugcccaaagauauugcuaauucuuucuaugagguguuugagaagcauccucacuucaucgacguuuuugugcacuucggcauugcccaauccagcacacgcgggggaucuagagucgaaggcaucuuugcuggacucuucaugaacgccuacggggcgggccaggugaugcugcgguggggcgugcuugccaaauccgucaagaauauuaugcuggggcaugcuagcguucaggccgagauggaacaggugguggaggucuacgaauaugcucaaaagcucggaggcgaggccggguuuuaccacauccugaacaaucccaaagccucucuucugucccucacccaguucccucauuuuagcuccgugguucugggaaacgcugcgggccuggggaucaugggagaguaucgcggcacgcccagaaaccaggaccucuacgaugccgcuaaggccuaugccgaacagcugaaagagaauggcgugauuaacuacucuguccuugaccugacagcugaggaacucgaagccaucaagcaccaacugaauccuaaagauaacgacguggagcuuuga

SEQ ID NO: 10141 - RNA, 1176 nt, Artificial Sequence
  derived and/or modified CDS sequence (opt6) from HRSV(A2)__P03418.1__N
auggcacuaagcaaagucaaauuaaacgacacauuaaacaaagaccaacucuuaucaucaucaaaauacacaauacaaagaagcaccggagacaguaucgacacaccaaacuaugacguccaaaaacauauaaauaaauuaugcggcaugcucuuaaucacagaagacgccaaccauaaauuuacaggauuaauaggaauguuauaugcaaugucacgacuagguagagaagacacaauaaaaauacuaagagacgcaggcuaucacguaaaagcaaauggaguagacguaaccacacacagacaagacauaaauggaaaagaaaugaaauuugaaguauuaacacuagcaucacuaacaacagaaauacaaaucaacauagaaauagaaucaagaaaaagcuacaaaaaaauguuaaaagaaaugggagaagucgcaccagaauauagacaugauucaccagacugcggaaugauaauacuaugcauagcagcccuaguaauuacaaaacuagcagcaggagacagaagcggauuaacagcaguaauaagaagagcaaacaacguacuaaaaaacgaaaugaaaagauauaaaggauuauuaccaaaagacauagcaaacucauucuaugaaguauucgaaaaacacccccacuuuauagacgucuucguacacuucggaauagcccaaucauccacaagaggaggaucaagagucgaaggaauauucgcaggauuauucaugaacgcauauggcgcaggacaaguaaugcuaagauggggaguacuagcaaaauccgucaaaaacauaaugcuaggacacgcaucaguucaagcagaaauggaacaaguaguagaaguauacgaauacgcccaaaaacuaggaggagaagcaggauucuaccacauacuaaauaauccaaaagcaucacuacuaagccuaacccaauuuccccacuucucaaguguaguauuaggaaaugcagcuggacuaggaauaaugggagaauacagaggaacaccaagaaaccaagacuuauacgacgcagcaaaagcauacgcagagcaacuuaaagaaaacggaguaauaaacuauagcguacuagacuuaacagcagaagaacuggaagcaauaaaacaucaauuaaacccgaaagacaaugacguagaauuauaa

SEQ ID NO: 10142 - RNA, 1176 nt, Artificial Sequence
  derived and/or modified CDS sequence (opt11) from HRSV(A2)__P03418.1__N
auggcacucucgaaaguaaaacucaacgacacccucaacaaagaccaacuccuuuccagcuccaaauacaccauccaacgauccaccggagacuccaucgacacgcccaacuacgacguccagaaacacaucaacaagcucugcggaaugcuacuaaucaccgaggacgccaaccacaaauucacaggacuuauagggaugcucuacgccaugucccgccucggacgcgaagacacaauaaaaauccuacgagacgccggcuaccacguaaaggcaaacggcgucgacgucaccacacacagacaagacaucaacggaaaggaaaugaaauucgaaguccucacccucgccagccuaaccaccgagauccaaaucaacaucgaaaucgaaucacgcaaauccuacaagaaaaugcucaaagaaaugggagaagucgcccccgaauaccgucacgacucgcccgacugcggcaugauaauccuaugcaucgccgcacucgucauaaccaaacucgccgccggugaccgaucaggacugacagcagucauccgccgagcaaacaacgugcucaaaaacgaaaugaaacgcuacaaaggccuacuccccaaagacaucgccaacuccuucuacgaagucuucgaaaaacacccacacuucaucgacgucuucguccacuucggcaucgcacaaucaucaaccagaggcggcagccgcguugaaggcaucuucgcaggacucuuuaugaacgccuacggcgccggccaagucaugcuccgcuggggcguccuggcaaaaagcgucaaaaacaucaugcuaggccacgcuagcguccaagccgaaauggaacaagucgucgaaguuuacgaguacgcacaaaaacucggcggcgaagcaggcuucuaccacauccuaaacaaccccaaagccucccugcuaucacucacccaauucccccacuucuccagcgucguccucggcaacgccgcaggacuaggcaucaugggagaauaccgcgggacaccgcgcaaccaagaccucuacgacgccgccaaagccuacgccgaacaacucaaagaaaacggcgucauaaacuacucaguccucgaccucaccgccgaagaacucgaagccaucaaacaccaacucaacccaaaagacaacgacgucgaauuauaa

SEQ ID NO: 10143 - RNA, 1452 nt, Artificial Sequence
  mRNA product Design a-1 comprising derived and/or modified sequence from HRSV(A2)__P03418.1__N (wt)
gggagagucccgcagucggcguccagcggcucugcuuguucgugugugugucguugcaggccuuauucaagcuuaccauggcucuuagcaaagucaaguugaaugauacacucaacaaagaucaacuucugucauccagcaaauacaccauccaacggagcacaggagauaguauugauacuccuaauuaugaugugcagaaacacaucaauaaguuauguggcauguuauuaaucacagaagaugcuaaucauaaauucacuggguuaauagguauguuauaugcgaugucuagguuaggaagagaagacaccauaaaaauacucagagaugcgggauaucauguaaaagcaaauggaguagauguaacaacacaucgucaagacauuaauggaaaagaaaugaaauuugaaguguuaacauuggcaagcuuaacaacugaaauucaaaucaacauugagauagaaucuagaaaauccuacaaaaaaaugcuaaaagaaaugggagagguagcuccagaauacaggcaugacucuccugauugugggaugauaauauuauguauagcagcauuaguaauaacuaaauuagcagcaggggacagaucuggucuuacagccgugauuaggagagcuaauaauguccuaaaaaaugaaaugaaacguuacaaaggcuuacuacccaaggacauagccaacagcuucuaugaaguguuugaaaaacauccccacuuuauagauguuuuuguucauuuugguauagcacaaucuucuaccagagguggcaguagaguugaagggauuuuugcaggauuguuuaugaaugccuauggugcagggcaagugauguuacgguggggagucuuagcaaaaucaguuaaaaauauuauguuaggacaugcuagugugcaagcagaaauggaacaaguuguugagguuuaugaauaugcccaaaaauuggguggugaagcaggauucuaccauauauugaacaacccaaaagcaucauuauuaucuuugacucaauuuccucacuucuccaguguaguauuaggcaaugcugcuggccuaggcauaaugggagaguacagagguacaccgaggaaucaagaucuauaugaugcagcaaaggcauaugcugaacaacucaaagaaaauggugugauuaacuacaguguacuagacuugacagcagaagaacuagaggcuaucaaacaucagcuuaauccaaaagauaaugauguagagcuuugaggacuagucccuguucccagagcccacuuuuuuuucuuuuuuugaaauaaaauagccugucuuucagaucuaaaaaaaaaaaaaaaaaaaaaaaaaaaaaaaaaaaaaaaaaaaaaaaaaaaaaaaaaaaaaaaaugcaucccccccccccccccccccccccccccccccaaaggcucuuuucagagccaccagaauu

SEQ ID NO: 10144 - RNA, 1452 nt, Artificial Sequence
  mRNA product Design a-1 comprising derived and/or modified sequence from HRSV(A2)__P03418.1__N (opt1)
gggagagucccgcagucggcguccagcggcucugcuuguucgugugugugucguugcaggccuuauucaagcuuaccauggcccugagcaaggugaagcucaacgacacccugaacaaggaccagcugcucuccagcuccaaguacaccauccagcgcagcaccggcgacuccaucgacacccccaacuacgacguccagaagcacaucaacaagcugugcgggaugcugcucaucaccgaggacgccaaccacaaguucaccggccugaucgggaugcuguacgcgaugagccggcucggccgcgaggacacgaucaagauccugcgggacgccggguaccacgugaaggccaacggcguggacgucaccacccaccgccaggacaucaacggcaaggagaugaaguucgaggugcugacccucgccucccugacgaccgagauccagaucaacaucgagaucgagagccggaaguccuacaagaagaugcugaaggagaugggggagguggccccggaguaccgccacgacagccccgacugcggcaugaucauccucugcaucgcggcccuggucaucaccaagcuggccgccggggaccgguccggccucaccgcggugauccgccgggccaacaacgugcugaagaacgagaugaagcgcuacaaggggcugcuccccaaggacaucgccaacagcuucuacgaggucuucgagaagcacccccacuucaucgacguguucgugcacuucggcaucgcccaguccagcacgcggggcgggucccgcgucgagggcaucuucgccgggcuguucaugaacgcguacggcgccggccaggugaugcugcgguggggcgugcucgccaagagcgucaagaacaucaugcuggggcacgccuccgugcaggccgagauggagcaggucguggagguguacgaguacgcgcagaagcucgggggcgaggccggguucuaccacauccugaacaacccgaaggccagccugcugucccucacccaguucccccacuucagcagcgugguccugggcaacgccgccggccuggggaucaugggcgaguaccgcgggacgccccggaaccaggaccucuacgacgcggccaaggccuacgccgagcagcugaaggagaacggcgugaucaacuacuccgugcuggaccucaccgccgaggagcuggaggcgaucaagcaccagcugaaccccaaggacaacgacgucgagcucugaggacuagucccuguucccagagcccacuuuuuuuucuuuuuuugaaauaaaauagccugucuuucagaucuaaaaaaaaaaaaaaaaaaaaaaaaaaaaaaaaaaaaaaaaaaaaaaaaaaaaaaaaaaaaaaaaugcaucccccccccccccccccccccccccccccccaaaggcucuuuucagagccaccagaauu

SEQ ID NO: 10145 - RNA, 1452 nt, Artificial Sequence
  mRNA product Design a-1 comprising derived and/or modified sequence from HRSV(A2)__P03418.1__N (opt2)
gggagagucccgcagucggcguccagcggcucugcuuguucgugugugugucguugcaggccuuauucaagcuuaccauggcccucuccaaggucaagcucaacgacacccucaacaaggaccagcuccucuccuccuccaaguacaccauccagcgcuccaccggcgacuccaucgacacccccaacuacgacguccagaagcacaucaacaagcucugcggcaugcuccucaucaccgaggacgccaaccacaaguucaccggccucaucggcaugcucuacgccaugucccgccucggccgcgaggacaccaucaagauccuccgcgacgccggcuaccacgucaaggccaacggcgucgacgucaccacccaccgccaggacaucaacggcaaggagaugaaguucgagguccucacccucgccucccucaccaccgagauccagaucaacaucgagaucgagucccgcaaguccuacaagaagaugcucaaggagaugggcgaggucgcccccgaguaccgccacgacucccccgacugcggcaugaucauccucugcaucgccgcccucgucaucaccaagcucgccgccggcgaccgcuccggccucaccgccgucauccgccgcgccaacaacguccucaagaacgagaugaagcgcuacaagggccuccuccccaaggacaucgccaacuccuucuacgaggucuucgagaagcacccccacuucaucgacgucuucguccacuucggcaucgcccaguccuccacccgcggcggcucccgcgucgagggcaucuucgccggccucuucaugaacgccuacggcgccggccaggucaugcuccgcuggggcguccucgccaaguccgucaagaacaucaugcucggccacgccuccguccaggccgagauggagcaggucgucgaggucuacgaguacgcccagaagcucggcggcgaggccggcuucuaccacauccucaacaaccccaaggccucccuccucucccucacccaguucccccacuucuccuccgucguccucggcaacgccgccggccucggcaucaugggcgaguaccgcggcaccccccgcaaccaggaccucuacgacgccgccaaggccuacgccgagcagcucaaggagaacggcgucaucaacuacuccguccucgaccucaccgccgaggagcucgaggccaucaagcaccagcucaaccccaaggacaacgacgucgagcucugaggacuagucccuguucccagagcccacuuuuuuuucuuuuuuugaaauaaaauagccugucuuucagaucuaaaaaaaaaaaaaaaaaaaaaaaaaaaaaaaaaaaaaaaaaaaaaaaaaaaaaaaaaaaaaaaaugcaucccccccccccccccccccccccccccccccaaaggcucuuuucagagccaccagaauu

SEQ ID NO: 10146 - RNA, 1452 nt, Artificial Sequence
  mRNA product Design a-1 comprising derived and/or modified sequence from HRSV(A2)__P03418.1__N (opt3)
gggagagucccgcagucggcguccagcggcucugcuuguucgugugugugucguugcaggccuuauucaagcuuaccauggcccugagcaaggugaaacucaacgacacccuuaauaaggaucagcuguuguccucuucaaaauacacaauccaaagaaguacuggcgacagcauugauacgcccaacuaugacguccagaagcacauaaauaaauuaugcgggaugcugcuaaucaccgaggaugcuaaccauaaguucacaggacucauugguaugcuguacgcaauguccaggcuuggccgggaagacacuaucaagauucugcgcgaugccggguaucacguuaaagcgaauggaguggacguaaccacacaucgacaggauaucaacggcaaggagaugaaauuugaaguguugacccucgcuucucugacuacagagauacagaucaauauugaaaucgagucgcguaagucauacaaaaagaugcugaaggagaugggugaagucgccccugaguauagacacgacagcccagauugugggaugauuauccucugcauagcagccuuagugauuaccaaacuggcugcaggagacaggaguggccuuacggccguuauccggcgcgcuaacaauguguugaagaacgaaaugaaaagauacaagggccugcuaccgaaagauauugccaauuccuucuaugaggucuuugagaagcauccccacuucaucgacguguuuguacacuucgggaucgcgcaaucuagcacuaggggagguucccggguugaaggcauuuuugcaggacucuucaugaacgccuacggggcuggccaggugaugcugcgcugggguguccuugccaaaucagugaagaauauaaugcuggggcaugcaagugugcaggcugagauggaacaggucguugagguguacgaauaugcccaaaaguugggaggcgaggcgggcuuuuaccacauccucaacaauccuaaagccagccuguuaucucugacccaguucccacauuuuuccucaguagugcucgggaacgcagcuggacuugguauuaugggcgaguaucgagggacacccagaaaccaggaccuguacgaugccgcuaaggccuaugcagaacaguugaaagagaauggagucaucaacuacagcgugcuagaccugacugccgaggaacucgaagcuauaaagcaccaacugaauccuaaagauaacgacguugagcuuugaggacuagucccuguucccagagcccacuuuuuuuucuuuuuuugaaauaaaauagccugucuuucagaucuaaaaaaaaaaaaaaaaaaaaaaaaaaaaaaaaaaaaaaaaaaaaaaaaaaaaaaaaaaaaaaaaugcaucccccccccccccccccccccccccccccccaaaggcucuuuucagagccaccagaauu

SEQ ID NO: 10147 - RNA, 1452 nt, Artificial Sequence
  mRNA product Design a-1 comprising derived and/or modified sequence from HRSV(A2)__P03418.1__N (opt4)
gggagagucccgcagucggcguccagcggcucugcuuguucgugugugugucguugcaggccuuauucaagcuuaccauggcccugagcaaggugaagcugaacgacacccugaacaaggaccagcugcugagcagcagcaaguacaccauccagagaagcaccggcgacagcaucgacacccccaacuacgacgugcagaagcacaucaacaagcugugcggcaugcugcugaucaccgaggacgccaaccacaaguucaccggccugaucggcaugcuguacgccaugagcagacugggcagagaggacaccaucaagauccugagagacgccggcuaccacgugaaggccaacggcguggacgugaccacccacagacaggacaucaacggcaaggagaugaaguucgaggugcugacccuggccagccugaccaccgagauccagaucaacaucgagaucgagagcagaaagagcuacaagaagaugcugaaggagaugggcgagguggcccccgaguacagacacgacagccccgacugcggcaugaucauccugugcaucgccgcccuggugaucaccaagcuggccgccggcgacagaagcggccugaccgccgugaucagaagagccaacaacgugcugaagaacgagaugaagagauacaagggccugcugcccaaggacaucgccaacagcuucuacgagguguucgagaagcacccccacuucaucgacguguucgugcacuucggcaucgcccagagcagcaccagaggcggcagcagaguggagggcaucuucgccggccuguucaugaacgccuacggcgccggccaggugaugcugagauggggcgugcuggccaagagcgugaagaacaucaugcugggccacgccagcgugcaggccgagauggagcaggugguggagguguacgaguacgcccagaagcugggcggcgaggccggcuucuaccacauccugaacaaccccaaggccagccugcugagccugacccaguucccccacuucagcagcguggugcugggcaacgccgccggccugggcaucaugggcgaguacagaggcacccccagaaaccaggaccuguacgacgccgccaaggccuacgccgagcagcugaaggagaacggcgugaucaacuacagcgugcuggaccugaccgccgaggagcuggaggccaucaagcaccagcugaaccccaaggacaacgacguggagcugugaggacuagucccuguucccagagcccacuuuuuuuucuuuuuuugaaauaaaauagccugucuuucagaucuaaaaaaaaaaaaaaaaaaaaaaaaaaaaaaaaaaaaaaaaaaaaaaaaaaaaaaaaaaaaaaaaugcaucccccccccccccccccccccccccccccccaaaggcucuuuucagagccaccagaauu

SEQ ID NO: 10148 - RNA, 1452 nt, Artificial Sequence
  mRNA product Design a-1 comprising derived and/or modified sequence from HRSV(A2)__P03418.1__N (opt5)
gggagagucccgcagucggcguccagcggcucugcuuguucgugugugugucguugcaggccuuauucaagcuuaccauggcccugagcaaggugaaacucaacgacacccugaauaaggaucagcuucuguccucuagcaaauacacaauccaaagauccacgggcgacucuauugauacccccaacuaugacguccagaagcacaucaauaaacucugcgggaugcugcuuauuacagaggaugcuaaccauaaguucaccggacugaucggcaugcucuacgccaugagccggcuggggcgcgaagacacaauuaagauccugagagaugcgggauaucacguuaaagcuaauggcguggacgugaccacacaucggcaggauaucaacgggaaggagaugaaauuugaaguccucacccuggccucccuuacgaccgagauucagaucaauauugaaaucgagucucgcaagagcuacaaaaagaugcugaaggagaugggagaaguggccccugaguauagacacgacuccccggauuguggcaugauuauccucugcauugcugcccugguuaucacaaaacuugcugccggcgaccggagcgggcugaccgcggugauccgcagagccaacaauguccucaagaacgaaaugaaacgguacaagggacugcugcccaaagauauugcuaauucuuucuaugagguguuugagaagcauccucacuucaucgacguuuuugugcacuucggcauugcccaauccagcacacgcgggggaucuagagucgaaggcaucuuugcuggacucuucaugaacgccuacggggcgggccaggugaugcugcgguggggcgugcuugccaaauccgucaagaauauuaugcuggggcaugcuagcguucaggccgagauggaacaggugguggaggucuacgaauaugcucaaaagcucggaggcgaggccggguuuuaccacauccugaacaaucccaaagccucucuucugucccucacccaguucccucauuuuagcuccgugguucugggaaacgcugcgggccuggggaucaugggagaguaucgcggcacgcccagaaaccaggaccucuacgaugccgcuaaggccuaugccgaacagcugaaagagaauggcgugauuaacuacucuguccuugaccugacagcugaggaacucgaagccaucaagcaccaacugaauccuaaagauaacgacguggagcuuugaggacuagucccuguucccagagcccacuuuuuuuucuuuuuuugaaauaaaauagccugucuuucagaucuaaaaaaaaaaaaaaaaaaaaaaaaaaaaaaaaaaaaaaaaaaaaaaaaaaaaaaaaaaaaaaaaugcaucccccccccccccccccccccccccccccccaaaggcucuuuucagagccaccagaauu

SEQ ID NO: 10149 - RNA, 1452 nt, Artificial Sequence
  mRNA product Design a-1 comprising derived and/or modified sequence from HRSV(A2)__P03418.1__N (opt6)
gggagagucccgcagucggcguccagcggcucugcuuguucgugugugugucguugcaggccuuauucaagcuuaccauggcacuaagcaaagucaaauuaaacgacacauuaaacaaagaccaacucuuaucaucaucaaaauacacaauacaaagaagcaccggagacaguaucgacacaccaaacuaugacguccaaaaacauauaaauaaauuaugcggcaugcucuuaaucacagaagacgccaaccauaaauuuacaggauuaauaggaauguuauaugcaaugucacgacuagguagagaagacacaauaaaaauacuaagagacgcaggcuaucacguaaaagcaaauggaguagacguaaccacacacagacaagacauaaauggaaaagaaaugaaauuugaaguauuaacacuagcaucacuaacaacagaaauacaaaucaacauagaaauagaaucaagaaaaagcuacaaaaaaauguuaaaagaaaugggagaagucgcaccagaauauagacaugauucaccagacugcggaaugauaauacuaugcauagcagcccuaguaauuacaaaacuagcagcaggagacagaagcggauuaacagcaguaauaagaagagcaaacaacguacuaaaaaacgaaaugaaaagauauaaaggauuauuaccaaaagacauagcaaacucauucuaugaaguauucgaaaaacacccccacuuuauagacgucuucguacacuucggaauagcccaaucauccacaagaggaggaucaagagucgaaggaauauucgcaggauuauucaugaacgcauauggcgcaggacaaguaaugcuaagauggggaguacuagcaaaauccgucaaaaacauaaugcuaggacacgcaucaguucaagcagaaauggaacaaguaguagaaguauacgaauacgcccaaaaacuaggaggagaagcaggauucuaccacauacuaaauaauccaaaagcaucacuacuaagccuaacccaauuuccccacuucucaaguguaguauuaggaaaugcagcuggacuaggaauaaugggagaauacagaggaacaccaagaaaccaagacuuauacgacgcagcaaaagcauacgcagagcaacuuaaagaaaacggaguaauaaacuauagcguacuagacuuaacagcagaagaacuggaagcaauaaaacaucaauuaaacccgaaagacaaugacguagaauuauaaggacuagucccuguucccagagcccacuuuuuuuucuuuuuuugaaauaaaauagccugucuuucagaucuaaaaaaaaaaaaaaaaaaaaaaaaaaaaaaaaaaaaaaaaaaaaaaaaaaaaaaaaaaaaaaaaugcaucccccccccccccccccccccccccccccccaaaggcucuuuucagagccaccagaauu

SEQ ID NO: 10150 - RNA, 1452 nt, Artificial Sequence
  mRNA product Design a-1 comprising derived and/or modified sequence from HRSV(A2)__P03418.1__N (opt11)
gggagagucccgcagucggcguccagcggcucugcuuguucgugugugugucguugcaggccuuauucaagcuuaccauggcacucucgaaaguaaaacucaacgacacccucaacaaagaccaacuccuuuccagcuccaaauacaccauccaacgauccaccggagacuccaucgacacgcccaacuacgacguccagaaacacaucaacaagcucugcggaaugcuacuaaucaccgaggacgccaaccacaaauucacaggacuuauagggaugcucuacgccaugucccgccucggacgcgaagacacaauaaaaauccuacgagacgccggcuaccacguaaaggcaaacggcgucgacgucaccacacacagacaagacaucaacggaaaggaaaugaaauucgaaguccucacccucgccagccuaaccaccgagauccaaaucaacaucgaaaucgaaucacgcaaauccuacaagaaaaugcucaaagaaaugggagaagucgcccccgaauaccgucacgacucgcccgacugcggcaugauaauccuaugcaucgccgcacucgucauaaccaaacucgccgccggugaccgaucaggacugacagcagucauccgccgagcaaacaacgugcucaaaaacgaaaugaaacgcuacaaaggccuacuccccaaagacaucgccaacuccuucuacgaagucuucgaaaaacacccacacuucaucgacgucuucguccacuucggcaucgcacaaucaucaaccagaggcggcagccgcguugaaggcaucuucgcaggacucuuuaugaacgccuacggcgccggccaagucaugcuccgcuggggcguccuggcaaaaagcgucaaaaacaucaugcuaggccacgcuagcguccaagccgaaauggaacaagucgucgaaguuuacgaguacgcacaaaaacucggcggcgaagcaggcuucuaccacauccuaaacaaccccaaagccucccugcuaucacucacccaauucccccacuucuccagcgucguccucggcaacgccgcaggacuaggcaucaugggagaauaccgcgggacaccgcgcaaccaagaccucuacgacgccgccaaagccuacgccgaacaacucaaagaaaacggcgucauaaacuacucaguccucgaccucaccgccgaagaacucgaagccaucaaacaccaacucaacccaaaagacaacgacgucgaauuauaaggacuagucccuguucccagagcccacuuuuuuuucuuuuuuugaaauaaaauagccugucuuucagaucuaaaaaaaaaaaaaaaaaaaaaaaaaaaaaaaaaaaaaaaaaaaaaaaaaaaaaaaaaaaaaaaaugcaucccccccccccccccccccccccccccccccaaaggcucuuuucagagccaccagaauu

SEQ ID NO: 10151 - RNA, 1471 nt, Artificial Sequence
  mRNA product Design a-2 comprising derived and/or modified sequence from HRSV(A2)__P03418.1__N (wt)
gggagaguccgcucagccagguugcagaagcggcuuagcguguguccuaaucuucucucugcguguagguaggccugugccgcaaacaagcuuaccauggcucuuagcaaagucaaguugaaugauacacucaacaaagaucaacuucugucauccagcaaauacaccauccaacggagcacaggagauaguauugauacuccuaauuaugaugugcagaaacacaucaauaaguuauguggcauguuauuaaucacagaagaugcuaaucauaaauucacuggguuaauagguauguuauaugcgaugucuagguuaggaagagaagacaccauaaaaauacucagagaugcgggauaucauguaaaagcaaauggaguagauguaacaacacaucgucaagacauuaauggaaaagaaaugaaauuugaaguguuaacauuggcaagcuuaacaacugaaauucaaaucaacauugagauagaaucuagaaaauccuacaaaaaaaugcuaaaagaaaugggagagguagcuccagaauacaggcaugacucuccugauugugggaugauaauauuauguauagcagcauuaguaauaacuaaauuagcagcaggggacagaucuggucuuacagccgugauuaggagagcuaauaauguccuaaaaaaugaaaugaaacguuacaaaggcuuacuacccaaggacauagccaacagcuucuaugaaguguuugaaaaacauccccacuuuauagauguuuuuguucauuuugguauagcacaaucuucuaccagagguggcaguagaguugaagggauuuuugcaggauuguuuaugaaugccuauggugcagggcaagugauguuacgguggggagucuuagcaaaaucaguuaaaaauauuauguuaggacaugcuagugugcaagcagaaauggaacaaguuguugagguuuaugaauaugcccaaaaauuggguggugaagcaggauucuaccauauauugaacaacccaaaagcaucauuauuaucuuugacucaauuuccucacuucuccaguguaguauuaggcaaugcugcuggccuaggcauaaugggagaguacagagguacaccgaggaaucaagaucuauaugaugcagcaaaggcauaugcugaacaacucaaagaaaauggugugauuaacuacaguguacuagacuugacagcagaagaacuagaggcuaucaaacaucagcuuaauccaaaagauaaugauguagagcuuugaggacuagucccuguucccagagcccacuuuuuuuucuuuuuuugaaauaaaauagccugucuuucagaucuaaaaaaaaaaaaaaaaaaaaaaaaaaaaaaaaaaaaaaaaaaaaaaaaaaaaaaaaaaaaaaaaugcaucccccccccccccccccccccccccccccccaaaggcucuuuucagagccaccagaauu

SEQ ID NO: 10152 - RNA, 1471 nt, Artificial Sequence
  mRNA product Design a-2 comprising derived and/or modified sequence from HRSV(A2)__P03418.1__N (opt1)
gggagaguccgcucagccagguugcagaagcggcuuagcguguguccuaaucuucucucugcguguagguaggccugugccgcaaacaagcuuaccauggcccugagcaaggugaagcucaacgacacccugaacaaggaccagcugcucuccagcuccaaguacaccauccagcgcagcaccggcgacuccaucgacacccccaacuacgacguccagaagcacaucaacaagcugugcgggaugcugcucaucaccgaggacgccaaccacaaguucaccggccugaucgggaugcuguacgcgaugagccggcucggccgcgaggacacgaucaagauccugcgggacgccggguaccacgugaaggccaacggcguggacgucaccacccaccgccaggacaucaacggcaaggagaugaaguucgaggugcugacccucgccucccugacgaccgagauccagaucaacaucgagaucgagagccggaaguccuacaagaagaugcugaaggagaugggggagguggccccggaguaccgccacgacagccccgacugcggcaugaucauccucugcaucgcggcccuggucaucaccaagcuggccgccggggaccgguccggccucaccgcggugauccgccgggccaacaacgugcugaagaacgagaugaagcgcuacaaggggcugcuccccaaggacaucgccaacagcuucuacgaggucuucgagaagcacccccacuucaucgacguguucgugcacuucggcaucgcccaguccagcacgcggggcgggucccgcgucgagggcaucuucgccgggcuguucaugaacgcguacggcgccggccaggugaugcugcgguggggcgugcucgccaagagcgucaagaacaucaugcuggggcacgccuccgugcaggccgagauggagcaggucguggagguguacgaguacgcgcagaagcucgggggcgaggccggguucuaccacauccugaacaacccgaaggccagccugcugucccucacccaguucccccacuucagcagcgugguccugggcaacgccgccggccuggggaucaugggcgaguaccgcgggacgccccggaaccaggaccucuacgacgcggccaaggccuacgccgagcagcugaaggagaacggcgugaucaacuacuccgugcuggaccucaccgccgaggagcuggaggcgaucaagcaccagcugaaccccaaggacaacgacgucgagcucugaggacuagucccuguucccagagcccacuuuuuuuucuuuuuuugaaauaaaauagccugucuuucagaucuaaaaaaaaaaaaaaaaaaaaaaaaaaaaaaaaaaaaaaaaaaaaaaaaaaaaaaaaaaaaaaaaugcaucccccccccccccccccccccccccccccccaaaggcucuuuucagagccaccagaauu

SEQ ID NO: 10153 - RNA, 1471 nt, Artificial Sequence
  mRNA product Design a-2 comprising derived and/or modified sequence from HRSV(A2)__P03418.1__N (opt2)
gggagaguccgcucagccagguugcagaagcggcuuagcguguguccuaaucuucucucugcguguagguaggccugugccgcaaacaagcuuaccauggcccucuccaaggucaagcucaacgacacccucaacaaggaccagcuccucuccuccuccaaguacaccauccagcgcuccaccggcgacuccaucgacacccccaacuacgacguccagaagcacaucaacaagcucugcggcaugcuccucaucaccgaggacgccaaccacaaguucaccggccucaucggcaugcucuacgccaugucccgccucggccgcgaggacaccaucaagauccuccgcgacgccggcuaccacgucaaggccaacggcgucgacgucaccacccaccgccaggacaucaacggcaaggagaugaaguucgagguccucacccucgccucccucaccaccgagauccagaucaacaucgagaucgagucccgcaaguccuacaagaagaugcucaaggagaugggcgaggucgcccccgaguaccgccacgacucccccgacugcggcaugaucauccucugcaucgccgcccucgucaucaccaagcucgccgccggcgaccgcuccggccucaccgccgucauccgccgcgccaacaacguccucaagaacgagaugaagcgcuacaagggccuccuccccaaggacaucgccaacuccuucuacgaggucuucgagaagcacccccacuucaucgacgucuucguccacuucggcaucgcccaguccuccacccgcggcggcucccgcgucgagggcaucuucgccggccucuucaugaacgccuacggcgccggccaggucaugcuccgcuggggcguccucgccaaguccgucaagaacaucaugcucggccacgccuccguccaggccgagauggagcaggucgucgaggucuacgaguacgcccagaagcucggcggcgaggccggcuucuaccacauccucaacaaccccaaggccucccuccucucccucacccaguucccccacuucuccuccgucguccucggcaacgccgccggccucggcaucaugggcgaguaccgcggcaccccccgcaaccaggaccucuacgacgccgccaaggccuacgccgagcagcucaaggagaacggcgucaucaacuacuccguccucgaccucaccgccgaggagcucgaggccaucaagcaccagcucaaccccaaggacaacgacgucgagcucugaggacuagucccuguucccagagcccacuuuuuuuucuuuuuuugaaauaaaauagccugucuuucagaucuaaaaaaaaaaaaaaaaaaaaaaaaaaaaaaaaaaaaaaaaaaaaaaaaaaaaaaaaaaaaaaaaugcaucccccccccccccccccccccccccccccccaaaggcucuuuucagagccaccagaauu

SEQ ID NO: 10154 - RNA, 1471 nt, Artificial Sequence
  mRNA product Design a-2 comprising derived and/or modified sequence from HRSV(A2)__P03418.1__N (opt3)
gggagaguccgcucagccagguugcagaagcggcuuagcguguguccuaaucuucucucugcguguagguaggccugugccgcaaacaagcuuaccauggcccugagcaaggugaaacucaacgacacccuuaauaaggaucagcuguuguccucuucaaaauacacaauccaaagaaguacuggcgacagcauugauacgcccaacuaugacguccagaagcacauaaauaaauuaugcgggaugcugcuaaucaccgaggaugcuaaccauaaguucacaggacucauugguaugcuguacgcaauguccaggcuuggccgggaagacacuaucaagauucugcgcgaugccggguaucacguuaaagcgaauggaguggacguaaccacacaucgacaggauaucaacggcaaggagaugaaauuugaaguguugacccucgcuucucugacuacagagauacagaucaauauugaaaucgagucgcguaagucauacaaaaagaugcugaaggagaugggugaagucgccccugaguauagacacgacagcccagauugugggaugauuauccucugcauagcagccuuagugauuaccaaacuggcugcaggagacaggaguggccuuacggccguuauccggcgcgcuaacaauguguugaagaacgaaaugaaaagauacaagggccugcuaccgaaagauauugccaauuccuucuaugaggucuuugagaagcauccccacuucaucgacguguuuguacacuucgggaucgcgcaaucuagcacuaggggagguucccggguugaaggcauuuuugcaggacucuucaugaacgccuacggggcuggccaggugaugcugcgcugggguguccuugccaaaucagugaagaauauaaugcuggggcaugcaagugugcaggcugagauggaacaggucguugagguguacgaauaugcccaaaaguugggaggcgaggcgggcuuuuaccacauccucaacaauccuaaagccagccuguuaucucugacccaguucccacauuuuuccucaguagugcucgggaacgcagcuggacuugguauuaugggcgaguaucgagggacacccagaaaccaggaccuguacgaugccgcuaaggccuaugcagaacaguugaaagagaauggagucaucaacuacagcgugcuagaccugacugccgaggaacucgaagcuauaaagcaccaacugaauccuaaagauaacgacguugagcuuugaggacuagucccuguucccagagcccacuuuuuuuucuuuuuuugaaauaaaauagccugucuuucagaucuaaaaaaaaaaaaaaaaaaaaaaaaaaaaaaaaaaaaaaaaaaaaaaaaaaaaaaaaaaaaaaaaugcaucccccccccccccccccccccccccccccccaaaggcucuuuucagagccaccagaauu

SEQ ID NO: 10155 - RNA, 1471 nt, Artificial Sequence
  mRNA product Design a-2 comprising derived and/or modified sequence from HRSV(A2)__P03418.1__N (opt4)
gggagaguccgcucagccagguugcagaagcggcuuagcguguguccuaaucuucucucugcguguagguaggccugugccgcaaacaagcuuaccauggcccugagcaaggugaagcugaacgacacccugaacaaggaccagcugcugagcagcagcaaguacaccauccagagaagcaccggcgacagcaucgacacccccaacuacgacgugcagaagcacaucaacaagcugugcggcaugcugcugaucaccgaggacgccaaccacaaguucaccggccugaucggcaugcuguacgccaugagcagacugggcagagaggacaccaucaagauccugagagacgccggcuaccacgugaaggccaacggcguggacgugaccacccacagacaggacaucaacggcaaggagaugaaguucgaggugcugacccuggccagccugaccaccgagauccagaucaacaucgagaucgagagcagaaagagcuacaagaagaugcugaaggagaugggcgagguggcccccgaguacagacacgacagccccgacugcggcaugaucauccugugcaucgccgcccuggugaucaccaagcuggccgccggcgacagaagcggccugaccgccgugaucagaagagccaacaacgugcugaagaacgagaugaagagauacaagggccugcugcccaaggacaucgccaacagcuucuacgagguguucgagaagcacccccacuucaucgacguguucgugcacuucggcaucgcccagagcagcaccagaggcggcagcagaguggagggcaucuucgccggccuguucaugaacgccuacggcgccggccaggugaugcugagauggggcgugcuggccaagagcgugaagaacaucaugcugggccacgccagcgugcaggccgagauggagcaggugguggagguguacgaguacgcccagaagcugggcggcgaggccggcuucuaccacauccugaacaaccccaaggccagccugcugagccugacccaguucccccacuucagcagcguggugcugggcaacgccgccggccugggcaucaugggcgaguacagaggcacccccagaaaccaggaccuguacgacgccgccaaggccuacgccgagcagcugaaggagaacggcgugaucaacuacagcgugcuggaccugaccgccgaggagcuggaggccaucaagcaccagcugaaccccaaggacaacgacguggagcugugaggacuagucccuguucccagagcccacuuuuuuuucuuuuuuugaaauaaaauagccugucuuucagaucuaaaaaaaaaaaaaaaaaaaaaaaaaaaaaaaaaaaaaaaaaaaaaaaaaaaaaaaaaaaaaaaaugcaucccccccccccccccccccccccccccccccaaaggcucuuuucagagccaccagaauu

SEQ ID NO: 10156 - RNA, 1471 nt, Artificial Sequence
  mRNA product Design a-2 comprising derived and/or modified sequence from HRSV(A2)__P03418.1__N (opt5)
gggagaguccgcucagccagguugcagaagcggcuuagcguguguccuaaucuucucucugcguguagguaggccugugccgcaaacaagcuuaccauggcccugagcaaggugaaacucaacgacacccugaauaaggaucagcuucuguccucuagcaaauacacaauccaaagauccacgggcgacucuauugauacccccaacuaugacguccagaagcacaucaauaaacucugcgggaugcugcuuauuacagaggaugcuaaccauaaguucaccggacugaucggcaugcucuacgccaugagccggcuggggcgcgaagacacaauuaagauccugagagaugcgggauaucacguuaaagcuaauggcguggacgugaccacacaucggcaggauaucaacgggaaggagaugaaauuugaaguccucacccuggccucccuuacgaccgagauucagaucaauauugaaaucgagucucgcaagagcuacaaaaagaugcugaaggagaugggagaaguggccccugaguauagacacgacuccccggauuguggcaugauuauccucugcauugcugcccugguuaucacaaaacuugcugccggcgaccggagcgggcugaccgcggugauccgcagagccaacaauguccucaagaacgaaaugaaacgguacaagggacugcugcccaaagauauugcuaauucuuucuaugagguguuugagaagcauccucacuucaucgacguuuuugugcacuucggcauugcccaauccagcacacgcgggggaucuagagucgaaggcaucuuugcuggacucuucaugaacgccuacggggcgggccaggugaugcugcgguggggcgugcuugccaaauccgucaagaauauuaugcuggggcaugcuagcguucaggccgagauggaacaggugguggaggucuacgaauaugcucaaaagcucggaggcgaggccggguuuuaccacauccugaacaaucccaaagccucucuucugucccucacccaguucccucauuuuagcuccgugguucugggaaacgcugcgggccuggggaucaugggagaguaucgcggcacgcccagaaaccaggaccucuacgaugccgcuaaggccuaugccgaacagcugaaagagaauggcgugauuaacuacucuguccuugaccugacagcugaggaacucgaagccaucaagcaccaacugaauccuaaagauaacgacguggagcuuugaggacuagucccuguucccagagcccacuuuuuuuucuuuuuuugaaauaaaauagccugucuuucagaucuaaaaaaaaaaaaaaaaaaaaaaaaaaaaaaaaaaaaaaaaaaaaaaaaaaaaaaaaaaaaaaaaugcaucccccccccccccccccccccccccccccccaaaggcucuuuucagagccaccagaauu

SEQ ID NO: 10157 - RNA, 1471 nt, Artificial Sequence
  mRNA product Design a-2 comprising derived and/or modified sequence from HRSV(A2)__P03418.1__N (opt6)
gggagaguccgcucagccagguugcagaagcggcuuagcguguguccuaaucuucucucugcguguagguaggccugugccgcaaacaagcuuaccauggcacuaagcaaagucaaauuaaacgacacauuaaacaaagaccaacucuuaucaucaucaaaauacacaauacaaagaagcaccggagacaguaucgacacaccaaacuaugacguccaaaaacauauaaauaaauuaugcggcaugcucuuaaucacagaagacgccaaccauaaauuuacaggauuaauaggaauguuauaugcaaugucacgacuagguagagaagacacaauaaaaauacuaagagacgcaggcuaucacguaaaagcaaauggaguagacguaaccacacacagacaagacauaaauggaaaagaaaugaaauuugaaguauuaacacuagcaucacuaacaacagaaauacaaaucaacauagaaauagaaucaagaaaaagcuacaaaaaaauguuaaaagaaaugggagaagucgcaccagaauauagacaugauucaccagacugcggaaugauaauacuaugcauagcagcccuaguaauuacaaaacuagcagcaggagacagaagcggauuaacagcaguaauaagaagagcaaacaacguacuaaaaaacgaaaugaaaagauauaaaggauuauuaccaaaagacauagcaaacucauucuaugaaguauucgaaaaacacccccacuuuauagacgucuucguacacuucggaauagcccaaucauccacaagaggaggaucaagagucgaaggaauauucgcaggauuauucaugaacgcauauggcgcaggacaaguaaugcuaagauggggaguacuagcaaaauccgucaaaaacauaaugcuaggacacgcaucaguucaagcagaaauggaacaaguaguagaaguauacgaauacgcccaaaaacuaggaggagaagcaggauucuaccacauacuaaauaauccaaaagcaucacuacuaagccuaacccaauuuccccacuucucaaguguaguauuaggaaaugcagcuggacuaggaauaaugggagaauacagaggaacaccaagaaaccaagacuuauacgacgcagcaaaagcauacgcagagcaacuuaaagaaaacggaguaauaaacuauagcguacuagacuuaacagcagaagaacuggaagcaauaaaacaucaauuaaacccgaaagacaaugacguagaauuauaaggacuagucccuguucccagagcccacuuuuuuuucuuuuuuugaaauaaaauagccugucuuucagaucuaaaaaaaaaaaaaaaaaaaaaaaaaaaaaaaaaaaaaaaaaaaaaaaaaaaaaaaaaaaaaaaaugcaucccccccccccccccccccccccccccccccaaaggcucuuuucagagccaccagaauu

SEQ ID NO: 10158 - RNA, 1471 nt, Artificial Sequence
  mRNA product Design a-2 comprising derived and/or modified sequence from HRSV(A2)__P03418.1__N (opt11)
gggagaguccgcucagccagguugcagaagcggcuuagcguguguccuaaucuucucucugcguguagguaggccugugccgcaaacaagcuuaccauggcacucucgaaaguaaaacucaacgacacccucaacaaagaccaacuccuuuccagcuccaaauacaccauccaacgauccaccggagacuccaucgacacgcccaacuacgacguccagaaacacaucaacaagcucugcggaaugcuacuaaucaccgaggacgccaaccacaaauucacaggacuuauagggaugcucuacgccaugucccgccucggacgcgaagacacaauaaaaauccuacgagacgccggcuaccacguaaaggcaaacggcgucgacgucaccacacacagacaagacaucaacggaaaggaaaugaaauucgaaguccucacccucgccagccuaaccaccgagauccaaaucaacaucgaaaucgaaucacgcaaauccuacaagaaaaugcucaaagaaaugggagaagucgcccccgaauaccgucacgacucgcccgacugcggcaugauaauccuaugcaucgccgcacucgucauaaccaaacucgccgccggugaccgaucaggacugacagcagucauccgccgagcaaacaacgugcucaaaaacgaaaugaaacgcuacaaaggccuacuccccaaagacaucgccaacuccuucuacgaagucuucgaaaaacacccacacuucaucgacgucuucguccacuucggcaucgcacaaucaucaaccagaggcggcagccgcguugaaggcaucuucgcaggacucuuuaugaacgccuacggcgccggccaagucaugcuccgcuggggcguccuggcaaaaagcgucaaaaacaucaugcuaggccacgcuagcguccaagccgaaauggaacaagucgucgaaguuuacgaguacgcacaaaaacucggcggcgaagcaggcuucuaccacauccuaaacaaccccaaagccucccugcuaucacucacccaauucccccacuucuccagcgucguccucggcaacgccgcaggacuaggcaucaugggagaauaccgcgggacaccgcgcaaccaagaccucuacgacgccgccaaagccuacgccgaacaacucaaagaaaacggcgucauaaacuacucaguccucgaccucaccgccgaagaacucgaagccaucaaacaccaacucaacccaaaagacaacgacgucgaauuauaaggacuagucccuguucccagagcccacuuuuuuuucuuuuuuugaaauaaaauagccugucuuucagaucuaaaaaaaaaaaaaaaaaaaaaaaaaaaaaaaaaaaaaaaaaaaaaaaaaaaaaaaaaaaaaaaaugcaucccccccccccccccccccccccccccccccaaaggcucuuuucagagccaccagaauu

SEQ ID NO: 10159 - RNA, 1549 nt, Artificial Sequence
  mRNA product Design a-3 comprising derived and/or modified sequence from HRSV(A2)__P03418.1__N (wt)
gggagagggcgcuuggcuugcaaggacccugagcugcggcauugaagcacacccaacccaacucgacugaagucagccucacugaaccggaucugagaaucuucucucucugggcuugccagggcucuccgaaccuagcuagcauccucuucaauuccaacuagaaagcuuaccauggcucuuagcaaagucaaguugaaugauacacucaacaaagaucaacuucugucauccagcaaauacaccauccaacggagcacaggagauaguauugauacuccuaauuaugaugugcagaaacacaucaauaaguuauguggcauguuauuaaucacagaagaugcuaaucauaaauucacuggguuaauagguauguuauaugcgaugucuagguuaggaagagaagacaccauaaaaauacucagagaugcgggauaucauguaaaagcaaauggaguagauguaacaacacaucgucaagacauuaauggaaaagaaaugaaauuugaaguguuaacauuggcaagcuuaacaacugaaauucaaaucaacauugagauagaaucuagaaaauccuacaaaaaaaugcuaaaagaaaugggagagguagcuccagaauacaggcaugacucuccugauugugggaugauaauauuauguauagcagcauuaguaauaacuaaauuagcagcaggggacagaucuggucuuacagccgugauuaggagagcuaauaauguccuaaaaaaugaaaugaaacguuacaaaggcuuacuacccaaggacauagccaacagcuucuaugaaguguuugaaaaacauccccacuuuauagauguuuuuguucauuuugguauagcacaaucuucuaccagagguggcaguagaguugaagggauuuuugcaggauuguuuaugaaugccuauggugcagggcaagugauguuacgguggggagucuuagcaaaaucaguuaaaaauauuauguuaggacaugcuagugugcaagcagaaauggaacaaguuguugagguuuaugaauaugcccaaaaauuggguggugaagcaggauucuaccauauauugaacaacccaaaagcaucauuauuaucuuugacucaauuuccucacuucuccaguguaguauuaggcaaugcugcuggccuaggcauaaugggagaguacagagguacaccgaggaaucaagaucuauaugaugcagcaaaggcauaugcugaacaacucaaagaaaauggugugauuaacuacaguguacuagacuugacagcagaagaacuagaggcuaucaaacaucagcuuaauccaaaagauaaugauguagagcuuugaggacuagucccuguucccagagcccacuuuuuuuucuuuuuuugaaauaaaauagccugucuuucagaucuaaaaaaaaaaaaaaaaaaaaaaaaaaaaaaaaaaaaaaaaaaaaaaaaaaaaaaaaaaaaaaaaugcaucccccccccccccccccccccccccccccccaaaggcucuuuucagagccaccagaauu

SEQ ID NO: 10160 - RNA, 1549 nt, Artificial Sequence
  mRNA product Design a-3 comprising derived and/or modified sequence from HRSV(A2)__P03418.1__N (opt1)
gggagagggcgcuuggcuugcaaggacccugagcugcggcauugaagcacacccaacccaacucgacugaagucagccucacugaaccggaucugagaaucuucucucucugggcuugccagggcucuccgaaccuagcuagcauccucuucaauuccaacuagaaagcuuaccauggcccugagcaaggugaagcucaacgacacccugaacaaggaccagcugcucuccagcuccaaguacaccauccagcgcagcaccggcgacuccaucgacacccccaacuacgacguccagaagcacaucaacaagcugugcgggaugcugcucaucaccgaggacgccaaccacaaguucaccggccugaucgggaugcuguacgcgaugagccggcucggccgcgaggacacgaucaagauccugcgggacgccggguaccacgugaaggccaacggcguggacgucaccacccaccgccaggacaucaacggcaaggagaugaaguucgaggugcugacccucgccucccugacgaccgagauccagaucaacaucgagaucgagagccggaaguccuacaagaagaugcugaaggagaugggggagguggccccggaguaccgccacgacagccccgacugcggcaugaucauccucugcaucgcggcccuggucaucaccaagcuggccgccggggaccgguccggccucaccgcggugauccgccgggccaacaacgugcugaagaacgagaugaagcgcuacaaggggcugcuccccaaggacaucgccaacagcuucuacgaggucuucgagaagcacccccacuucaucgacguguucgugcacuucggcaucgcccaguccagcacgcggggcgggucccgcgucgagggcaucuucgccgggcuguucaugaacgcguacggcgccggccaggugaugcugcgguggggcgugcucgccaagagcgucaagaacaucaugcuggggcacgccuccgugcaggccgagauggagcaggucguggagguguacgaguacgcgcagaagcucgggggcgaggccggguucuaccacauccugaacaacccgaaggccagccugcugucccucacccaguucccccacuucagcagcgugguccugggcaacgccgccggccuggggaucaugggcgaguaccgcgggacgccccggaaccaggaccucuacgacgcggccaaggccuacgccgagcagcugaaggagaacggcgugaucaacuacuccgugcuggaccucaccgccgaggagcuggaggcgaucaagcaccagcugaaccccaaggacaacgacgucgagcucugaggacuagucccuguucccagagcccacuuuuuuuucuuuuuuugaaauaaaauagccugucuuucagaucuaaaaaaaaaaaaaaaaaaaaaaaaaaaaaaaaaaaaaaaaaaaaaaaaaaaaaaaaaaaaaaaaugcaucccccccccccccccccccccccccccccccaaaggcucuuuucagagccaccagaauu

SEQ ID NO: 10161 - RNA, 1549 nt, Artificial Sequence
  mRNA product Design a-3 comprising derived and/or modified sequence from HRSV(A2)__P03418.1__N (opt2)
gggagagggcgcuuggcuugcaaggacccugagcugcggcauugaagcacacccaacccaacucgacugaagucagccucacugaaccggaucugagaaucuucucucucugggcuugccagggcucuccgaaccuagcuagcauccucuucaauuccaacuagaaagcuuaccauggcccucuccaaggucaagcucaacgacacccucaacaaggaccagcuccucuccuccuccaaguacaccauccagcgcuccaccggcgacuccaucgacacccccaacuacgacguccagaagcacaucaacaagcucugcggcaugcuccucaucaccgaggacgccaaccacaaguucaccggccucaucggcaugcucuacgccaugucccgccucggccgcgaggacaccaucaagauccuccgcgacgccggcuaccacgucaaggccaacggcgucgacgucaccacccaccgccaggacaucaacggcaaggagaugaaguucgagguccucacccucgccucccucaccaccgagauccagaucaacaucgagaucgagucccgcaaguccuacaagaagaugcucaaggagaugggcgaggucgcccccgaguaccgccacgacucccccgacugcggcaugaucauccucugcaucgccgcccucgucaucaccaagcucgccgccggcgaccgcuccggccucaccgccgucauccgccgcgccaacaacguccucaagaacgagaugaagcgcuacaagggccuccuccccaaggacaucgccaacuccuucuacgaggucuucgagaagcacccccacuucaucgacgucuucguccacuucggcaucgcccaguccuccacccgcggcggcucccgcgucgagggcaucuucgccggccucuucaugaacgccuacggcgccggccaggucaugcuccgcuggggcguccucgccaaguccgucaagaacaucaugcucggccacgccuccguccaggccgagauggagcaggucgucgaggucuacgaguacgcccagaagcucggcggcgaggccggcuucuaccacauccucaacaaccccaaggccucccuccucucccucacccaguucccccacuucuccuccgucguccucggcaacgccgccggccucggcaucaugggcgaguaccgcggcaccccccgcaaccaggaccucuacgacgccgccaaggccuacgccgagcagcucaaggagaacggcgucaucaacuacuccguccucgaccucaccgccgaggagcucgaggccaucaagcaccagcucaaccccaaggacaacgacgucgagcucugaggacuagucccuguucccagagcccacuuuuuuuucuuuuuuugaaauaaaauagccugucuuucagaucuaaaaaaaaaaaaaaaaaaaaaaaaaaaaaaaaaaaaaaaaaaaaaaaaaaaaaaaaaaaaaaaaugcaucccccccccccccccccccccccccccccccaaaggcucuuuucagagccaccagaauu

SEQ ID NO: 10162 - RNA, 1549 nt, Artificial Sequence
  mRNA product Design a-3 comprising derived and/or modified sequence from HRSV(A2)__P03418.1__N (opt3)
gggagagggcgcuuggcuugcaaggacccugagcugcggcauugaagcacacccaacccaacucgacugaagucagccucacugaaccggaucugagaaucuucucucucugggcuugccagggcucuccgaaccuagcuagcauccucuucaauuccaacuagaaagcuuaccauggcccugagcaaggugaaacucaacgacacccuuaauaaggaucagcuguuguccucuucaaaauacacaauccaaagaaguacuggcgacagcauugauacgcccaacuaugacguccagaagcacauaaauaaauuaugcgggaugcugcuaaucaccgaggaugcuaaccauaaguucacaggacucauugguaugcuguacgcaauguccaggcuuggccgggaagacacuaucaagauucugcgcgaugccggguaucacguuaaagcgaauggaguggacguaaccacacaucgacaggauaucaacggcaaggagaugaaauuugaaguguugacccucgcuucucugacuacagagauacagaucaauauugaaaucgagucgcguaagucauacaaaaagaugcugaaggagaugggugaagucgccccugaguauagacacgacagcccagauugugggaugauuauccucugcauagcagccuuagugauuaccaaacuggcugcaggagacaggaguggccuuacggccguuauccggcgcgcuaacaauguguugaagaacgaaaugaaaagauacaagggccugcuaccgaaagauauugccaauuccuucuaugaggucuuugagaagcauccccacuucaucgacguguuuguacacuucgggaucgcgcaaucuagcacuaggggagguucccggguugaaggcauuuuugcaggacucuucaugaacgccuacggggcuggccaggugaugcugcgcugggguguccuugccaaaucagugaagaauauaaugcuggggcaugcaagugugcaggcugagauggaacaggucguugagguguacgaauaugcccaaaaguugggaggcgaggcgggcuuuuaccacauccucaacaauccuaaagccagccuguuaucucugacccaguucccacauuuuuccucaguagugcucgggaacgcagcuggacuugguauuaugggcgaguaucgagggacacccagaaaccaggaccuguacgaugccgcuaaggccuaugcagaacaguugaaagagaauggagucaucaacuacagcgugcuagaccugacugccgaggaacucgaagcuauaaagcaccaacugaauccuaaagauaacgacguugagcuuugaggacuagucccuguucccagagcccacuuuuuuuucuuuuuuugaaauaaaauagccugucuuucagaucuaaaaaaaaaaaaaaaaaaaaaaaaaaaaaaaaaaaaaaaaaaaaaaaaaaaaaaaaaaaaaaaaugcaucccccccccccccccccccccccccccccccaaaggcucuuuucagagccaccagaauu

SEQ ID NO: 10163 - RNA, 1549 nt, Artificial Sequence
  mRNA product Design a-3 comprising derived and/or modified sequence from HRSV(A2)__P03418.1__N (opt4)
gggagagggcgcuuggcuugcaaggacccugagcugcggcauugaagcacacccaacccaacucgacugaagucagccucacugaaccggaucugagaaucuucucucucugggcuugccagggcucuccgaaccuagcuagcauccucuucaauuccaacuagaaagcuuaccauggcccugagcaaggugaagcugaacgacacccugaacaaggaccagcugcugagcagcagcaaguacaccauccagagaagcaccggcgacagcaucgacacccccaacuacgacgugcagaagcacaucaacaagcugugcggcaugcugcugaucaccgaggacgccaaccacaaguucaccggccugaucggcaugcuguacgccaugagcagacugggcagagaggacaccaucaagauccugagagacgccggcuaccacgugaaggccaacggcguggacgugaccacccacagacaggacaucaacggcaaggagaugaaguucgaggugcugacccuggccagccugaccaccgagauccagaucaacaucgagaucgagagcagaaagagcuacaagaagaugcugaaggagaugggcgagguggcccccgaguacagacacgacagccccgacugcggcaugaucauccugugcaucgccgcccuggugaucaccaagcuggccgccggcgacagaagcggccugaccgccgugaucagaagagccaacaacgugcugaagaacgagaugaagagauacaagggccugcugcccaaggacaucgccaacagcuucuacgagguguucgagaagcacccccacuucaucgacguguucgugcacuucggcaucgcccagagcagcaccagaggcggcagcagaguggagggcaucuucgccggccuguucaugaacgccuacggcgccggccaggugaugcugagauggggcgugcuggccaagagcgugaagaacaucaugcugggccacgccagcgugcaggccgagauggagcaggugguggagguguacgaguacgcccagaagcugggcggcgaggccggcuucuaccacauccugaacaaccccaaggccagccugcugagccugacccaguucccccacuucagcagcguggugcugggcaacgccgccggccugggcaucaugggcgaguacagaggcacccccagaaaccaggaccuguacgacgccgccaaggccuacgccgagcagcugaaggagaacggcgugaucaacuacagcgugcuggaccugaccgccgaggagcuggaggccaucaagcaccagcugaaccccaaggacaacgacguggagcugugaggacuagucccuguucccagagcccacuuuuuuuucuuuuuuugaaauaaaauagccugucuuucagaucuaaaaaaaaaaaaaaaaaaaaaaaaaaaaaaaaaaaaaaaaaaaaaaaaaaaaaaaaaaaaaaaaugcaucccccccccccccccccccccccccccccccaaaggcucuuuucagagccaccagaauu

SEQ ID NO: 10164 - RNA, 1549 nt, Artificial Sequence
  mRNA product Design a-3 comprising derived and/or modified sequence from HRSV(A2)__P03418.1__N (opt5)
gggagagggcgcuuggcuugcaaggacccugagcugcggcauugaagcacacccaacccaacucgacugaagucagccucacugaaccggaucugagaaucuucucucucugggcuugccagggcucuccgaaccuagcuagcauccucuucaauuccaacuagaaagcuuaccauggcccugagcaaggugaaacucaacgacacccugaauaaggaucagcuucuguccucuagcaaauacacaauccaaagauccacgggcgacucuauugauacccccaacuaugacguccagaagcacaucaauaaacucugcgggaugcugcuuauuacagaggaugcuaaccauaaguucaccggacugaucggcaugcucuacgccaugagccggcuggggcgcgaagacacaauuaagauccugagagaugcgggauaucacguuaaagcuaauggcguggacgugaccacacaucggcaggauaucaacgggaaggagaugaaauuugaaguccucacccuggccucccuuacgaccgagauucagaucaauauugaaaucgagucucgcaagagcuacaaaaagaugcugaaggagaugggagaaguggccccugaguauagacacgacuccccggauuguggcaugauuauccucugcauugcugcccugguuaucacaaaacuugcugccggcgaccggagcgggcugaccgcggugauccgcagagccaacaauguccucaagaacgaaaugaaacgguacaagggacugcugcccaaagauauugcuaauucuuucuaugagguguuugagaagcauccucacuucaucgacguuuuugugcacuucggcauugcccaauccagcacacgcgggggaucuagagucgaaggcaucuuugcuggacucuucaugaacgccuacggggcgggccaggugaugcugcgguggggcgugcuugccaaauccgucaagaauauuaugcuggggcaugcuagcguucaggccgagauggaacaggugguggaggucuacgaauaugcucaaaagcucggaggcgaggccggguuuuaccacauccugaacaaucccaaagccucucuucugucccucacccaguucccucauuuuagcuccgugguucugggaaacgcugcgggccuggggaucaugggagaguaucgcggcacgcccagaaaccaggaccucuacgaugccgcuaaggccuaugccgaacagcugaaagagaauggcgugauuaacuacucuguccuugaccugacagcugaggaacucgaagccaucaagcaccaacugaauccuaaagauaacgacguggagcuuugaggacuagucccuguucccagagcccacuuuuuuuucuuuuuuugaaauaaaauagccugucuuucagaucuaaaaaaaaaaaaaaaaaaaaaaaaaaaaaaaaaaaaaaaaaaaaaaaaaaaaaaaaaaaaaaaaugcaucccccccccccccccccccccccccccccccaaaggcucuuuucagagccaccagaauu

SEQ ID NO: 10165 - RNA, 1549 nt, Artificial Sequence
  mRNA product Design a-3 comprising derived and/or modified sequence from HRSV(A2)__P03418.1__N (opt6)
gggagagggcgcuuggcuugcaaggacccugagcugcggcauugaagcacacccaacccaacucgacugaagucagccucacugaaccggaucugagaaucuucucucucugggcuugccagggcucuccgaaccuagcuagcauccucuucaauuccaacuagaaagcuuaccauggcacuaagcaaagucaaauuaaacgacacauuaaacaaagaccaacucuuaucaucaucaaaauacacaauacaaagaagcaccggagacaguaucgacacaccaaacuaugacguccaaaaacauauaaauaaauuaugcggcaugcucuuaaucacagaagacgccaaccauaaauuuacaggauuaauaggaauguuauaugcaaugucacgacuagguagagaagacacaauaaaaauacuaagagacgcaggcuaucacguaaaagcaaauggaguagacguaaccacacacagacaagacauaaauggaaaagaaaugaaauuugaaguauuaacacuagcaucacuaacaacagaaauacaaaucaacauagaaauagaaucaagaaaaagcuacaaaaaaauguuaaaagaaaugggagaagucgcaccagaauauagacaugauucaccagacugcggaaugauaauacuaugcauagcagcccuaguaauuacaaaacuagcagcaggagacagaagcggauuaacagcaguaauaagaagagcaaacaacguacuaaaaaacgaaaugaaaagauauaaaggauuauuaccaaaagacauagcaaacucauucuaugaaguauucgaaaaacacccccacuuuauagacgucuucguacacuucggaauagcccaaucauccacaagaggaggaucaagagucgaaggaauauucgcaggauuauucaugaacgcauauggcgcaggacaaguaaugcuaagauggggaguacuagcaaaauccgucaaaaacauaaugcuaggacacgcaucaguucaagcagaaauggaacaaguaguagaaguauacgaauacgcccaaaaacuaggaggagaagcaggauucuaccacauacuaaauaauccaaaagcaucacuacuaagccuaacccaauuuccccacuucucaaguguaguauuaggaaaugcagcuggacuaggaauaaugggagaauacagaggaacaccaagaaaccaagacuuauacgacgcagcaaaagcauacgcagagcaacuuaaagaaaacggaguaauaaacuauagcguacuagacuuaacagcagaagaacuggaagcaauaaaacaucaauuaaacccgaaagacaaugacguagaauuauaaggacuagucccuguucccagagcccacuuuuuuuucuuuuuuugaaauaaaauagccugucuuucagaucuaaaaaaaaaaaaaaaaaaaaaaaaaaaaaaaaaaaaaaaaaaaaaaaaaaaaaaaaaaaaaaaaugcaucccccccccccccccccccccccccccccccaaaggcucuuuucagagccaccagaauu

SEQ ID NO: 10166 - RNA, 1549 nt, Artificial Sequence
  mRNA product Design a-3 comprising derived and/or modified sequence from HRSV(A2)__P03418.1__N (opt11)
gggagagggcgcuuggcuugcaaggacccugagcugcggcauugaagcacacccaacccaacucgacugaagucagccucacugaaccggaucugagaaucuucucucucugggcuugccagggcucuccgaaccuagcuagcauccucuucaauuccaacuagaaagcuuaccauggcacucucgaaaguaaaacucaacgacacccucaacaaagaccaacuccuuuccagcuccaaauacaccauccaacgauccaccggagacuccaucgacacgcccaacuacgacguccagaaacacaucaacaagcucugcggaaugcuacuaaucaccgaggacgccaaccacaaauucacaggacuuauagggaugcucuacgccaugucccgccucggacgcgaagacacaauaaaaauccuacgagacgccggcuaccacguaaaggcaaacggcgucgacgucaccacacacagacaagacaucaacggaaaggaaaugaaauucgaaguccucacccucgccagccuaaccaccgagauccaaaucaacaucgaaaucgaaucacgcaaauccuacaagaaaaugcucaaagaaaugggagaagucgcccccgaauaccgucacgacucgcccgacugcggcaugauaauccuaugcaucgccgcacucgucauaaccaaacucgccgccggugaccgaucaggacugacagcagucauccgccgagcaaacaacgugcucaaaaacgaaaugaaacgcuacaaaggccuacuccccaaagacaucgccaacuccuucuacgaagucuucgaaaaacacccacacuucaucgacgucuucguccacuucggcaucgcacaaucaucaaccagaggcggcagccgcguugaaggcaucuucgcaggacucuuuaugaacgccuacggcgccggccaagucaugcuccgcuggggcguccuggcaaaaagcgucaaaaacaucaugcuaggccacgcuagcguccaagccgaaauggaacaagucgucgaaguuuacgaguacgcacaaaaacucggcggcgaagcaggcuucuaccacauccuaaacaaccccaaagccucccugcuaucacucacccaauucccccacuucuccagcgucguccucggcaacgccgcaggacuaggcaucaugggagaauaccgcgggacaccgcgcaaccaagaccucuacgacgccgccaaagccuacgccgaacaacucaaagaaaacggcgucauaaacuacucaguccucgaccucaccgccgaagaacucgaagccaucaaacaccaacucaacccaaaagacaacgacgucgaauuauaaggacuagucccuguucccagagcccacuuuuuuuucuuuuuuugaaauaaaauagccugucuuucagaucuaaaaaaaaaaaaaaaaaaaaaaaaaaaaaaaaaaaaaaaaaaaaaaaaaaaaaaaaaaaaaaaaugcaucccccccccccccccccccccccccccccccaaaggcucuuuucagagccaccagaauu

SEQ ID NO: 10167 - RNA, 1498 nt, Artificial Sequence
  mRNA product Design a-4 comprising derived and/or modified sequence from HRSV(A2)__P03418.1__N (wt)
gggagacuccugucgggcggaaguaggaggaguagaguuuaaaaacaguacucuuuuuccgguucgggacguaguugaagcaacgacaagccggauaaccgcucuugagacaggaagcuuaccauggcucuuagcaaagucaaguugaaugauacacucaacaaagaucaacuucugucauccagcaaauacaccauccaacggagcacaggagauaguauugauacuccuaauuaugaugugcagaaacacaucaauaaguuauguggcauguuauuaaucacagaagaugcuaaucauaaauucacuggguuaauagguauguuauaugcgaugucuagguuaggaagagaagacaccauaaaaauacucagagaugcgggauaucauguaaaagcaaauggaguagauguaacaacacaucgucaagacauuaauggaaaagaaaugaaauuugaaguguuaacauuggcaagcuuaacaacugaaauucaaaucaacauugagauagaaucuagaaaauccuacaaaaaaaugcuaaaagaaaugggagagguagcuccagaauacaggcaugacucuccugauugugggaugauaauauuauguauagcagcauuaguaauaacuaaauuagcagcaggggacagaucuggucuuacagccgugauuaggagagcuaauaauguccuaaaaaaugaaaugaaacguuacaaaggcuuacuacccaaggacauagccaacagcuucuaugaaguguuugaaaaacauccccacuuuauagauguuuuuguucauuuugguauagcacaaucuucuaccagagguggcaguagaguugaagggauuuuugcaggauuguuuaugaaugccuauggugcagggcaagugauguuacgguggggagucuuagcaaaaucaguuaaaaauauuauguuaggacaugcuagugugcaagcagaaauggaacaaguuguugagguuuaugaauaugcccaaaaauuggguggugaagcaggauucuaccauauauugaacaacccaaaagcaucauuauuaucuuugacucaauuuccucacuucuccaguguaguauuaggcaaugcugcuggccuaggcauaaugggagaguacagagguacaccgaggaaucaagaucuauaugaugcagcaaaggcauaugcugaacaacucaaagaaaauggugugauuaacuacaguguacuagacuugacagcagaagaacuagaggcuaucaaacaucagcuuaauccaaaagauaaugauguagagcuuugaggacuagucccuguucccagagcccacuuuuuuuucuuuuuuugaaauaaaauagccugucuuucagaucuaaaaaaaaaaaaaaaaaaaaaaaaaaaaaaaaaaaaaaaaaaaaaaaaaaaaaaaaaaaaaaaaugcaucccccccccccccccccccccccccccccccaaaggcucuuuucagagccaccagaauu

SEQ ID NO: 10168 - RNA, 1498 nt, Artificial Sequence
  mRNA product Design a-4 comprising derived and/or modified sequence from HRSV(A2)__P03418.1__N (opt1)
gggagacuccugucgggcggaaguaggaggaguagaguuuaaaaacaguacucuuuuuccgguucgggacguaguugaagcaacgacaagccggauaaccgcucuugagacaggaagcuuaccauggcccugagcaaggugaagcucaacgacacccugaacaaggaccagcugcucuccagcuccaaguacaccauccagcgcagcaccggcgacuccaucgacacccccaacuacgacguccagaagcacaucaacaagcugugcgggaugcugcucaucaccgaggacgccaaccacaaguucaccggccugaucgggaugcuguacgcgaugagccggcucggccgcgaggacacgaucaagauccugcgggacgccggguaccacgugaaggccaacggcguggacgucaccacccaccgccaggacaucaacggcaaggagaugaaguucgaggugcugacccucgccucccugacgaccgagauccagaucaacaucgagaucgagagccggaaguccuacaagaagaugcugaaggagaugggggagguggccccggaguaccgccacgacagccccgacugcggcaugaucauccucugcaucgcggcccuggucaucaccaagcuggccgccggggaccgguccggccucaccgcggugauccgccgggccaacaacgugcugaagaacgagaugaagcgcuacaaggggcugcuccccaaggacaucgccaacagcuucuacgaggucuucgagaagcacccccacuucaucgacguguucgugcacuucggcaucgcccaguccagcacgcggggcgggucccgcgucgagggcaucuucgccgggcuguucaugaacgcguacggcgccggccaggugaugcugcgguggggcgugcucgccaagagcgucaagaacaucaugcuggggcacgccuccgugcaggccgagauggagcaggucguggagguguacgaguacgcgcagaagcucgggggcgaggccggguucuaccacauccugaacaacccgaaggccagccugcugucccucacccaguucccccacuucagcagcgugguccugggcaacgccgccggccuggggaucaugggcgaguaccgcgggacgccccggaaccaggaccucuacgacgcggccaaggccuacgccgagcagcugaaggagaacggcgugaucaacuacuccgugcuggaccucaccgccgaggagcuggaggcgaucaagcaccagcugaaccccaaggacaacgacgucgagcucugaggacuagucccuguucccagagcccacuuuuuuuucuuuuuuugaaauaaaauagccugucuuucagaucuaaaaaaaaaaaaaaaaaaaaaaaaaaaaaaaaaaaaaaaaaaaaaaaaaaaaaaaaaaaaaaaaugcaucccccccccccccccccccccccccccccccaaaggcucuuuucagagccaccagaauu

SEQ ID NO: 10169 - RNA, 1498 nt, Artificial Sequence
  mRNA product Design a-4 comprising derived and/or modified sequence from HRSV(A2)__P03418.1__N (opt2)
gggagacuccugucgggcggaaguaggaggaguagaguuuaaaaacaguacucuuuuuccgguucgggacguaguugaagcaacgacaagccggauaaccgcucuugagacaggaagcuuaccauggcccucuccaaggucaagcucaacgacacccucaacaaggaccagcuccucuccuccuccaaguacaccauccagcgcuccaccggcgacuccaucgacacccccaacuacgacguccagaagcacaucaacaagcucugcggcaugcuccucaucaccgaggacgccaaccacaaguucaccggccucaucggcaugcucuacgccaugucccgccucggccgcgaggacaccaucaagauccuccgcgacgccggcuaccacgucaaggccaacggcgucgacgucaccacccaccgccaggacaucaacggcaaggagaugaaguucgagguccucacccucgccucccucaccaccgagauccagaucaacaucgagaucgagucccgcaaguccuacaagaagaugcucaaggagaugggcgaggucgcccccgaguaccgccacgacucccccgacugcggcaugaucauccucugcaucgccgcccucgucaucaccaagcucgccgccggcgaccgcuccggccucaccgccgucauccgccgcgccaacaacguccucaagaacgagaugaagcgcuacaagggccuccuccccaaggacaucgccaacuccuucuacgaggucuucgagaagcacccccacuucaucgacgucuucguccacuucggcaucgcccaguccuccacccgcggcggcucccgcgucgagggcaucuucgccggccucuucaugaacgccuacggcgccggccaggucaugcuccgcuggggcguccucgccaaguccgucaagaacaucaugcucggccacgccuccguccaggccgagauggagcaggucgucgaggucuacgaguacgcccagaagcucggcggcgaggccggcuucuaccacauccucaacaaccccaaggccucccuccucucccucacccaguucccccacuucuccuccgucguccucggcaacgccgccggccucggcaucaugggcgaguaccgcggcaccccccgcaaccaggaccucuacgacgccgccaaggccuacgccgagcagcucaaggagaacggcgucaucaacuacuccguccucgaccucaccgccgaggagcucgaggccaucaagcaccagcucaaccccaaggacaacgacgucgagcucugaggacuagucccuguucccagagcccacuuuuuuuucuuuuuuugaaauaaaauagccugucuuucagaucuaaaaaaaaaaaaaaaaaaaaaaaaaaaaaaaaaaaaaaaaaaaaaaaaaaaaaaaaaaaaaaaaugcaucccccccccccccccccccccccccccccccaaaggcucuuuucagagccaccagaauu

SEQ ID NO: 10170 - RNA, 1498 nt, Artificial Sequence
  mRNA product Design a-4 comprising derived and/or modified sequence from HRSV(A2)__P03418.1__N (opt3)
gggagacuccugucgggcggaaguaggaggaguagaguuuaaaaacaguacucuuuuuccgguucgggacguaguugaagcaacgacaagccggauaaccgcucuugagacaggaagcuuaccauggcccugagcaaggugaaacucaacgacacccuuaauaaggaucagcuguuguccucuucaaaauacacaauccaaagaaguacuggcgacagcauugauacgcccaacuaugacguccagaagcacauaaauaaauuaugcgggaugcugcuaaucaccgaggaugcuaaccauaaguucacaggacucauugguaugcuguacgcaauguccaggcuuggccgggaagacacuaucaagauucugcgcgaugccggguaucacguuaaagcgaauggaguggacguaaccacacaucgacaggauaucaacggcaaggagaugaaauuugaaguguugacccucgcuucucugacuacagagauacagaucaauauugaaaucgagucgcguaagucauacaaaaagaugcugaaggagaugggugaagucgccccugaguauagacacgacagcccagauugugggaugauuauccucugcauagcagccuuagugauuaccaaacuggcugcaggagacaggaguggccuuacggccguuauccggcgcgcuaacaauguguugaagaacgaaaugaaaagauacaagggccugcuaccgaaagauauugccaauuccuucuaugaggucuuugagaagcauccccacuucaucgacguguuuguacacuucgggaucgcgcaaucuagcacuaggggagguucccggguugaaggcauuuuugcaggacucuucaugaacgccuacggggcuggccaggugaugcugcgcugggguguccuugccaaaucagugaagaauauaaugcuggggcaugcaagugugcaggcugagauggaacaggucguugagguguacgaauaugcccaaaaguugggaggcgaggcgggcuuuuaccacauccucaacaauccuaaagccagccuguuaucucugacccaguucccacauuuuuccucaguagugcucgggaacgcagcuggacuugguauuaugggcgaguaucgagggacacccagaaaccaggaccuguacgaugccgcuaaggccuaugcagaacaguugaaagagaauggagucaucaacuacagcgugcuagaccugacugccgaggaacucgaagcuauaaagcaccaacugaauccuaaagauaacgacguugagcuuugaggacuagucccuguucccagagcccacuuuuuuuucuuuuuuugaaauaaaauagccugucuuucagaucuaaaaaaaaaaaaaaaaaaaaaaaaaaaaaaaaaaaaaaaaaaaaaaaaaaaaaaaaaaaaaaaaugcaucccccccccccccccccccccccccccccccaaaggcucuuuucagagccaccagaauu

SEQ ID NO: 10171 - RNA, 1498 nt, Artificial Sequence
  mRNA product Design a-4 comprising derived and/or modified sequence from HRSV(A2)__P03418.1__N (opt4)
gggagacuccugucgggcggaaguaggaggaguagaguuuaaaaacaguacucuuuuuccgguucgggacguaguugaagcaacgacaagccggauaaccgcucuugagacaggaagcuuaccauggcccugagcaaggugaagcugaacgacacccugaacaaggaccagcugcugagcagcagcaaguacaccauccagagaagcaccggcgacagcaucgacacccccaacuacgacgugcagaagcacaucaacaagcugugcggcaugcugcugaucaccgaggacgccaaccacaaguucaccggccugaucggcaugcuguacgccaugagcagacugggcagagaggacaccaucaagauccugagagacgccggcuaccacgugaaggccaacggcguggacgugaccacccacagacaggacaucaacggcaaggagaugaaguucgaggugcugacccuggccagccugaccaccgagauccagaucaacaucgagaucgagagcagaaagagcuacaagaagaugcugaaggagaugggcgagguggcccccgaguacagacacgacagccccgacugcggcaugaucauccugugcaucgccgcccuggugaucaccaagcuggccgccggcgacagaagcggccugaccgccgugaucagaagagccaacaacgugcugaagaacgagaugaagagauacaagggccugcugcccaaggacaucgccaacagcuucuacgagguguucgagaagcacccccacuucaucgacguguucgugcacuucggcaucgcccagagcagcaccagaggcggcagcagaguggagggcaucuucgccggccuguucaugaacgccuacggcgccggccaggugaugcugagauggggcgugcuggccaagagcgugaagaacaucaugcugggccacgccagcgugcaggccgagauggagcaggugguggagguguacgaguacgcccagaagcugggcggcgaggccggcuucuaccacauccugaacaaccccaaggccagccugcugagccugacccaguucccccacuucagcagcguggugcugggcaacgccgccggccugggcaucaugggcgaguacagaggcacccccagaaaccaggaccuguacgacgccgccaaggccuacgccgagcagcugaaggagaacggcgugaucaacuacagcgugcuggaccugaccgccgaggagcuggaggccaucaagcaccagcugaaccccaaggacaacgacguggagcugugaggacuagucccuguucccagagcccacuuuuuuuucuuuuuuugaaauaaaauagccugucuuucagaucuaaaaaaaaaaaaaaaaaaaaaaaaaaaaaaaaaaaaaaaaaaaaaaaaaaaaaaaaaaaaaaaaugcaucccccccccccccccccccccccccccccccaaaggcucuuuucagagccaccagaauu

SEQ ID NO: 10172 - RNA, 1498 nt, Artificial Sequence
  mRNA product Design a-4 comprising derived and/or modified sequence from HRSV(A2)__P03418.1__N (opt5)
gggagacuccugucgggcggaaguaggaggaguagaguuuaaaaacaguacucuuuuuccgguucgggacguaguugaagcaacgacaagccggauaaccgcucuugagacaggaagcuuaccauggcccugagcaaggugaaacucaacgacacccugaauaaggaucagcuucuguccucuagcaaauacacaauccaaagauccacgggcgacucuauugauacccccaacuaugacguccagaagcacaucaauaaacucugcgggaugcugcuuauuacagaggaugcuaaccauaaguucaccggacugaucggcaugcucuacgccaugagccggcuggggcgcgaagacacaauuaagauccugagagaugcgggauaucacguuaaagcuaauggcguggacgugaccacacaucggcaggauaucaacgggaaggagaugaaauuugaaguccucacccuggccucccuuacgaccgagauucagaucaauauugaaaucgagucucgcaagagcuacaaaaagaugcugaaggagaugggagaaguggccccugaguauagacacgacuccccggauuguggcaugauuauccucugcauugcugcccugguuaucacaaaacuugcugccggcgaccggagcgggcugaccgcggugauccgcagagccaacaauguccucaagaacgaaaugaaacgguacaagggacugcugcccaaagauauugcuaauucuuucuaugagguguuugagaagcauccucacuucaucgacguuuuugugcacuucggcauugcccaauccagcacacgcgggggaucuagagucgaaggcaucuuugcuggacucuucaugaacgccuacggggcgggccaggugaugcugcgguggggcgugcuugccaaauccgucaagaauauuaugcuggggcaugcuagcguucaggccgagauggaacaggugguggaggucuacgaauaugcucaaaagcucggaggcgaggccggguuuuaccacauccugaacaaucccaaagccucucuucugucccucacccaguucccucauuuuagcuccgugguucugggaaacgcugcgggccuggggaucaugggagaguaucgcggcacgcccagaaaccaggaccucuacgaugccgcuaaggccuaugccgaacagcugaaagagaauggcgugauuaacuacucuguccuugaccugacagcugaggaacucgaagccaucaagcaccaacugaauccuaaagauaacgacguggagcuuugaggacuagucccuguucccagagcccacuuuuuuuucuuuuuuugaaauaaaauagccugucuuucagaucuaaaaaaaaaaaaaaaaaaaaaaaaaaaaaaaaaaaaaaaaaaaaaaaaaaaaaaaaaaaaaaaaugcaucccccccccccccccccccccccccccccccaaaggcucuuuucagagccaccagaauu

SEQ ID NO: 10173 - RNA, 1498 nt, Artificial Sequence
  mRNA product Design a-4 comprising derived and/or modified sequence from HRSV(A2)__P03418.1__N (opt6)
gggagacuccugucgggcggaaguaggaggaguagaguuuaaaaacaguacucuuuuuccgguucgggacguaguugaagcaacgacaagccggauaaccgcucuugagacaggaagcuuaccauggcacuaagcaaagucaaauuaaacgacacauuaaacaaagaccaacucuuaucaucaucaaaauacacaauacaaagaagcaccggagacaguaucgacacaccaaacuaugacguccaaaaacauauaaauaaauuaugcggcaugcucuuaaucacagaagacgccaaccauaaauuuacaggauuaauaggaauguuauaugcaaugucacgacuagguagagaagacacaauaaaaauacuaagagacgcaggcuaucacguaaaagcaaauggaguagacguaaccacacacagacaagacauaaauggaaaagaaaugaaauuugaaguauuaacacuagcaucacuaacaacagaaauacaaaucaacauagaaauagaaucaagaaaaagcuacaaaaaaauguuaaaagaaaugggagaagucgcaccagaauauagacaugauucaccagacugcggaaugauaauacuaugcauagcagcccuaguaauuacaaaacuagcagcaggagacagaagcggauuaacagcaguaauaagaagagcaaacaacguacuaaaaaacgaaaugaaaagauauaaaggauuauuaccaaaagacauagcaaacucauucuaugaaguauucgaaaaacacccccacuuuauagacgucuucguacacuucggaauagcccaaucauccacaagaggaggaucaagagucgaaggaauauucgcaggauuauucaugaacgcauauggcgcaggacaaguaaugcuaagauggggaguacuagcaaaauccgucaaaaacauaaugcuaggacacgcaucaguucaagcagaaauggaacaaguaguagaaguauacgaauacgcccaaaaacuaggaggagaagcaggauucuaccacauacuaaauaauccaaaagcaucacuacuaagccuaacccaauuuccccacuucucaaguguaguauuaggaaaugcagcuggacuaggaauaaugggagaauacagaggaacaccaagaaaccaagacuuauacgacgcagcaaaagcauacgcagagcaacuuaaagaaaacggaguaauaaacuauagcguacuagacuuaacagcagaagaacuggaagcaauaaaacaucaauuaaacccgaaagacaaugacguagaauuauaaggacuagucccuguucccagagcccacuuuuuuuucuuuuuuugaaauaaaauagccugucuuucagaucuaaaaaaaaaaaaaaaaaaaaaaaaaaaaaaaaaaaaaaaaaaaaaaaaaaaaaaaaaaaaaaaaugcaucccccccccccccccccccccccccccccccaaaggcucuuuucagagccaccagaauu

SEQ ID NO: 10174 - RNA, 1498 nt, Artificial Sequence
  mRNA product Design a-4 comprising derived and/or modified sequence from HRSV(A2)__P03418.1__N (opt11)
gggagacuccugucgggcggaaguaggaggaguagaguuuaaaaacaguacucuuuuuccgguucgggacguaguugaagcaacgacaagccggauaaccgcucuugagacaggaagcuuaccauggcacucucgaaaguaaaacucaacgacacccucaacaaagaccaacuccuuuccagcuccaaauacaccauccaacgauccaccggagacuccaucgacacgcccaacuacgacguccagaaacacaucaacaagcucugcggaaugcuacuaaucaccgaggacgccaaccacaaauucacaggacuuauagggaugcucuacgccaugucccgccucggacgcgaagacacaauaaaaauccuacgagacgccggcuaccacguaaaggcaaacggcgucgacgucaccacacacagacaagacaucaacggaaaggaaaugaaauucgaaguccucacccucgccagccuaaccaccgagauccaaaucaacaucgaaaucgaaucacgcaaauccuacaagaaaaugcucaaagaaaugggagaagucgcccccgaauaccgucacgacucgcccgacugcggcaugauaauccuaugcaucgccgcacucgucauaaccaaacucgccgccggugaccgaucaggacugacagcagucauccgccgagcaaacaacgugcucaaaaacgaaaugaaacgcuacaaaggccuacuccccaaagacaucgccaacuccuucuacgaagucuucgaaaaacacccacacuucaucgacgucuucguccacuucggcaucgcacaaucaucaaccagaggcggcagccgcguugaaggcaucuucgcaggacucuuuaugaacgccuacggcgccggccaagucaugcuccgcuggggcguccuggcaaaaagcgucaaaaacaucaugcuaggccacgcuagcguccaagccgaaauggaacaagucgucgaaguuuacgaguacgcacaaaaacucggcggcgaagcaggcuucuaccacauccuaaacaaccccaaagccucccugcuaucacucacccaauucccccacuucuccagcgucguccucggcaacgccgcaggacuaggcaucaugggagaauaccgcgggacaccgcgcaaccaagaccucuacgacgccgccaaagccuacgccgaacaacucaaagaaaacggcgucauaaacuacucaguccucgaccucaccgccgaagaacucgaagccaucaaacaccaacucaacccaaaagacaacgacgucgaauuauaaggacuagucccuguucccagagcccacuuuuuuuucuuuuuuugaaauaaaauagccugucuuucagaucuaaaaaaaaaaaaaaaaaaaaaaaaaaaaaaaaaaaaaaaaaaaaaaaaaaaaaaaaaaaaaaaaugcaucccccccccccccccccccccccccccccccaaaggcucuuuucagagccaccagaauu

SEQ ID NO: 10175 - RNA, 1444 nt, Artificial Sequence
  mRNA product Design a-5 comprising derived and/or modified sequence from HRSV(A2)__P03418.1__N (wt)
gggagacuuucccauucuguagcagaauuugguguugccuguggucuuggucccgcggagaagcuuaccauggcucuuagcaaagucaaguugaaugauacacucaacaaagaucaacuucugucauccagcaaauacaccauccaacggagcacaggagauaguauugauacuccuaauuaugaugugcagaaacacaucaauaaguuauguggcauguuauuaaucacagaagaugcuaaucauaaauucacuggguuaauagguauguuauaugcgaugucuagguuaggaagagaagacaccauaaaaauacucagagaugcgggauaucauguaaaagcaaauggaguagauguaacaacacaucgucaagacauuaauggaaaagaaaugaaauuugaaguguuaacauuggcaagcuuaacaacugaaauucaaaucaacauugagauagaaucuagaaaauccuacaaaaaaaugcuaaaagaaaugggagagguagcuccagaauacaggcaugacucuccugauugugggaugauaauauuauguauagcagcauuaguaauaacuaaauuagcagcaggggacagaucuggucuuacagccgugauuaggagagcuaauaauguccuaaaaaaugaaaugaaacguuacaaaggcuuacuacccaaggacauagccaacagcuucuaugaaguguuugaaaaacauccccacuuuauagauguuuuuguucauuuugguauagcacaaucuucuaccagagguggcaguagaguugaagggauuuuugcaggauuguuuaugaaugccuauggugcagggcaagugauguuacgguggggagucuuagcaaaaucaguuaaaaauauuauguuaggacaugcuagugugcaagcagaaauggaacaaguuguugagguuuaugaauaugcccaaaaauuggguggugaagcaggauucuaccauauauugaacaacccaaaagcaucauuauuaucuuugacucaauuuccucacuucuccaguguaguauuaggcaaugcugcuggccuaggcauaaugggagaguacagagguacaccgaggaaucaagaucuauaugaugcagcaaaggcauaugcugaacaacucaaagaaaauggugugauuaacuacaguguacuagacuugacagcagaagaacuagaggcuaucaaacaucagcuuaauccaaaagauaaugauguagagcuuugaggacuagucccuguucccagagcccacuuuuuuuucuuuuuuugaaauaaaauagccugucuuucagaucuaaaaaaaaaaaaaaaaaaaaaaaaaaaaaaaaaaaaaaaaaaaaaaaaaaaaaaaaaaaaaaaaugcaucccccccccccccccccccccccccccccccaaaggcucuuuucagagccaccagaauu

SEQ ID NO: 10176 - RNA, 1444 nt, Artificial Sequence
  mRNA product Design a-5 comprising derived and/or modified sequence from HRSV(A2)__P03418.1__N (opt1)
gggagacuuucccauucuguagcagaauuugguguugccuguggucuuggucccgcggagaagcuuaccauggcccugagcaaggugaagcucaacgacacccugaacaaggaccagcugcucuccagcuccaaguacaccauccagcgcagcaccggcgacuccaucgacacccccaacuacgacguccagaagcacaucaacaagcugugcgggaugcugcucaucaccgaggacgccaaccacaaguucaccggccugaucgggaugcuguacgcgaugagccggcucggccgcgaggacacgaucaagauccugcgggacgccggguaccacgugaaggccaacggcguggacgucaccacccaccgccaggacaucaacggcaaggagaugaaguucgaggugcugacccucgccucccugacgaccgagauccagaucaacaucgagaucgagagccggaaguccuacaagaagaugcugaaggagaugggggagguggccccggaguaccgccacgacagccccgacugcggcaugaucauccucugcaucgcggcccuggucaucaccaagcuggccgccggggaccgguccggccucaccgcggugauccgccgggccaacaacgugcugaagaacgagaugaagcgcuacaaggggcugcuccccaaggacaucgccaacagcuucuacgaggucuucgagaagcacccccacuucaucgacguguucgugcacuucggcaucgcccaguccagcacgcggggcgggucccgcgucgagggcaucuucgccgggcuguucaugaacgcguacggcgccggccaggugaugcugcgguggggcgugcucgccaagagcgucaagaacaucaugcuggggcacgccuccgugcaggccgagauggagcaggucguggagguguacgaguacgcgcagaagcucgggggcgaggccggguucuaccacauccugaacaacccgaaggccagccugcugucccucacccaguucccccacuucagcagcgugguccugggcaacgccgccggccuggggaucaugggcgaguaccgcgggacgccccggaaccaggaccucuacgacgcggccaaggccuacgccgagcagcugaaggagaacggcgugaucaacuacuccgugcuggaccucaccgccgaggagcuggaggcgaucaagcaccagcugaaccccaaggacaacgacgucgagcucugaggacuagucccuguucccagagcccacuuuuuuuucuuuuuuugaaauaaaauagccugucuuucagaucuaaaaaaaaaaaaaaaaaaaaaaaaaaaaaaaaaaaaaaaaaaaaaaaaaaaaaaaaaaaaaaaaugcaucccccccccccccccccccccccccccccccaaaggcucuuuucagagccaccagaauu

SEQ ID NO: 10177 - RNA, 1444 nt, Artificial Sequence
  mRNA product Design a-5 comprising derived and/or modified sequence from HRSV(A2)__P03418.1__N (opt2)
gggagacuuucccauucuguagcagaauuugguguugccuguggucuuggucccgcggagaagcuuaccauggcccucuccaaggucaagcucaacgacacccucaacaaggaccagcuccucuccuccuccaaguacaccauccagcgcuccaccggcgacuccaucgacacccccaacuacgacguccagaagcacaucaacaagcucugcggcaugcuccucaucaccgaggacgccaaccacaaguucaccggccucaucggcaugcucuacgccaugucccgccucggccgcgaggacaccaucaagauccuccgcgacgccggcuaccacgucaaggccaacggcgucgacgucaccacccaccgccaggacaucaacggcaaggagaugaaguucgagguccucacccucgccucccucaccaccgagauccagaucaacaucgagaucgagucccgcaaguccuacaagaagaugcucaaggagaugggcgaggucgcccccgaguaccgccacgacucccccgacugcggcaugaucauccucugcaucgccgcccucgucaucaccaagcucgccgccggcgaccgcuccggccucaccgccgucauccgccgcgccaacaacguccucaagaacgagaugaagcgcuacaagggccuccuccccaaggacaucgccaacuccuucuacgaggucuucgagaagcacccccacuucaucgacgucuucguccacuucggcaucgcccaguccuccacccgcggcggcucccgcgucgagggcaucuucgccggccucuucaugaacgccuacggcgccggccaggucaugcuccgcuggggcguccucgccaaguccgucaagaacaucaugcucggccacgccuccguccaggccgagauggagcaggucgucgaggucuacgaguacgcccagaagcucggcggcgaggccggcuucuaccacauccucaacaaccccaaggccucccuccucucccucacccaguucccccacuucuccuccgucguccucggcaacgccgccggccucggcaucaugggcgaguaccgcggcaccccccgcaaccaggaccucuacgacgccgccaaggccuacgccgagcagcucaaggagaacggcgucaucaacuacuccguccucgaccucaccgccgaggagcucgaggccaucaagcaccagcucaaccccaaggacaacgacgucgagcucugaggacuagucccuguucccagagcccacuuuuuuuucuuuuuuugaaauaaaauagccugucuuucagaucuaaaaaaaaaaaaaaaaaaaaaaaaaaaaaaaaaaaaaaaaaaaaaaaaaaaaaaaaaaaaaaaaugcaucccccccccccccccccccccccccccccccaaaggcucuuuucagagccaccagaauu

SEQ ID NO: 10178 - RNA, 1444 nt, Artificial Sequence
  mRNA product Design a-5 comprising derived and/or modified sequence from HRSV(A2)__P03418.1__N (opt3)
gggagacuuucccauucuguagcagaauuugguguugccuguggucuuggucccgcggagaagcuuaccauggcccugagcaaggugaaacucaacgacacccuuaauaaggaucagcuguuguccucuucaaaauacacaauccaaagaaguacuggcgacagcauugauacgcccaacuaugacguccagaagcacauaaauaaauuaugcgggaugcugcuaaucaccgaggaugcuaaccauaaguucacaggacucauugguaugcuguacgcaauguccaggcuuggccgggaagacacuaucaagauucugcgcgaugccggguaucacguuaaagcgaauggaguggacguaaccacacaucgacaggauaucaacggcaaggagaugaaauuugaaguguugacccucgcuucucugacuacagagauacagaucaauauugaaaucgagucgcguaagucauacaaaaagaugcugaaggagaugggugaagucgccccugaguauagacacgacagcccagauugugggaugauuauccucugcauagcagccuuagugauuaccaaacuggcugcaggagacaggaguggccuuacggccguuauccggcgcgcuaacaauguguugaagaacgaaaugaaaagauacaagggccugcuaccgaaagauauugccaauuccuucuaugaggucuuugagaagcauccccacuucaucgacguguuuguacacuucgggaucgcgcaaucuagcacuaggggagguucccggguugaaggcauuuuugcaggacucuucaugaacgccuacggggcuggccaggugaugcugcgcugggguguccuugccaaaucagugaagaauauaaugcuggggcaugcaagugugcaggcugagauggaacaggucguugagguguacgaauaugcccaaaaguugggaggcgaggcgggcuuuuaccacauccucaacaauccuaaagccagccuguuaucucugacccaguucccacauuuuuccucaguagugcucgggaacgcagcuggacuugguauuaugggcgaguaucgagggacacccagaaaccaggaccuguacgaugccgcuaaggccuaugcagaacaguugaaagagaauggagucaucaacuacagcgugcuagaccugacugccgaggaacucgaagcuauaaagcaccaacugaauccuaaagauaacgacguugagcuuugaggacuagucccuguucccagagcccacuuuuuuuucuuuuuuugaaauaaaauagccugucuuucagaucuaaaaaaaaaaaaaaaaaaaaaaaaaaaaaaaaaaaaaaaaaaaaaaaaaaaaaaaaaaaaaaaaugcaucccccccccccccccccccccccccccccccaaaggcucuuuucagagccaccagaauu

SEQ ID NO: 10179 - RNA, 1444 nt, Artificial Sequence
  mRNA product Design a-5 comprising derived and/or modified sequence from HRSV(A2)__P03418.1__N (opt4)
gggagacuuucccauucuguagcagaauuugguguugccuguggucuuggucccgcggagaagcuuaccauggcccugagcaaggugaagcugaacgacacccugaacaaggaccagcugcugagcagcagcaaguacaccauccagagaagcaccggcgacagcaucgacacccccaacuacgacgugcagaagcacaucaacaagcugugcggcaugcugcugaucaccgaggacgccaaccacaaguucaccggccugaucggcaugcuguacgccaugagcagacugggcagagaggacaccaucaagauccugagagacgccggcuaccacgugaaggccaacggcguggacgugaccacccacagacaggacaucaacggcaaggagaugaaguucgaggugcugacccuggccagccugaccaccgagauccagaucaacaucgagaucgagagcagaaagagcuacaagaagaugcugaaggagaugggcgagguggcccccgaguacagacacgacagccccgacugcggcaugaucauccugugcaucgccgcccuggugaucaccaagcuggccgccggcgacagaagcggccugaccgccgugaucagaagagccaacaacgugcugaagaacgagaugaagagauacaagggccugcugcccaaggacaucgccaacagcuucuacgagguguucgagaagcacccccacuucaucgacguguucgugcacuucggcaucgcccagagcagcaccagaggcggcagcagaguggagggcaucuucgccggccuguucaugaacgccuacggcgccggccaggugaugcugagauggggcgugcuggccaagagcgugaagaacaucaugcugggccacgccagcgugcaggccgagauggagcaggugguggagguguacgaguacgcccagaagcugggcggcgaggccggcuucuaccacauccugaacaaccccaaggccagccugcugagccugacccaguucccccacuucagcagcguggugcugggcaacgccgccggccugggcaucaugggcgaguacagaggcacccccagaaaccaggaccuguacgacgccgccaaggccuacgccgagcagcugaaggagaacggcgugaucaacuacagcgugcuggaccugaccgccgaggagcuggaggccaucaagcaccagcugaaccccaaggacaacgacguggagcugugaggacuagucccuguucccagagcccacuuuuuuuucuuuuuuugaaauaaaauagccugucuuucagaucuaaaaaaaaaaaaaaaaaaaaaaaaaaaaaaaaaaaaaaaaaaaaaaaaaaaaaaaaaaaaaaaaugcaucccccccccccccccccccccccccccccccaaaggcucuuuucagagccaccagaauu

SEQ ID NO: 10180 - RNA, 1444 nt, Artificial Sequence
  mRNA product Design a-5 comprising derived and/or modified sequence from HRSV(A2)__P03418.1__N (opt5)
gggagacuuucccauucuguagcagaauuugguguugccuguggucuuggucccgcggagaagcuuaccauggcccugagcaaggugaaacucaacgacacccugaauaaggaucagcuucuguccucuagcaaauacacaauccaaagauccacgggcgacucuauugauacccccaacuaugacguccagaagcacaucaauaaacucugcgggaugcugcuuauuacagaggaugcuaaccauaaguucaccggacugaucggcaugcucuacgccaugagccggcuggggcgcgaagacacaauuaagauccugagagaugcgggauaucacguuaaagcuaauggcguggacgugaccacacaucggcaggauaucaacgggaaggagaugaaauuugaaguccucacccuggccucccuuacgaccgagauucagaucaauauugaaaucgagucucgcaagagcuacaaaaagaugcugaaggagaugggagaaguggccccugaguauagacacgacuccccggauuguggcaugauuauccucugcauugcugcccugguuaucacaaaacuugcugccggcgaccggagcgggcugaccgcggugauccgcagagccaacaauguccucaagaacgaaaugaaacgguacaagggacugcugcccaaagauauugcuaauucuuucuaugagguguuugagaagcauccucacuucaucgacguuuuugugcacuucggcauugcccaauccagcacacgcgggggaucuagagucgaaggcaucuuugcuggacucuucaugaacgccuacggggcgggccaggugaugcugcgguggggcgugcuugccaaauccgucaagaauauuaugcuggggcaugcuagcguucaggccgagauggaacaggugguggaggucuacgaauaugcucaaaagcucggaggcgaggccggguuuuaccacauccugaacaaucccaaagccucucuucugucccucacccaguucccucauuuuagcuccgugguucugggaaacgcugcgggccuggggaucaugggagaguaucgcggcacgcccagaaaccaggaccucuacgaugccgcuaaggccuaugccgaacagcugaaagagaauggcgugauuaacuacucuguccuugaccugacagcugaggaacucgaagccaucaagcaccaacugaauccuaaagauaacgacguggagcuuugaggacuagucccuguucccagagcccacuuuuuuuucuuuuuuugaaauaaaauagccugucuuucagaucuaaaaaaaaaaaaaaaaaaaaaaaaaaaaaaaaaaaaaaaaaaaaaaaaaaaaaaaaaaaaaaaaugcaucccccccccccccccccccccccccccccccaaaggcucuuuucagagccaccagaauu

SEQ ID NO: 10181 - RNA, 1444 nt, Artificial Sequence
  mRNA product Design a-5 comprising derived and/or modified sequence from HRSV(A2)__P03418.1__N (opt6)
gggagacuuucccauucuguagcagaauuugguguugccuguggucuuggucccgcggagaagcuuaccauggcacuaagcaaagucaaauuaaacgacacauuaaacaaagaccaacucuuaucaucaucaaaauacacaauacaaagaagcaccggagacaguaucgacacaccaaacuaugacguccaaaaacauauaaauaaauuaugcggcaugcucuuaaucacagaagacgccaaccauaaauuuacaggauuaauaggaauguuauaugcaaugucacgacuagguagagaagacacaauaaaaauacuaagagacgcaggcuaucacguaaaagcaaauggaguagacguaaccacacacagacaagacauaaauggaaaagaaaugaaauuugaaguauuaacacuagcaucacuaacaacagaaauacaaaucaacauagaaauagaaucaagaaaaagcuacaaaaaaauguuaaaagaaaugggagaagucgcaccagaauauagacaugauucaccagacugcggaaugauaauacuaugcauagcagcccuaguaauuacaaaacuagcagcaggagacagaagcggauuaacagcaguaauaagaagagcaaacaacguacuaaaaaacgaaaugaaaagauauaaaggauuauuaccaaaagacauagcaaacucauucuaugaaguauucgaaaaacacccccacuuuauagacgucuucguacacuucggaauagcccaaucauccacaagaggaggaucaagagucgaaggaauauucgcaggauuauucaugaacgcauauggcgcaggacaaguaaugcuaagauggggaguacuagcaaaauccgucaaaaacauaaugcuaggacacgcaucaguucaagcagaaauggaacaaguaguagaaguauacgaauacgcccaaaaacuaggaggagaagcaggauucuaccacauacuaaauaauccaaaagcaucacuacuaagccuaacccaauuuccccacuucucaaguguaguauuaggaaaugcagcuggacuaggaauaaugggagaauacagaggaacaccaagaaaccaagacuuauacgacgcagcaaaagcauacgcagagcaacuuaaagaaaacggaguaauaaacuauagcguacuagacuuaacagcagaagaacuggaagcaauaaaacaucaauuaaacccgaaagacaaugacguagaauuauaaggacuagucccuguucccagagcccacuuuuuuuucuuuuuuugaaauaaaauagccugucuuucagaucuaaaaaaaaaaaaaaaaaaaaaaaaaaaaaaaaaaaaaaaaaaaaaaaaaaaaaaaaaaaaaaaaugcaucccccccccccccccccccccccccccccccaaaggcucuuuucagagccaccagaauu

SEQ ID NO: 10182 - RNA, 1444 nt, Artificial Sequence
  mRNA product Design a-5 comprising derived and/or modified sequence from HRSV(A2)__P03418.1__N (opt11)
gggagacuuucccauucuguagcagaauuugguguugccuguggucuuggucccgcggagaagcuuaccauggcacucucgaaaguaaaacucaacgacacccucaacaaagaccaacuccuuuccagcuccaaauacaccauccaacgauccaccggagacuccaucgacacgcccaacuacgacguccagaaacacaucaacaagcucugcggaaugcuacuaaucaccgaggacgccaaccacaaauucacaggacuuauagggaugcucuacgccaugucccgccucggacgcgaagacacaauaaaaauccuacgagacgccggcuaccacguaaaggcaaacggcgucgacgucaccacacacagacaagacaucaacggaaaggaaaugaaauucgaaguccucacccucgccagccuaaccaccgagauccaaaucaacaucgaaaucgaaucacgcaaauccuacaagaaaaugcucaaagaaaugggagaagucgcccccgaauaccgucacgacucgcccgacugcggcaugauaauccuaugcaucgccgcacucgucauaaccaaacucgccgccggugaccgaucaggacugacagcagucauccgccgagcaaacaacgugcucaaaaacgaaaugaaacgcuacaaaggccuacuccccaaagacaucgccaacuccuucuacgaagucuucgaaaaacacccacacuucaucgacgucuucguccacuucggcaucgcacaaucaucaaccagaggcggcagccgcguugaaggcaucuucgcaggacucuuuaugaacgccuacggcgccggccaagucaugcuccgcuggggcguccuggcaaaaagcgucaaaaacaucaugcuaggccacgcuagcguccaagccgaaauggaacaagucgucgaaguuuacgaguacgcacaaaaacucggcggcgaagcaggcuucuaccacauccuaaacaaccccaaagccucccugcuaucacucacccaauucccccacuucuccagcgucguccucggcaacgccgcaggacuaggcaucaugggagaauaccgcgggacaccgcgcaaccaagaccucuacgacgccgccaaagccuacgccgaacaacucaaagaaaacggcgucauaaacuacucaguccucgaccucaccgccgaagaacucgaagccaucaaacaccaacucaacccaaaagacaacgacgucgaauuauaaggacuagucccuguucccagagcccacuuuuuuuucuuuuuuugaaauaaaauagccugucuuucagaucuaaaaaaaaaaaaaaaaaaaaaaaaaaaaaaaaaaaaaaaaaaaaaaaaaaaaaaaaaaaaaaaaugcaucccccccccccccccccccccccccccccccaaaggcucuuuucagagccaccagaauu

SEQ ID NO: 10183 - RNA, 1625 nt, Artificial Sequence
  mRNA product Design b-1 comprising derived and/or modified sequence from HRSV(A2)__P03418.1__N (wt)
gggagacggagacggccugcaggaccugcucucucagcccucagccgaggccuacgccgagccgagugcgcagccgacgaccgggaggagccgcagccuucaacucugagguacugugauccgcgcugcccgccgggccgccccaguccgcugcugcggcaccuccuucccucgcgcccucuucgcucgccagcgccuucccugugagccugcgucaccgcggccgccaagcuuaccauggcucuuagcaaagucaaguugaaugauacacucaacaaagaucaacuucugucauccagcaaauacaccauccaacggagcacaggagauaguauugauacuccuaauuaugaugugcagaaacacaucaauaaguuauguggcauguuauuaaucacagaagaugcuaaucauaaauucacuggguuaauagguauguuauaugcgaugucuagguuaggaagagaagacaccauaaaaauacucagagaugcgggauaucauguaaaagcaaauggaguagauguaacaacacaucgucaagacauuaauggaaaagaaaugaaauuugaaguguuaacauuggcaagcuuaacaacugaaauucaaaucaacauugagauagaaucuagaaaauccuacaaaaaaaugcuaaaagaaaugggagagguagcuccagaauacaggcaugacucuccugauugugggaugauaauauuauguauagcagcauuaguaauaacuaaauuagcagcaggggacagaucuggucuuacagccgugauuaggagagcuaauaauguccuaaaaaaugaaaugaaacguuacaaaggcuuacuacccaaggacauagccaacagcuucuaugaaguguuugaaaaacauccccacuuuauagauguuuuuguucauuuugguauagcacaaucuucuaccagagguggcaguagaguugaagggauuuuugcaggauuguuuaugaaugccuauggugcagggcaagugauguuacgguggggagucuuagcaaaaucaguuaaaaauauuauguuaggacaugcuagugugcaagcagaaauggaacaaguuguugagguuuaugaauaugcccaaaaauuggguggugaagcaggauucuaccauauauugaacaacccaaaagcaucauuauuaucuuugacucaauuuccucacuucuccaguguaguauuaggcaaugcugcuggccuaggcauaaugggagaguacagagguacaccgaggaaucaagaucuauaugaugcagcaaaggcauaugcugaacaacucaaagaaaauggugugauuaacuacaguguacuagacuugacagcagaagaacuagaggcuaucaaacaucagcuuaauccaaaagauaaugauguagagcuuugaggacuaguguccaccugucccuccugggcugcuggauugucucguuuuccugccaaauaaacaggaucagcgcuuuacagaucuaaaaaaaaaaaaaaaaaaaaaaaaaaaaaaaaaaaaaaaaaaaaaaaaaaaaaaaaaaaaaaaaugcaucccccccccccccccccccccccccccccccaaaggcucuuuucagagccaccagaauu

SEQ ID NO: 10184 - RNA, 1625 nt, Artificial Sequence
  mRNA product Design b-1 comprising derived and/or modified sequence from HRSV(A2)__P03418.1__N (opt1)
gggagacggagacggccugcaggaccugcucucucagcccucagccgaggccuacgccgagccgagugcgcagccgacgaccgggaggagccgcagccuucaacucugagguacugugauccgcgcugcccgccgggccgccccaguccgcugcugcggcaccuccuucccucgcgcccucuucgcucgccagcgccuucccugugagccugcgucaccgcggccgccaagcuuaccauggcccugagcaaggugaagcucaacgacacccugaacaaggaccagcugcucuccagcuccaaguacaccauccagcgcagcaccggcgacuccaucgacacccccaacuacgacguccagaagcacaucaacaagcugugcgggaugcugcucaucaccgaggacgccaaccacaaguucaccggccugaucgggaugcuguacgcgaugagccggcucggccgcgaggacacgaucaagauccugcgggacgccggguaccacgugaaggccaacggcguggacgucaccacccaccgccaggacaucaacggcaaggagaugaaguucgaggugcugacccucgccucccugacgaccgagauccagaucaacaucgagaucgagagccggaaguccuacaagaagaugcugaaggagaugggggagguggccccggaguaccgccacgacagccccgacugcggcaugaucauccucugcaucgcggcccuggucaucaccaagcuggccgccggggaccgguccggccucaccgcggugauccgccgggccaacaacgugcugaagaacgagaugaagcgcuacaaggggcugcuccccaaggacaucgccaacagcuucuacgaggucuucgagaagcacccccacuucaucgacguguucgugcacuucggcaucgcccaguccagcacgcggggcgggucccgcgucgagggcaucuucgccgggcuguucaugaacgcguacggcgccggccaggugaugcugcgguggggcgugcucgccaagagcgucaagaacaucaugcuggggcacgccuccgugcaggccgagauggagcaggucguggagguguacgaguacgcgcagaagcucgggggcgaggccggguucuaccacauccugaacaacccgaaggccagccugcugucccucacccaguucccccacuucagcagcgugguccugggcaacgccgccggccuggggaucaugggcgaguaccgcgggacgccccggaaccaggaccucuacgacgcggccaaggccuacgccgagcagcugaaggagaacggcgugaucaacuacuccgugcuggaccucaccgccgaggagcuggaggcgaucaagcaccagcugaaccccaaggacaacgacgucgagcucugaggacuaguguccaccugucccuccugggcugcuggauugucucguuuuccugccaaauaaacaggaucagcgcuuuacagaucuaaaaaaaaaaaaaaaaaaaaaaaaaaaaaaaaaaaaaaaaaaaaaaaaaaaaaaaaaaaaaaaaugcaucccccccccccccccccccccccccccccccaaaggcucuuuucagagccaccagaauu

SEQ ID NO: 10185 - RNA, 1625 nt, Artificial Sequence
  mRNA product Design b-1 comprising derived and/or modified sequence from HRSV(A2)__P03418.1__N (opt2)
gggagacggagacggccugcaggaccugcucucucagcccucagccgaggccuacgccgagccgagugcgcagccgacgaccgggaggagccgcagccuucaacucugagguacugugauccgcgcugcccgccgggccgccccaguccgcugcugcggcaccuccuucccucgcgcccucuucgcucgccagcgccuucccugugagccugcgucaccgcggccgccaagcuuaccauggcccucuccaaggucaagcucaacgacacccucaacaaggaccagcuccucuccuccuccaaguacaccauccagcgcuccaccggcgacuccaucgacacccccaacuacgacguccagaagcacaucaacaagcucugcggcaugcuccucaucaccgaggacgccaaccacaaguucaccggccucaucggcaugcucuacgccaugucccgccucggccgcgaggacaccaucaagauccuccgcgacgccggcuaccacgucaaggccaacggcgucgacgucaccacccaccgccaggacaucaacggcaaggagaugaaguucgagguccucacccucgccucccucaccaccgagauccagaucaacaucgagaucgagucccgcaaguccuacaagaagaugcucaaggagaugggcgaggucgcccccgaguaccgccacgacucccccgacugcggcaugaucauccucugcaucgccgcccucgucaucaccaagcucgccgccggcgaccgcuccggccucaccgccgucauccgccgcgccaacaacguccucaagaacgagaugaagcgcuacaagggccuccuccccaaggacaucgccaacuccuucuacgaggucuucgagaagcacccccacuucaucgacgucuucguccacuucggcaucgcccaguccuccacccgcggcggcucccgcgucgagggcaucuucgccggccucuucaugaacgccuacggcgccggccaggucaugcuccgcuggggcguccucgccaaguccgucaagaacaucaugcucggccacgccuccguccaggccgagauggagcaggucgucgaggucuacgaguacgcccagaagcucggcggcgaggccggcuucuaccacauccucaacaaccccaaggccucccuccucucccucacccaguucccccacuucuccuccgucguccucggcaacgccgccggccucggcaucaugggcgaguaccgcggcaccccccgcaaccaggaccucuacgacgccgccaaggccuacgccgagcagcucaaggagaacggcgucaucaacuacuccguccucgaccucaccgccgaggagcucgaggccaucaagcaccagcucaaccccaaggacaacgacgucgagcucugaggacuaguguccaccugucccuccugggcugcuggauugucucguuuuccugccaaauaaacaggaucagcgcuuuacagaucuaaaaaaaaaaaaaaaaaaaaaaaaaaaaaaaaaaaaaaaaaaaaaaaaaaaaaaaaaaaaaaaaugcaucccccccccccccccccccccccccccccccaaaggcucuuuucagagccaccagaauu

SEQ ID NO: 10186 - RNA, 1625 nt, Artificial Sequence
  mRNA product Design b-1 comprising derived and/or modified sequence from HRSV(A2)__P03418.1__N (opt3)
gggagacggagacggccugcaggaccugcucucucagcccucagccgaggccuacgccgagccgagugcgcagccgacgaccgggaggagccgcagccuucaacucugagguacugugauccgcgcugcccgccgggccgccccaguccgcugcugcggcaccuccuucccucgcgcccucuucgcucgccagcgccuucccugugagccugcgucaccgcggccgccaagcuuaccauggcccugagcaaggugaaacucaacgacacccuuaauaaggaucagcuguuguccucuucaaaauacacaauccaaagaaguacuggcgacagcauugauacgcccaacuaugacguccagaagcacauaaauaaauuaugcgggaugcugcuaaucaccgaggaugcuaaccauaaguucacaggacucauugguaugcuguacgcaauguccaggcuuggccgggaagacacuaucaagauucugcgcgaugccggguaucacguuaaagcgaauggaguggacguaaccacacaucgacaggauaucaacggcaaggagaugaaauuugaaguguugacccucgcuucucugacuacagagauacagaucaauauugaaaucgagucgcguaagucauacaaaaagaugcugaaggagaugggugaagucgccccugaguauagacacgacagcccagauugugggaugauuauccucugcauagcagccuuagugauuaccaaacuggcugcaggagacaggaguggccuuacggccguuauccggcgcgcuaacaauguguugaagaacgaaaugaaaagauacaagggccugcuaccgaaagauauugccaauuccuucuaugaggucuuugagaagcauccccacuucaucgacguguuuguacacuucgggaucgcgcaaucuagcacuaggggagguucccggguugaaggcauuuuugcaggacucuucaugaacgccuacggggcuggccaggugaugcugcgcugggguguccuugccaaaucagugaagaauauaaugcuggggcaugcaagugugcaggcugagauggaacaggucguugagguguacgaauaugcccaaaaguugggaggcgaggcgggcuuuuaccacauccucaacaauccuaaagccagccuguuaucucugacccaguucccacauuuuuccucaguagugcucgggaacgcagcuggacuugguauuaugggcgaguaucgagggacacccagaaaccaggaccuguacgaugccgcuaaggccuaugcagaacaguugaaagagaauggagucaucaacuacagcgugcuagaccugacugccgaggaacucgaagcuauaaagcaccaacugaauccuaaagauaacgacguugagcuuugaggacuaguguccaccugucccuccugggcugcuggauugucucguuuuccugccaaauaaacaggaucagcgcuuuacagaucuaaaaaaaaaaaaaaaaaaaaaaaaaaaaaaaaaaaaaaaaaaaaaaaaaaaaaaaaaaaaaaaaugcaucccccccccccccccccccccccccccccccaaaggcucuuuucagagccaccagaauu

SEQ ID NO: 10187 - RNA, 1625 nt, Artificial Sequence
  mRNA product Design b-1 comprising derived and/or modified sequence from HRSV(A2)__P03418.1__N (opt4)
gggagacggagacggccugcaggaccugcucucucagcccucagccgaggccuacgccgagccgagugcgcagccgacgaccgggaggagccgcagccuucaacucugagguacugugauccgcgcugcccgccgggccgccccaguccgcugcugcggcaccuccuucccucgcgcccucuucgcucgccagcgccuucccugugagccugcgucaccgcggccgccaagcuuaccauggcccugagcaaggugaagcugaacgacacccugaacaaggaccagcugcugagcagcagcaaguacaccauccagagaagcaccggcgacagcaucgacacccccaacuacgacgugcagaagcacaucaacaagcugugcggcaugcugcugaucaccgaggacgccaaccacaaguucaccggccugaucggcaugcuguacgccaugagcagacugggcagagaggacaccaucaagauccugagagacgccggcuaccacgugaaggccaacggcguggacgugaccacccacagacaggacaucaacggcaaggagaugaaguucgaggugcugacccuggccagccugaccaccgagauccagaucaacaucgagaucgagagcagaaagagcuacaagaagaugcugaaggagaugggcgagguggcccccgaguacagacacgacagccccgacugcggcaugaucauccugugcaucgccgcccuggugaucaccaagcuggccgccggcgacagaagcggccugaccgccgugaucagaagagccaacaacgugcugaagaacgagaugaagagauacaagggccugcugcccaaggacaucgccaacagcuucuacgagguguucgagaagcacccccacuucaucgacguguucgugcacuucggcaucgcccagagcagcaccagaggcggcagcagaguggagggcaucuucgccggccuguucaugaacgccuacggcgccggccaggugaugcugagauggggcgugcuggccaagagcgugaagaacaucaugcugggccacgccagcgugcaggccgagauggagcaggugguggagguguacgaguacgcccagaagcugggcggcgaggccggcuucuaccacauccugaacaaccccaaggccagccugcugagccugacccaguucccccacuucagcagcguggugcugggcaacgccgccggccugggcaucaugggcgaguacagaggcacccccagaaaccaggaccuguacgacgccgccaaggccuacgccgagcagcugaaggagaacggcgugaucaacuacagcgugcuggaccugaccgccgaggagcuggaggccaucaagcaccagcugaaccccaaggacaacgacguggagcugugaggacuaguguccaccugucccuccugggcugcuggauugucucguuuuccugccaaauaaacaggaucagcgcuuuacagaucuaaaaaaaaaaaaaaaaaaaaaaaaaaaaaaaaaaaaaaaaaaaaaaaaaaaaaaaaaaaaaaaaugcaucccccccccccccccccccccccccccccccaaaggcucuuuucagagccaccagaauu

SEQ ID NO: 10188 - RNA, 1625 nt, Artificial Sequence
  mRNA product Design b-1 comprising derived and/or modified sequence from HRSV(A2)__P03418.1__N (opt5)
gggagacggagacggccugcaggaccugcucucucagcccucagccgaggccuacgccgagccgagugcgcagccgacgaccgggaggagccgcagccuucaacucugagguacugugauccgcgcugcccgccgggccgccccaguccgcugcugcggcaccuccuucccucgcgcccucuucgcucgccagcgccuucccugugagccugcgucaccgcggccgccaagcuuaccauggcccugagcaaggugaaacucaacgacacccugaauaaggaucagcuucuguccucuagcaaauacacaauccaaagauccacgggcgacucuauugauacccccaacuaugacguccagaagcacaucaauaaacucugcgggaugcugcuuauuacagaggaugcuaaccauaaguucaccggacugaucggcaugcucuacgccaugagccggcuggggcgcgaagacacaauuaagauccugagagaugcgggauaucacguuaaagcuaauggcguggacgugaccacacaucggcaggauaucaacgggaaggagaugaaauuugaaguccucacccuggccucccuuacgaccgagauucagaucaauauugaaaucgagucucgcaagagcuacaaaaagaugcugaaggagaugggagaaguggccccugaguauagacacgacuccccggauuguggcaugauuauccucugcauugcugcccugguuaucacaaaacuugcugccggcgaccggagcgggcugaccgcggugauccgcagagccaacaauguccucaagaacgaaaugaaacgguacaagggacugcugcccaaagauauugcuaauucuuucuaugagguguuugagaagcauccucacuucaucgacguuuuugugcacuucggcauugcccaauccagcacacgcgggggaucuagagucgaaggcaucuuugcuggacucuucaugaacgccuacggggcgggccaggugaugcugcgguggggcgugcuugccaaauccgucaagaauauuaugcuggggcaugcuagcguucaggccgagauggaacaggugguggaggucuacgaauaugcucaaaagcucggaggcgaggccggguuuuaccacauccugaacaaucccaaagccucucuucugucccucacccaguucccucauuuuagcuccgugguucugggaaacgcugcgggccuggggaucaugggagaguaucgcggcacgcccagaaaccaggaccucuacgaugccgcuaaggccuaugccgaacagcugaaagagaauggcgugauuaacuacucuguccuugaccugacagcugaggaacucgaagccaucaagcaccaacugaauccuaaagauaacgacguggagcuuugaggacuaguguccaccugucccuccugggcugcuggauugucucguuuuccugccaaauaaacaggaucagcgcuuuacagaucuaaaaaaaaaaaaaaaaaaaaaaaaaaaaaaaaaaaaaaaaaaaaaaaaaaaaaaaaaaaaaaaaugcaucccccccccccccccccccccccccccccccaaaggcucuuuucagagccaccagaauu

SEQ ID NO: 10189 - RNA, 1625 nt, Artificial Sequence
  mRNA product Design b-1 comprising derived and/or modified sequence from HRSV(A2)__P03418.1__N (opt6)
gggagacggagacggccugcaggaccugcucucucagcccucagccgaggccuacgccgagccgagugcgcagccgacgaccgggaggagccgcagccuucaacucugagguacugugauccgcgcugcccgccgggccgccccaguccgcugcugcggcaccuccuucccucgcgcccucuucgcucgccagcgccuucccugugagccugcgucaccgcggccgccaagcuuaccauggcacuaagcaaagucaaauuaaacgacacauuaaacaaagaccaacucuuaucaucaucaaaauacacaauacaaagaagcaccggagacaguaucgacacaccaaacuaugacguccaaaaacauauaaauaaauuaugcggcaugcucuuaaucacagaagacgccaaccauaaauuuacaggauuaauaggaauguuauaugcaaugucacgacuagguagagaagacacaauaaaaauacuaagagacgcaggcuaucacguaaaagcaaauggaguagacguaaccacacacagacaagacauaaauggaaaagaaaugaaauuugaaguauuaacacuagcaucacuaacaacagaaauacaaaucaacauagaaauagaaucaagaaaaagcuacaaaaaaauguuaaaagaaaugggagaagucgcaccagaauauagacaugauucaccagacugcggaaugauaauacuaugcauagcagcccuaguaauuacaaaacuagcagcaggagacagaagcggauuaacagcaguaauaagaagagcaaacaacguacuaaaaaacgaaaugaaaagauauaaaggauuauuaccaaaagacauagcaaacucauucuaugaaguauucgaaaaacacccccacuuuauagacgucuucguacacuucggaauagcccaaucauccacaagaggaggaucaagagucgaaggaauauucgcaggauuauucaugaacgcauauggcgcaggacaaguaaugcuaagauggggaguacuagcaaaauccgucaaaaacauaaugcuaggacacgcaucaguucaagcagaaauggaacaaguaguagaaguauacgaauacgcccaaaaacuaggaggagaagcaggauucuaccacauacuaaauaauccaaaagcaucacuacuaagccuaacccaauuuccccacuucucaaguguaguauuaggaaaugcagcuggacuaggaauaaugggagaauacagaggaacaccaagaaaccaagacuuauacgacgcagcaaaagcauacgcagagcaacuuaaagaaaacggaguaauaaacuauagcguacuagacuuaacagcagaagaacuggaagcaauaaaacaucaauuaaacccgaaagacaaugacguagaauuauaaggacuaguguccaccugucccuccugggcugcuggauugucucguuuuccugccaaauaaacaggaucagcgcuuuacagaucuaaaaaaaaaaaaaaaaaaaaaaaaaaaaaaaaaaaaaaaaaaaaaaaaaaaaaaaaaaaaaaaaugcaucccccccccccccccccccccccccccccccaaaggcucuuuucagagccaccagaauu

SEQ ID NO: 10190 - RNA, 1625 nt, Artificial Sequence
  mRNA product Design b-1 comprising derived and/or modified sequence from HRSV(A2)__P03418.1__N (opt11)
gggagacggagacggccugcaggaccugcucucucagcccucagccgaggccuacgccgagccgagugcgcagccgacgaccgggaggagccgcagccuucaacucugagguacugugauccgcgcugcccgccgggccgccccaguccgcugcugcggcaccuccuucccucgcgcccucuucgcucgccagcgccuucccugugagccugcgucaccgcggccgccaagcuuaccauggcacucucgaaaguaaaacucaacgacacccucaacaaagaccaacuccuuuccagcuccaaauacaccauccaacgauccaccggagacuccaucgacacgcccaacuacgacguccagaaacacaucaacaagcucugcggaaugcuacuaaucaccgaggacgccaaccacaaauucacaggacuuauagggaugcucuacgccaugucccgccucggacgcgaagacacaauaaaaauccuacgagacgccggcuaccacguaaaggcaaacggcgucgacgucaccacacacagacaagacaucaacggaaaggaaaugaaauucgaaguccucacccucgccagccuaaccaccgagauccaaaucaacaucgaaaucgaaucacgcaaauccuacaagaaaaugcucaaagaaaugggagaagucgcccccgaauaccgucacgacucgcccgacugcggcaugauaauccuaugcaucgccgcacucgucauaaccaaacucgccgccggugaccgaucaggacugacagcagucauccgccgagcaaacaacgugcucaaaaacgaaaugaaacgcuacaaaggccuacuccccaaagacaucgccaacuccuucuacgaagucuucgaaaaacacccacacuucaucgacgucuucguccacuucggcaucgcacaaucaucaaccagaggcggcagccgcguugaaggcaucuucgcaggacucuuuaugaacgccuacggcgccggccaagucaugcuccgcuggggcguccuggcaaaaagcgucaaaaacaucaugcuaggccacgcuagcguccaagccgaaauggaacaagucgucgaaguuuacgaguacgcacaaaaacucggcggcgaagcaggcuucuaccacauccuaaacaaccccaaagccucccugcuaucacucacccaauucccccacuucuccagcgucguccucggcaacgccgcaggacuaggcaucaugggagaauaccgcgggacaccgcgcaaccaagaccucuacgacgccgccaaagccuacgccgaacaacucaaagaaaacggcgucauaaacuacucaguccucgaccucaccgccgaagaacucgaagccaucaaacaccaacucaacccaaaagacaacgacgucgaauuauaaggacuaguguccaccugucccuccugggcugcuggauugucucguuuuccugccaaauaaacaggaucagcgcuuuacagaucuaaaaaaaaaaaaaaaaaaaaaaaaaaaaaaaaaaaaaaaaaaaaaaaaaaaaaaaaaaaaaaaaugcaucccccccccccccccccccccccccccccccaaaggcucuuuucagagccaccagaauu

SEQ ID NO: 10191 - RNA, 1445 nt, Artificial Sequence
  mRNA product Design b-2 comprising derived and/or modified sequence from HRSV(A2)__P03418.1__N (wt)
gggagagccucugcuggaguccggggaguggcguuggcugcuagagcgaagcuuaccauggcucuuagcaaagucaaguugaaugauacacucaacaaagaucaacuucugucauccagcaaauacaccauccaacggagcacaggagauaguauugauacuccuaauuaugaugugcagaaacacaucaauaaguuauguggcauguuauuaaucacagaagaugcuaaucauaaauucacuggguuaauagguauguuauaugcgaugucuagguuaggaagagaagacaccauaaaaauacucagagaugcgggauaucauguaaaagcaaauggaguagauguaacaacacaucgucaagacauuaauggaaaagaaaugaaauuugaaguguuaacauuggcaagcuuaacaacugaaauucaaaucaacauugagauagaaucuagaaaauccuacaaaaaaaugcuaaaagaaaugggagagguagcuccagaauacaggcaugacucuccugauugugggaugauaauauuauguauagcagcauuaguaauaacuaaauuagcagcaggggacagaucuggucuuacagccgugauuaggagagcuaauaauguccuaaaaaaugaaaugaaacguuacaaaggcuuacuacccaaggacauagccaacagcuucuaugaaguguuugaaaaacauccccacuuuauagauguuuuuguucauuuugguauagcacaaucuucuaccagagguggcaguagaguugaagggauuuuugcaggauuguuuaugaaugccuauggugcagggcaagugauguuacgguggggagucuuagcaaaaucaguuaaaaauauuauguuaggacaugcuagugugcaagcagaaauggaacaaguuguugagguuuaugaauaugcccaaaaauuggguggugaagcaggauucuaccauauauugaacaacccaaaagcaucauuauuaucuuugacucaauuuccucacuucuccaguguaguauuaggcaaugcugcuggccuaggcauaaugggagaguacagagguacaccgaggaaucaagaucuauaugaugcagcaaaggcauaugcugaacaacucaaagaaaauggugugauuaacuacaguguacuagacuugacagcagaagaacuagaggcuaucaaacaucagcuuaauccaaaagauaaugauguagagcuuugaggacuaguguccaccugucccuccugggcugcuggauugucucguuuuccugccaaauaaacaggaucagcgcuuuacagaucuaaaaaaaaaaaaaaaaaaaaaaaaaaaaaaaaaaaaaaaaaaaaaaaaaaaaaaaaaaaaaaaaugcaucccccccccccccccccccccccccccccccaaaggcucuuuucagagccaccagaauu

SEQ ID NO: 10192 - RNA, 1445 nt, Artificial Sequence
  mRNA product Design b-2 comprising derived and/or modified sequence from HRSV(A2)__P03418.1__N (opt1)
gggagagccucugcuggaguccggggaguggcguuggcugcuagagcgaagcuuaccauggcccugagcaaggugaagcucaacgacacccugaacaaggaccagcugcucuccagcuccaaguacaccauccagcgcagcaccggcgacuccaucgacacccccaacuacgacguccagaagcacaucaacaagcugugcgggaugcugcucaucaccgaggacgccaaccacaaguucaccggccugaucgggaugcuguacgcgaugagccggcucggccgcgaggacacgaucaagauccugcgggacgccggguaccacgugaaggccaacggcguggacgucaccacccaccgccaggacaucaacggcaaggagaugaaguucgaggugcugacccucgccucccugacgaccgagauccagaucaacaucgagaucgagagccggaaguccuacaagaagaugcugaaggagaugggggagguggccccggaguaccgccacgacagccccgacugcggcaugaucauccucugcaucgcggcccuggucaucaccaagcuggccgccggggaccgguccggccucaccgcggugauccgccgggccaacaacgugcugaagaacgagaugaagcgcuacaaggggcugcuccccaaggacaucgccaacagcuucuacgaggucuucgagaagcacccccacuucaucgacguguucgugcacuucggcaucgcccaguccagcacgcggggcgggucccgcgucgagggcaucuucgccgggcuguucaugaacgcguacggcgccggccaggugaugcugcgguggggcgugcucgccaagagcgucaagaacaucaugcuggggcacgccuccgugcaggccgagauggagcaggucguggagguguacgaguacgcgcagaagcucgggggcgaggccggguucuaccacauccugaacaacccgaaggccagccugcugucccucacccaguucccccacuucagcagcgugguccugggcaacgccgccggccuggggaucaugggcgaguaccgcgggacgccccggaaccaggaccucuacgacgcggccaaggccuacgccgagcagcugaaggagaacggcgugaucaacuacuccgugcuggaccucaccgccgaggagcuggaggcgaucaagcaccagcugaaccccaaggacaacgacgucgagcucugaggacuaguguccaccugucccuccugggcugcuggauugucucguuuuccugccaaauaaacaggaucagcgcuuuacagaucuaaaaaaaaaaaaaaaaaaaaaaaaaaaaaaaaaaaaaaaaaaaaaaaaaaaaaaaaaaaaaaaaugcaucccccccccccccccccccccccccccccccaaaggcucuuuucagagccaccagaauu

SEQ ID NO: 10193 - RNA, 1445 nt, Artificial Sequence
  mRNA product Design b-2 comprising derived and/or modified sequence from HRSV(A2)__P03418.1__N (opt2)
gggagagccucugcuggaguccggggaguggcguuggcugcuagagcgaagcuuaccauggcccucuccaaggucaagcucaacgacacccucaacaaggaccagcuccucuccuccuccaaguacaccauccagcgcuccaccggcgacuccaucgacacccccaacuacgacguccagaagcacaucaacaagcucugcggcaugcuccucaucaccgaggacgccaaccacaaguucaccggccucaucggcaugcucuacgccaugucccgccucggccgcgaggacaccaucaagauccuccgcgacgccggcuaccacgucaaggccaacggcgucgacgucaccacccaccgccaggacaucaacggcaaggagaugaaguucgagguccucacccucgccucccucaccaccgagauccagaucaacaucgagaucgagucccgcaaguccuacaagaagaugcucaaggagaugggcgaggucgcccccgaguaccgccacgacucccccgacugcggcaugaucauccucugcaucgccgcccucgucaucaccaagcucgccgccggcgaccgcuccggccucaccgccgucauccgccgcgccaacaacguccucaagaacgagaugaagcgcuacaagggccuccuccccaaggacaucgccaacuccuucuacgaggucuucgagaagcacccccacuucaucgacgucuucguccacuucggcaucgcccaguccuccacccgcggcggcucccgcgucgagggcaucuucgccggccucuucaugaacgccuacggcgccggccaggucaugcuccgcuggggcguccucgccaaguccgucaagaacaucaugcucggccacgccuccguccaggccgagauggagcaggucgucgaggucuacgaguacgcccagaagcucggcggcgaggccggcuucuaccacauccucaacaaccccaaggccucccuccucucccucacccaguucccccacuucuccuccgucguccucggcaacgccgccggccucggcaucaugggcgaguaccgcggcaccccccgcaaccaggaccucuacgacgccgccaaggccuacgccgagcagcucaaggagaacggcgucaucaacuacuccguccucgaccucaccgccgaggagcucgaggccaucaagcaccagcucaaccccaaggacaacgacgucgagcucugaggacuaguguccaccugucccuccugggcugcuggauugucucguuuuccugccaaauaaacaggaucagcgcuuuacagaucuaaaaaaaaaaaaaaaaaaaaaaaaaaaaaaaaaaaaaaaaaaaaaaaaaaaaaaaaaaaaaaaaugcaucccccccccccccccccccccccccccccccaaaggcucuuuucagagccaccagaauu

SEQ ID NO: 10194 - RNA, 1445 nt, Artificial Sequence
  mRNA product Design b-2 comprising derived and/or modified sequence from HRSV(A2)__P03418.1__N (opt3)
gggagagccucugcuggaguccggggaguggcguuggcugcuagagcgaagcuuaccauggcccugagcaaggugaaacucaacgacacccuuaauaaggaucagcuguuguccucuucaaaauacacaauccaaagaaguacuggcgacagcauugauacgcccaacuaugacguccagaagcacauaaauaaauuaugcgggaugcugcuaaucaccgaggaugcuaaccauaaguucacaggacucauugguaugcuguacgcaauguccaggcuuggccgggaagacacuaucaagauucugcgcgaugccggguaucacguuaaagcgaauggaguggacguaaccacacaucgacaggauaucaacggcaaggagaugaaauuugaaguguugacccucgcuucucugacuacagagauacagaucaauauugaaaucgagucgcguaagucauacaaaaagaugcugaaggagaugggugaagucgccccugaguauagacacgacagcccagauugugggaugauuauccucugcauagcagccuuagugauuaccaaacuggcugcaggagacaggaguggccuuacggccguuauccggcgcgcuaacaauguguugaagaacgaaaugaaaagauacaagggccugcuaccgaaagauauugccaauuccuucuaugaggucuuugagaagcauccccacuucaucgacguguuuguacacuucgggaucgcgcaaucuagcacuaggggagguucccggguugaaggcauuuuugcaggacucuucaugaacgccuacggggcuggccaggugaugcugcgcugggguguccuugccaaaucagugaagaauauaaugcuggggcaugcaagugugcaggcugagauggaacaggucguugagguguacgaauaugcccaaaaguugggaggcgaggcgggcuuuuaccacauccucaacaauccuaaagccagccuguuaucucugacccaguucccacauuuuuccucaguagugcucgggaacgcagcuggacuugguauuaugggcgaguaucgagggacacccagaaaccaggaccuguacgaugccgcuaaggccuaugcagaacaguugaaagagaauggagucaucaacuacagcgugcuagaccugacugccgaggaacucgaagcuauaaagcaccaacugaauccuaaagauaacgacguugagcuuugaggacuaguguccaccugucccuccugggcugcuggauugucucguuuuccugccaaauaaacaggaucagcgcuuuacagaucuaaaaaaaaaaaaaaaaaaaaaaaaaaaaaaaaaaaaaaaaaaaaaaaaaaaaaaaaaaaaaaaaugcaucccccccccccccccccccccccccccccccaaaggcucuuuucagagccaccagaauu

SEQ ID NO: 10195 - RNA, 1445 nt, Artificial Sequence
  mRNA product Design b-2 comprising derived and/or modified sequence from HRSV(A2)__P03418.1__N (opt4)
gggagagccucugcuggaguccggggaguggcguuggcugcuagagcgaagcuuaccauggcccugagcaaggugaagcugaacgacacccugaacaaggaccagcugcugagcagcagcaaguacaccauccagagaagcaccggcgacagcaucgacacccccaacuacgacgugcagaagcacaucaacaagcugugcggcaugcugcugaucaccgaggacgccaaccacaaguucaccggccugaucggcaugcuguacgccaugagcagacugggcagagaggacaccaucaagauccugagagacgccggcuaccacgugaaggccaacggcguggacgugaccacccacagacaggacaucaacggcaaggagaugaaguucgaggugcugacccuggccagccugaccaccgagauccagaucaacaucgagaucgagagcagaaagagcuacaagaagaugcugaaggagaugggcgagguggcccccgaguacagacacgacagccccgacugcggcaugaucauccugugcaucgccgcccuggugaucaccaagcuggccgccggcgacagaagcggccugaccgccgugaucagaagagccaacaacgugcugaagaacgagaugaagagauacaagggccugcugcccaaggacaucgccaacagcuucuacgagguguucgagaagcacccccacuucaucgacguguucgugcacuucggcaucgcccagagcagcaccagaggcggcagcagaguggagggcaucuucgccggccuguucaugaacgccuacggcgccggccaggugaugcugagauggggcgugcuggccaagagcgugaagaacaucaugcugggccacgccagcgugcaggccgagauggagcaggugguggagguguacgaguacgcccagaagcugggcggcgaggccggcuucuaccacauccugaacaaccccaaggccagccugcugagccugacccaguucccccacuucagcagcguggugcugggcaacgccgccggccugggcaucaugggcgaguacagaggcacccccagaaaccaggaccuguacgacgccgccaaggccuacgccgagcagcugaaggagaacggcgugaucaacuacagcgugcuggaccugaccgccgaggagcuggaggccaucaagcaccagcugaaccccaaggacaacgacguggagcugugaggacuaguguccaccugucccuccugggcugcuggauugucucguuuuccugccaaauaaacaggaucagcgcuuuacagaucuaaaaaaaaaaaaaaaaaaaaaaaaaaaaaaaaaaaaaaaaaaaaaaaaaaaaaaaaaaaaaaaaugcaucccccccccccccccccccccccccccccccaaaggcucuuuucagagccaccagaauu

SEQ ID NO: 10196 - RNA, 1445 nt, Artificial Sequence
  mRNA product Design b-2 comprising derived and/or modified sequence from HRSV(A2)__P03418.1__N (opt5)
gggagagccucugcuggaguccggggaguggcguuggcugcuagagcgaagcuuaccauggcccugagcaaggugaaacucaacgacacccugaauaaggaucagcuucuguccucuagcaaauacacaauccaaagauccacgggcgacucuauugauacccccaacuaugacguccagaagcacaucaauaaacucugcgggaugcugcuuauuacagaggaugcuaaccauaaguucaccggacugaucggcaugcucuacgccaugagccggcuggggcgcgaagacacaauuaagauccugagagaugcgggauaucacguuaaagcuaauggcguggacgugaccacacaucggcaggauaucaacgggaaggagaugaaauuugaaguccucacccuggccucccuuacgaccgagauucagaucaauauugaaaucgagucucgcaagagcuacaaaaagaugcugaaggagaugggagaaguggccccugaguauagacacgacuccccggauuguggcaugauuauccucugcauugcugcccugguuaucacaaaacuugcugccggcgaccggagcgggcugaccgcggugauccgcagagccaacaauguccucaagaacgaaaugaaacgguacaagggacugcugcccaaagauauugcuaauucuuucuaugagguguuugagaagcauccucacuucaucgacguuuuugugcacuucggcauugcccaauccagcacacgcgggggaucuagagucgaaggcaucuuugcuggacucuucaugaacgccuacggggcgggccaggugaugcugcgguggggcgugcuugccaaauccgucaagaauauuaugcuggggcaugcuagcguucaggccgagauggaacaggugguggaggucuacgaauaugcucaaaagcucggaggcgaggccggguuuuaccacauccugaacaaucccaaagccucucuucugucccucacccaguucccucauuuuagcuccgugguucugggaaacgcugcgggccuggggaucaugggagaguaucgcggcacgcccagaaaccaggaccucuacgaugccgcuaaggccuaugccgaacagcugaaagagaauggcgugauuaacuacucuguccuugaccugacagcugaggaacucgaagccaucaagcaccaacugaauccuaaagauaacgacguggagcuuugaggacuaguguccaccugucccuccugggcugcuggauugucucguuuuccugccaaauaaacaggaucagcgcuuuacagaucuaaaaaaaaaaaaaaaaaaaaaaaaaaaaaaaaaaaaaaaaaaaaaaaaaaaaaaaaaaaaaaaaugcaucccccccccccccccccccccccccccccccaaaggcucuuuucagagccaccagaauu

SEQ ID NO: 10197 - RNA, 1445 nt, Artificial Sequence
  mRNA product Design b-2 comprising derived and/or modified sequence from HRSV(A2)__P03418.1__N (opt6)
gggagagccucugcuggaguccggggaguggcguuggcugcuagagcgaagcuuaccauggcacuaagcaaagucaaauuaaacgacacauuaaacaaagaccaacucuuaucaucaucaaaauacacaauacaaagaagcaccggagacaguaucgacacaccaaacuaugacguccaaaaacauauaaauaaauuaugcggcaugcucuuaaucacagaagacgccaaccauaaauuuacaggauuaauaggaauguuauaugcaaugucacgacuagguagagaagacacaauaaaaauacuaagagacgcaggcuaucacguaaaagcaaauggaguagacguaaccacacacagacaagacauaaauggaaaagaaaugaaauuugaaguauuaacacuagcaucacuaacaacagaaauacaaaucaacauagaaauagaaucaagaaaaagcuacaaaaaaauguuaaaagaaaugggagaagucgcaccagaauauagacaugauucaccagacugcggaaugauaauacuaugcauagcagcccuaguaauuacaaaacuagcagcaggagacagaagcggauuaacagcaguaauaagaagagcaaacaacguacuaaaaaacgaaaugaaaagauauaaaggauuauuaccaaaagacauagcaaacucauucuaugaaguauucgaaaaacacccccacuuuauagacgucuucguacacuucggaauagcccaaucauccacaagaggaggaucaagagucgaaggaauauucgcaggauuauucaugaacgcauauggcgcaggacaaguaaugcuaagauggggaguacuagcaaaauccgucaaaaacauaaugcuaggacacgcaucaguucaagcagaaauggaacaaguaguagaaguauacgaauacgcccaaaaacuaggaggagaagcaggauucuaccacauacuaaauaauccaaaagcaucacuacuaagccuaacccaauuuccccacuucucaaguguaguauuaggaaaugcagcuggacuaggaauaaugggagaauacagaggaacaccaagaaaccaagacuuauacgacgcagcaaaagcauacgcagagcaacuuaaagaaaacggaguaauaaacuauagcguacuagacuuaacagcagaagaacuggaagcaauaaaacaucaauuaaacccgaaagacaaugacguagaauuauaaggacuaguguccaccugucccuccugggcugcuggauugucucguuuuccugccaaauaaacaggaucagcgcuuuacagaucuaaaaaaaaaaaaaaaaaaaaaaaaaaaaaaaaaaaaaaaaaaaaaaaaaaaaaaaaaaaaaaaaugcaucccccccccccccccccccccccccccccccaaaggcucuuuucagagccaccagaauu

SEQ ID NO: 10198 - RNA, 1445 nt, Artificial Sequence
  mRNA product Design b-2 comprising derived and/or modified sequence from HRSV(A2)__P03418.1__N (opt11)
gggagagccucugcuggaguccggggaguggcguuggcugcuagagcgaagcuuaccauggcacucucgaaaguaaaacucaacgacacccucaacaaagaccaacuccuuuccagcuccaaauacaccauccaacgauccaccggagacuccaucgacacgcccaacuacgacguccagaaacacaucaacaagcucugcggaaugcuacuaaucaccgaggacgccaaccacaaauucacaggacuuauagggaugcucuacgccaugucccgccucggacgcgaagacacaauaaaaauccuacgagacgccggcuaccacguaaaggcaaacggcgucgacgucaccacacacagacaagacaucaacggaaaggaaaugaaauucgaaguccucacccucgccagccuaaccaccgagauccaaaucaacaucgaaaucgaaucacgcaaauccuacaagaaaaugcucaaagaaaugggagaagucgcccccgaauaccgucacgacucgcccgacugcggcaugauaauccuaugcaucgccgcacucgucauaaccaaacucgccgccggugaccgaucaggacugacagcagucauccgccgagcaaacaacgugcucaaaaacgaaaugaaacgcuacaaaggccuacuccccaaagacaucgccaacuccuucuacgaagucuucgaaaaacacccacacuucaucgacgucuucguccacuucggcaucgcacaaucaucaaccagaggcggcagccgcguugaaggcaucuucgcaggacucuuuaugaacgccuacggcgccggccaagucaugcuccgcuggggcguccuggcaaaaagcgucaaaaacaucaugcuaggccacgcuagcguccaagccgaaauggaacaagucgucgaaguuuacgaguacgcacaaaaacucggcggcgaagcaggcuucuaccacauccuaaacaaccccaaagccucccugcuaucacucacccaauucccccacuucuccagcgucguccucggcaacgccgcaggacuaggcaucaugggagaauaccgcgggacaccgcgcaaccaagaccucuacgacgccgccaaagccuacgccgaacaacucaaagaaaacggcgucauaaacuacucaguccucgaccucaccgccgaagaacucgaagccaucaaacaccaacucaacccaaaagacaacgacgucgaauuauaaggacuaguguccaccugucccuccugggcugcuggauugucucguuuuccugccaaauaaacaggaucagcgcuuuacagaucuaaaaaaaaaaaaaaaaaaaaaaaaaaaaaaaaaaaaaaaaaaaaaaaaaaaaaaaaaaaaaaaaugcaucccccccccccccccccccccccccccccccaaaggcucuuuucagagccaccagaauu

SEQ ID NO: 10199 - RNA, 1465 nt, Artificial Sequence
  mRNA product Design b-3 comprising derived and/or modified sequence from HRSV(A2)__P03418.1__N (wt)
gggagagucccgcagucggcguccagcggcucugcuuguucgugugugugucguugcaggccuuauucaagcuuaccauggcucuuagcaaagucaaguugaaugauacacucaacaaagaucaacuucugucauccagcaaauacaccauccaacggagcacaggagauaguauugauacuccuaauuaugaugugcagaaacacaucaauaaguuauguggcauguuauuaaucacagaagaugcuaaucauaaauucacuggguuaauagguauguuauaugcgaugucuagguuaggaagagaagacaccauaaaaauacucagagaugcgggauaucauguaaaagcaaauggaguagauguaacaacacaucgucaagacauuaauggaaaagaaaugaaauuugaaguguuaacauuggcaagcuuaacaacugaaauucaaaucaacauugagauagaaucuagaaaauccuacaaaaaaaugcuaaaagaaaugggagagguagcuccagaauacaggcaugacucuccugauugugggaugauaauauuauguauagcagcauuaguaauaacuaaauuagcagcaggggacagaucuggucuuacagccgugauuaggagagcuaauaauguccuaaaaaaugaaaugaaacguuacaaaggcuuacuacccaaggacauagccaacagcuucuaugaaguguuugaaaaacauccccacuuuauagauguuuuuguucauuuugguauagcacaaucuucuaccagagguggcaguagaguugaagggauuuuugcaggauuguuuaugaaugccuauggugcagggcaagugauguuacgguggggagucuuagcaaaaucaguuaaaaauauuauguuaggacaugcuagugugcaagcagaaauggaacaaguuguugagguuuaugaauaugcccaaaaauuggguggugaagcaggauucuaccauauauugaacaacccaaaagcaucauuauuaucuuugacucaauuuccucacuucuccaguguaguauuaggcaaugcugcuggccuaggcauaaugggagaguacagagguacaccgaggaaucaagaucuauaugaugcagcaaaggcauaugcugaacaacucaaagaaaauggugugauuaacuacaguguacuagacuugacagcagaagaacuagaggcuaucaaacaucagcuuaauccaaaagauaaugauguagagcuuugaggacuaguguccaccugucccuccugggcugcuggauugucucguuuuccugccaaauaaacaggaucagcgcuuuacagaucuaaaaaaaaaaaaaaaaaaaaaaaaaaaaaaaaaaaaaaaaaaaaaaaaaaaaaaaaaaaaaaaaugcaucccccccccccccccccccccccccccccccaaaggcucuuuucagagccaccagaauu

SEQ ID NO: 10200 - RNA, 1465 nt, Artificial Sequence
  mRNA product Design b-3 comprising derived and/or modified sequence from HRSV(A2)__P03418.1__N (opt1)
gggagagucccgcagucggcguccagcggcucugcuuguucgugugugugucguugcaggccuuauucaagcuuaccauggcccugagcaaggugaagcucaacgacacccugaacaaggaccagcugcucuccagcuccaaguacaccauccagcgcagcaccggcgacuccaucgacacccccaacuacgacguccagaagcacaucaacaagcugugcgggaugcugcucaucaccgaggacgccaaccacaaguucaccggccugaucgggaugcuguacgcgaugagccggcucggccgcgaggacacgaucaagauccugcgggacgccggguaccacgugaaggccaacggcguggacgucaccacccaccgccaggacaucaacggcaaggagaugaaguucgaggugcugacccucgccucccugacgaccgagauccagaucaacaucgagaucgagagccggaaguccuacaagaagaugcugaaggagaugggggagguggccccggaguaccgccacgacagccccgacugcggcaugaucauccucugcaucgcggcccuggucaucaccaagcuggccgccggggaccgguccggccucaccgcggugauccgccgggccaacaacgugcugaagaacgagaugaagcgcuacaaggggcugcuccccaaggacaucgccaacagcuucuacgaggucuucgagaagcacccccacuucaucgacguguucgugcacuucggcaucgcccaguccagcacgcggggcgggucccgcgucgagggcaucuucgccgggcuguucaugaacgcguacggcgccggccaggugaugcugcgguggggcgugcucgccaagagcgucaagaacaucaugcuggggcacgccuccgugcaggccgagauggagcaggucguggagguguacgaguacgcgcagaagcucgggggcgaggccggguucuaccacauccugaacaacccgaaggccagccugcugucccucacccaguucccccacuucagcagcgugguccugggcaacgccgccggccuggggaucaugggcgaguaccgcgggacgccccggaaccaggaccucuacgacgcggccaaggccuacgccgagcagcugaaggagaacggcgugaucaacuacuccgugcuggaccucaccgccgaggagcuggaggcgaucaagcaccagcugaaccccaaggacaacgacgucgagcucugaggacuaguguccaccugucccuccugggcugcuggauugucucguuuuccugccaaauaaacaggaucagcgcuuuacagaucuaaaaaaaaaaaaaaaaaaaaaaaaaaaaaaaaaaaaaaaaaaaaaaaaaaaaaaaaaaaaaaaaugcaucccccccccccccccccccccccccccccccaaaggcucuuuucagagccaccagaauu

SEQ ID NO: 10201 - RNA, 1465 nt, Artificial Sequence
  mRNA product Design b-3 comprising derived and/or modified sequence from HRSV(A2)__P03418.1__N (opt2)
gggagagucccgcagucggcguccagcggcucugcuuguucgugugugugucguugcaggccuuauucaagcuuaccauggcccucuccaaggucaagcucaacgacacccucaacaaggaccagcuccucuccuccuccaaguacaccauccagcgcuccaccggcgacuccaucgacacccccaacuacgacguccagaagcacaucaacaagcucugcggcaugcuccucaucaccgaggacgccaaccacaaguucaccggccucaucggcaugcucuacgccaugucccgccucggccgcgaggacaccaucaagauccuccgcgacgccggcuaccacgucaaggccaacggcgucgacgucaccacccaccgccaggacaucaacggcaaggagaugaaguucgagguccucacccucgccucccucaccaccgagauccagaucaacaucgagaucgagucccgcaaguccuacaagaagaugcucaaggagaugggcgaggucgcccccgaguaccgccacgacucccccgacugcggcaugaucauccucugcaucgccgcccucgucaucaccaagcucgccgccggcgaccgcuccggccucaccgccgucauccgccgcgccaacaacguccucaagaacgagaugaagcgcuacaagggccuccuccccaaggacaucgccaacuccuucuacgaggucuucgagaagcacccccacuucaucgacgucuucguccacuucggcaucgcccaguccuccacccgcggcggcucccgcgucgagggcaucuucgccggccucuucaugaacgccuacggcgccggccaggucaugcuccgcuggggcguccucgccaaguccgucaagaacaucaugcucggccacgccuccguccaggccgagauggagcaggucgucgaggucuacgaguacgcccagaagcucggcggcgaggccggcuucuaccacauccucaacaaccccaaggccucccuccucucccucacccaguucccccacuucuccuccgucguccucggcaacgccgccggccucggcaucaugggcgaguaccgcggcaccccccgcaaccaggaccucuacgacgccgccaaggccuacgccgagcagcucaaggagaacggcgucaucaacuacuccguccucgaccucaccgccgaggagcucgaggccaucaagcaccagcucaaccccaaggacaacgacgucgagcucugaggacuaguguccaccugucccuccugggcugcuggauugucucguuuuccugccaaauaaacaggaucagcgcuuuacagaucuaaaaaaaaaaaaaaaaaaaaaaaaaaaaaaaaaaaaaaaaaaaaaaaaaaaaaaaaaaaaaaaaugcaucccccccccccccccccccccccccccccccaaaggcucuuuucagagccaccagaauu

SEQ ID NO: 10202 - RNA, 1465 nt, Artificial Sequence
  mRNA product Design b-3 comprising derived and/or modified sequence from HRSV(A2)__P03418.1__N (opt3)
gggagagucccgcagucggcguccagcggcucugcuuguucgugugugugucguugcaggccuuauucaagcuuaccauggcccugagcaaggugaaacucaacgacacccuuaauaaggaucagcuguuguccucuucaaaauacacaauccaaagaaguacuggcgacagcauugauacgcccaacuaugacguccagaagcacauaaauaaauuaugcgggaugcugcuaaucaccgaggaugcuaaccauaaguucacaggacucauugguaugcuguacgcaauguccaggcuuggccgggaagacacuaucaagauucugcgcgaugccggguaucacguuaaagcgaauggaguggacguaaccacacaucgacaggauaucaacggcaaggagaugaaauuugaaguguugacccucgcuucucugacuacagagauacagaucaauauugaaaucgagucgcguaagucauacaaaaagaugcugaaggagaugggugaagucgccccugaguauagacacgacagcccagauugugggaugauuauccucugcauagcagccuuagugauuaccaaacuggcugcaggagacaggaguggccuuacggccguuauccggcgcgcuaacaauguguugaagaacgaaaugaaaagauacaagggccugcuaccgaaagauauugccaauuccuucuaugaggucuuugagaagcauccccacuucaucgacguguuuguacacuucgggaucgcgcaaucuagcacuaggggagguucccggguugaaggcauuuuugcaggacucuucaugaacgccuacggggcuggccaggugaugcugcgcugggguguccuugccaaaucagugaagaauauaaugcuggggcaugcaagugugcaggcugagauggaacaggucguugagguguacgaauaugcccaaaaguugggaggcgaggcgggcuuuuaccacauccucaacaauccuaaagccagccuguuaucucugacccaguucccacauuuuuccucaguagugcucgggaacgcagcuggacuugguauuaugggcgaguaucgagggacacccagaaaccaggaccuguacgaugccgcuaaggccuaugcagaacaguugaaagagaauggagucaucaacuacagcgugcuagaccugacugccgaggaacucgaagcuauaaagcaccaacugaauccuaaagauaacgacguugagcuuugaggacuaguguccaccugucccuccugggcugcuggauugucucguuuuccugccaaauaaacaggaucagcgcuuuacagaucuaaaaaaaaaaaaaaaaaaaaaaaaaaaaaaaaaaaaaaaaaaaaaaaaaaaaaaaaaaaaaaaaugcaucccccccccccccccccccccccccccccccaaaggcucuuuucagagccaccagaauu

SEQ ID NO: 10203 - RNA, 1465 nt, Artificial Sequence
  mRNA product Design b-3 comprising derived and/or modified sequence from HRSV(A2)__P03418.1__N (opt4)
gggagagucccgcagucggcguccagcggcucugcuuguucgugugugugucguugcaggccuuauucaagcuuaccauggcccugagcaaggugaagcugaacgacacccugaacaaggaccagcugcugagcagcagcaaguacaccauccagagaagcaccggcgacagcaucgacacccccaacuacgacgugcagaagcacaucaacaagcugugcggcaugcugcugaucaccgaggacgccaaccacaaguucaccggccugaucggcaugcuguacgccaugagcagacugggcagagaggacaccaucaagauccugagagacgccggcuaccacgugaaggccaacggcguggacgugaccacccacagacaggacaucaacggcaaggagaugaaguucgaggugcugacccuggccagccugaccaccgagauccagaucaacaucgagaucgagagcagaaagagcuacaagaagaugcugaaggagaugggcgagguggcccccgaguacagacacgacagccccgacugcggcaugaucauccugugcaucgccgcccuggugaucaccaagcuggccgccggcgacagaagcggccugaccgccgugaucagaagagccaacaacgugcugaagaacgagaugaagagauacaagggccugcugcccaaggacaucgccaacagcuucuacgagguguucgagaagcacccccacuucaucgacguguucgugcacuucggcaucgcccagagcagcaccagaggcggcagcagaguggagggcaucuucgccggccuguucaugaacgccuacggcgccggccaggugaugcugagauggggcgugcuggccaagagcgugaagaacaucaugcugggccacgccagcgugcaggccgagauggagcaggugguggagguguacgaguacgcccagaagcugggcggcgaggccggcuucuaccacauccugaacaaccccaaggccagccugcugagccugacccaguucccccacuucagcagcguggugcugggcaacgccgccggccugggcaucaugggcgaguacagaggcacccccagaaaccaggaccuguacgacgccgccaaggccuacgccgagcagcugaaggagaacggcgugaucaacuacagcgugcuggaccugaccgccgaggagcuggaggccaucaagcaccagcugaaccccaaggacaacgacguggagcugugaggacuaguguccaccugucccuccugggcugcuggauugucucguuuuccugccaaauaaacaggaucagcgcuuuacagaucuaaaaaaaaaaaaaaaaaaaaaaaaaaaaaaaaaaaaaaaaaaaaaaaaaaaaaaaaaaaaaaaaugcaucccccccccccccccccccccccccccccccaaaggcucuuuucagagccaccagaauu

SEQ ID NO: 10204 - RNA, 1465 nt, Artificial Sequence
  mRNA product Design b-3 comprising derived and/or modified sequence from HRSV(A2)__P03418.1__N (opt5)
gggagagucccgcagucggcguccagcggcucugcuuguucgugugugugucguugcaggccuuauucaagcuuaccauggcccugagcaaggugaaacucaacgacacccugaauaaggaucagcuucuguccucuagcaaauacacaauccaaagauccacgggcgacucuauugauacccccaacuaugacguccagaagcacaucaauaaacucugcgggaugcugcuuauuacagaggaugcuaaccauaaguucaccggacugaucggcaugcucuacgccaugagccggcuggggcgcgaagacacaauuaagauccugagagaugcgggauaucacguuaaagcuaauggcguggacgugaccacacaucggcaggauaucaacgggaaggagaugaaauuugaaguccucacccuggccucccuuacgaccgagauucagaucaauauugaaaucgagucucgcaagagcuacaaaaagaugcugaaggagaugggagaaguggccccugaguauagacacgacuccccggauuguggcaugauuauccucugcauugcugcccugguuaucacaaaacuugcugccggcgaccggagcgggcugaccgcggugauccgcagagccaacaauguccucaagaacgaaaugaaacgguacaagggacugcugcccaaagauauugcuaauucuuucuaugagguguuugagaagcauccucacuucaucgacguuuuugugcacuucggcauugcccaauccagcacacgcgggggaucuagagucgaaggcaucuuugcuggacucuucaugaacgccuacggggcgggccaggugaugcugcgguggggcgugcuugccaaauccgucaagaauauuaugcuggggcaugcuagcguucaggccgagauggaacaggugguggaggucuacgaauaugcucaaaagcucggaggcgaggccggguuuuaccacauccugaacaaucccaaagccucucuucugucccucacccaguucccucauuuuagcuccgugguucugggaaacgcugcgggccuggggaucaugggagaguaucgcggcacgcccagaaaccaggaccucuacgaugccgcuaaggccuaugccgaacagcugaaagagaauggcgugauuaacuacucuguccuugaccugacagcugaggaacucgaagccaucaagcaccaacugaauccuaaagauaacgacguggagcuuugaggacuaguguccaccugucccuccugggcugcuggauugucucguuuuccugccaaauaaacaggaucagcgcuuuacagaucuaaaaaaaaaaaaaaaaaaaaaaaaaaaaaaaaaaaaaaaaaaaaaaaaaaaaaaaaaaaaaaaaugcaucccccccccccccccccccccccccccccccaaaggcucuuuucagagccaccagaauu

SEQ ID NO: 10205 - RNA, 1465 nt, Artificial Sequence
  mRNA product Design b-3 comprising derived and/or modified sequence from HRSV(A2)__P03418.1__N (opt6)
gggagagucccgcagucggcguccagcggcucugcuuguucgugugugugucguugcaggccuuauucaagcuuaccauggcacuaagcaaagucaaauuaaacgacacauuaaacaaagaccaacucuuaucaucaucaaaauacacaauacaaagaagcaccggagacaguaucgacacaccaaacuaugacguccaaaaacauauaaauaaauuaugcggcaugcucuuaaucacagaagacgccaaccauaaauuuacaggauuaauaggaauguuauaugcaaugucacgacuagguagagaagacacaauaaaaauacuaagagacgcaggcuaucacguaaaagcaaauggaguagacguaaccacacacagacaagacauaaauggaaaagaaaugaaauuugaaguauuaacacuagcaucacuaacaacagaaauacaaaucaacauagaaauagaaucaagaaaaagcuacaaaaaaauguuaaaagaaaugggagaagucgcaccagaauauagacaugauucaccagacugcggaaugauaauacuaugcauagcagcccuaguaauuacaaaacuagcagcaggagacagaagcggauuaacagcaguaauaagaagagcaaacaacguacuaaaaaacgaaaugaaaagauauaaaggauuauuaccaaaagacauagcaaacucauucuaugaaguauucgaaaaacacccccacuuuauagacgucuucguacacuucggaauagcccaaucauccacaagaggaggaucaagagucgaaggaauauucgcaggauuauucaugaacgcauauggcgcaggacaaguaaugcuaagauggggaguacuagcaaaauccgucaaaaacauaaugcuaggacacgcaucaguucaagcagaaauggaacaaguaguagaaguauacgaauacgcccaaaaacuaggaggagaagcaggauucuaccacauacuaaauaauccaaaagcaucacuacuaagccuaacccaauuuccccacuucucaaguguaguauuaggaaaugcagcuggacuaggaauaaugggagaauacagaggaacaccaagaaaccaagacuuauacgacgcagcaaaagcauacgcagagcaacuuaaagaaaacggaguaauaaacuauagcguacuagacuuaacagcagaagaacuggaagcaauaaaacaucaauuaaacccgaaagacaaugacguagaauuauaaggacuaguguccaccugucccuccugggcugcuggauugucucguuuuccugccaaauaaacaggaucagcgcuuuacagaucuaaaaaaaaaaaaaaaaaaaaaaaaaaaaaaaaaaaaaaaaaaaaaaaaaaaaaaaaaaaaaaaaugcaucccccccccccccccccccccccccccccccaaaggcucuuuucagagccaccagaauu

SEQ ID NO: 10206 - RNA, 1465 nt, Artificial Sequence
  mRNA product Design b-3 comprising derived and/or modified sequence from HRSV(A2)__P03418.1__N (opt11)
gggagagucccgcagucggcguccagcggcucugcuuguucgugugugugucguugcaggccuuauucaagcuuaccauggcacucucgaaaguaaaacucaacgacacccucaacaaagaccaacuccuuuccagcuccaaauacaccauccaacgauccaccggagacuccaucgacacgcccaacuacgacguccagaaacacaucaacaagcucugcggaaugcuacuaaucaccgaggacgccaaccacaaauucacaggacuuauagggaugcucuacgccaugucccgccucggacgcgaagacacaauaaaaauccuacgagacgccggcuaccacguaaaggcaaacggcgucgacgucaccacacacagacaagacaucaacggaaaggaaaugaaauucgaaguccucacccucgccagccuaaccaccgagauccaaaucaacaucgaaaucgaaucacgcaaauccuacaagaaaaugcucaaagaaaugggagaagucgcccccgaauaccgucacgacucgcccgacugcggcaugauaauccuaugcaucgccgcacucgucauaaccaaacucgccgccggugaccgaucaggacugacagcagucauccgccgagcaaacaacgugcucaaaaacgaaaugaaacgcuacaaaggccuacuccccaaagacaucgccaacuccuucuacgaagucuucgaaaaacacccacacuucaucgacgucuucguccacuucggcaucgcacaaucaucaaccagaggcggcagccgcguugaaggcaucuucgcaggacucuuuaugaacgccuacggcgccggccaagucaugcuccgcuggggcguccuggcaaaaagcgucaaaaacaucaugcuaggccacgcuagcguccaagccgaaauggaacaagucgucgaaguuuacgaguacgcacaaaaacucggcggcgaagcaggcuucuaccacauccuaaacaaccccaaagccucccugcuaucacucacccaauucccccacuucuccagcgucguccucggcaacgccgcaggacuaggcaucaugggagaauaccgcgggacaccgcgcaaccaagaccucuacgacgccgccaaagccuacgccgaacaacucaaagaaaacggcgucauaaacuacucaguccucgaccucaccgccgaagaacucgaagccaucaaacaccaacucaacccaaaagacaacgacgucgaauuauaaggacuaguguccaccugucccuccugggcugcuggauugucucguuuuccugccaaauaaacaggaucagcgcuuuacagaucuaaaaaaaaaaaaaaaaaaaaaaaaaaaaaaaaaaaaaaaaaaaaaaaaaaaaaaaaaaaaaaaaugcaucccccccccccccccccccccccccccccccaaaggcucuuuucagagccaccagaauu

SEQ ID NO: 10207 - RNA, 1516 nt, Artificial Sequence
  mRNA product Design b-4 comprising derived and/or modified sequence from HRSV(A2)__P03418.1__N (wt)
gggagagucccgcagucggcguccagcggcucugcuuguucgugugugugucguugcaggccuuauucaagcuuaccauggcucuuagcaaagucaaguugaaugauacacucaacaaagaucaacuucugucauccagcaaauacaccauccaacggagcacaggagauaguauugauacuccuaauuaugaugugcagaaacacaucaauaaguuauguggcauguuauuaaucacagaagaugcuaaucauaaauucacuggguuaauagguauguuauaugcgaugucuagguuaggaagagaagacaccauaaaaauacucagagaugcgggauaucauguaaaagcaaauggaguagauguaacaacacaucgucaagacauuaauggaaaagaaaugaaauuugaaguguuaacauuggcaagcuuaacaacugaaauucaaaucaacauugagauagaaucuagaaaauccuacaaaaaaaugcuaaaagaaaugggagagguagcuccagaauacaggcaugacucuccugauugugggaugauaauauuauguauagcagcauuaguaauaacuaaauuagcagcaggggacagaucuggucuuacagccgugauuaggagagcuaauaauguccuaaaaaaugaaaugaaacguuacaaaggcuuacuacccaaggacauagccaacagcuucuaugaaguguuugaaaaacauccccacuuuauagauguuuuuguucauuuugguauagcacaaucuucuaccagagguggcaguagaguugaagggauuuuugcaggauuguuuaugaaugccuauggugcagggcaagugauguuacgguggggagucuuagcaaaaucaguuaaaaauauuauguuaggacaugcuagugugcaagcagaaauggaacaaguuguugagguuuaugaauaugcccaaaaauuggguggugaagcaggauucuaccauauauugaacaacccaaaagcaucauuauuaucuuugacucaauuuccucacuucuccaguguaguauuaggcaaugcugcuggccuaggcauaaugggagaguacagagguacaccgaggaaucaagaucuauaugaugcagcaaaggcauaugcugaacaacucaaagaaaauggugugauuaacuacaguguacuagacuugacagcagaagaacuagaggcuaucaaacaucagcuuaauccaaaagauaaugauguagagcuuugaggacuaguaauaaggaaacuguaugaaugucugugggcaggaagugaagagauccuucuguaaagguuuuuggaauuaugucugcugaauaauaaacuuuuuugaaauaauaaaucugguagaaaaaugagaucuaaaaaaaaaaaaaaaaaaaaaaaaaaaaaaaaaaaaaaaaaaaaaaaaaaaaaaaaaaaaaaaaugcaucccccccccccccccccccccccccccccccaaaggcucuuuucagagccaccagaauu

SEQ ID NO: 10208 - RNA, 1516 nt, Artificial Sequence
  mRNA product Design b-4 comprising derived and/or modified sequence from HRSV(A2)__P03418.1__N (opt1)
gggagagucccgcagucggcguccagcggcucugcuuguucgugugugugucguugcaggccuuauucaagcuuaccauggcccugagcaaggugaagcucaacgacacccugaacaaggaccagcugcucuccagcuccaaguacaccauccagcgcagcaccggcgacuccaucgacacccccaacuacgacguccagaagcacaucaacaagcugugcgggaugcugcucaucaccgaggacgccaaccacaaguucaccggccugaucgggaugcuguacgcgaugagccggcucggccgcgaggacacgaucaagauccugcgggacgccggguaccacgugaaggccaacggcguggacgucaccacccaccgccaggacaucaacggcaaggagaugaaguucgaggugcugacccucgccucccugacgaccgagauccagaucaacaucgagaucgagagccggaaguccuacaagaagaugcugaaggagaugggggagguggccccggaguaccgccacgacagccccgacugcggcaugaucauccucugcaucgcggcccuggucaucaccaagcuggccgccggggaccgguccggccucaccgcggugauccgccgggccaacaacgugcugaagaacgagaugaagcgcuacaaggggcugcuccccaaggacaucgccaacagcuucuacgaggucuucgagaagcacccccacuucaucgacguguucgugcacuucggcaucgcccaguccagcacgcggggcgggucccgcgucgagggcaucuucgccgggcuguucaugaacgcguacggcgccggccaggugaugcugcgguggggcgugcucgccaagagcgucaagaacaucaugcuggggcacgccuccgugcaggccgagauggagcaggucguggagguguacgaguacgcgcagaagcucgggggcgaggccggguucuaccacauccugaacaacccgaaggccagccugcugucccucacccaguucccccacuucagcagcgugguccugggcaacgccgccggccuggggaucaugggcgaguaccgcgggacgccccggaaccaggaccucuacgacgcggccaaggccuacgccgagcagcugaaggagaacggcgugaucaacuacuccgugcuggaccucaccgccgaggagcuggaggcgaucaagcaccagcugaaccccaaggacaacgacgucgagcucugaggacuaguaauaaggaaacuguaugaaugucugugggcaggaagugaagagauccuucuguaaagguuuuuggaauuaugucugcugaauaauaaacuuuuuugaaauaauaaaucugguagaaaaaugagaucuaaaaaaaaaaaaaaaaaaaaaaaaaaaaaaaaaaaaaaaaaaaaaaaaaaaaaaaaaaaaaaaaugcaucccccccccccccccccccccccccccccccaaaggcucuuuucagagccaccagaauu

SEQ ID NO: 10209 - RNA, 1516 nt, Artificial Sequence
  mRNA product Design b-4 comprising derived and/or modified sequence from HRSV(A2)__P03418.1__N (opt2)
gggagagucccgcagucggcguccagcggcucugcuuguucgugugugugucguugcaggccuuauucaagcuuaccauggcccucuccaaggucaagcucaacgacacccucaacaaggaccagcuccucuccuccuccaaguacaccauccagcgcuccaccggcgacuccaucgacacccccaacuacgacguccagaagcacaucaacaagcucugcggcaugcuccucaucaccgaggacgccaaccacaaguucaccggccucaucggcaugcucuacgccaugucccgccucggccgcgaggacaccaucaagauccuccgcgacgccggcuaccacgucaaggccaacggcgucgacgucaccacccaccgccaggacaucaacggcaaggagaugaaguucgagguccucacccucgccucccucaccaccgagauccagaucaacaucgagaucgagucccgcaaguccuacaagaagaugcucaaggagaugggcgaggucgcccccgaguaccgccacgacucccccgacugcggcaugaucauccucugcaucgccgcccucgucaucaccaagcucgccgccggcgaccgcuccggccucaccgccgucauccgccgcgccaacaacguccucaagaacgagaugaagcgcuacaagggccuccuccccaaggacaucgccaacuccuucuacgaggucuucgagaagcacccccacuucaucgacgucuucguccacuucggcaucgcccaguccuccacccgcggcggcucccgcgucgagggcaucuucgccggccucuucaugaacgccuacggcgccggccaggucaugcuccgcuggggcguccucgccaaguccgucaagaacaucaugcucggccacgccuccguccaggccgagauggagcaggucgucgaggucuacgaguacgcccagaagcucggcggcgaggccggcuucuaccacauccucaacaaccccaaggccucccuccucucccucacccaguucccccacuucuccuccgucguccucggcaacgccgccggccucggcaucaugggcgaguaccgcggcaccccccgcaaccaggaccucuacgacgccgccaaggccuacgccgagcagcucaaggagaacggcgucaucaacuacuccguccucgaccucaccgccgaggagcucgaggccaucaagcaccagcucaaccccaaggacaacgacgucgagcucugaggacuaguaauaaggaaacuguaugaaugucugugggcaggaagugaagagauccuucuguaaagguuuuuggaauuaugucugcugaauaauaaacuuuuuugaaauaauaaaucugguagaaaaaugagaucuaaaaaaaaaaaaaaaaaaaaaaaaaaaaaaaaaaaaaaaaaaaaaaaaaaaaaaaaaaaaaaaaugcaucccccccccccccccccccccccccccccccaaaggcucuuuucagagccaccagaauu

SEQ ID NO: 10210 - RNA, 1516 nt, Artificial Sequence
  mRNA product Design b-4 comprising derived and/or modified sequence from HRSV(A2)__P03418.1__N (opt3)
gggagagucccgcagucggcguccagcggcucugcuuguucgugugugugucguugcaggccuuauucaagcuuaccauggcccugagcaaggugaaacucaacgacacccuuaauaaggaucagcuguuguccucuucaaaauacacaauccaaagaaguacuggcgacagcauugauacgcccaacuaugacguccagaagcacauaaauaaauuaugcgggaugcugcuaaucaccgaggaugcuaaccauaaguucacaggacucauugguaugcuguacgcaauguccaggcuuggccgggaagacacuaucaagauucugcgcgaugccggguaucacguuaaagcgaauggaguggacguaaccacacaucgacaggauaucaacggcaaggagaugaaauuugaaguguugacccucgcuucucugacuacagagauacagaucaauauugaaaucgagucgcguaagucauacaaaaagaugcugaaggagaugggugaagucgccccugaguauagacacgacagcccagauugugggaugauuauccucugcauagcagccuuagugauuaccaaacuggcugcaggagacaggaguggccuuacggccguuauccggcgcgcuaacaauguguugaagaacgaaaugaaaagauacaagggccugcuaccgaaagauauugccaauuccuucuaugaggucuuugagaagcauccccacuucaucgacguguuuguacacuucgggaucgcgcaaucuagcacuaggggagguucccggguugaaggcauuuuugcaggacucuucaugaacgccuacggggcuggccaggugaugcugcgcugggguguccuugccaaaucagugaagaauauaaugcuggggcaugcaagugugcaggcugagauggaacaggucguugagguguacgaauaugcccaaaaguugggaggcgaggcgggcuuuuaccacauccucaacaauccuaaagccagccuguuaucucugacccaguucccacauuuuuccucaguagugcucgggaacgcagcuggacuugguauuaugggcgaguaucgagggacacccagaaaccaggaccuguacgaugccgcuaaggccuaugcagaacaguugaaagagaauggagucaucaacuacagcgugcuagaccugacugccgaggaacucgaagcuauaaagcaccaacugaauccuaaagauaacgacguugagcuuugaggacuaguaauaaggaaacuguaugaaugucugugggcaggaagugaagagauccuucuguaaagguuuuuggaauuaugucugcugaauaauaaacuuuuuugaaauaauaaaucugguagaaaaaugagaucuaaaaaaaaaaaaaaaaaaaaaaaaaaaaaaaaaaaaaaaaaaaaaaaaaaaaaaaaaaaaaaaaugcaucccccccccccccccccccccccccccccccaaaggcucuuuucagagccaccagaauu

SEQ ID NO: 10211 - RNA, 1516 nt, Artificial Sequence
  mRNA product Design b-4 comprising derived and/or modified sequence from HRSV(A2)__P03418.1__N (opt4)
gggagagucccgcagucggcguccagcggcucugcuuguucgugugugugucguugcaggccuuauucaagcuuaccauggcccugagcaaggugaagcugaacgacacccugaacaaggaccagcugcugagcagcagcaaguacaccauccagagaagcaccggcgacagcaucgacacccccaacuacgacgugcagaagcacaucaacaagcugugcggcaugcugcugaucaccgaggacgccaaccacaaguucaccggccugaucggcaugcuguacgccaugagcagacugggcagagaggacaccaucaagauccugagagacgccggcuaccacgugaaggccaacggcguggacgugaccacccacagacaggacaucaacggcaaggagaugaaguucgaggugcugacccuggccagccugaccaccgagauccagaucaacaucgagaucgagagcagaaagagcuacaagaagaugcugaaggagaugggcgagguggcccccgaguacagacacgacagccccgacugcggcaugaucauccugugcaucgccgcccuggugaucaccaagcuggccgccggcgacagaagcggccugaccgccgugaucagaagagccaacaacgugcugaagaacgagaugaagagauacaagggccugcugcccaaggacaucgccaacagcuucuacgagguguucgagaagcacccccacuucaucgacguguucgugcacuucggcaucgcccagagcagcaccagaggcggcagcagaguggagggcaucuucgccggccuguucaugaacgccuacggcgccggccaggugaugcugagauggggcgugcuggccaagagcgugaagaacaucaugcugggccacgccagcgugcaggccgagauggagcaggugguggagguguacgaguacgcccagaagcugggcggcgaggccggcuucuaccacauccugaacaaccccaaggccagccugcugagccugacccaguucccccacuucagcagcguggugcugggcaacgccgccggccugggcaucaugggcgaguacagaggcacccccagaaaccaggaccuguacgacgccgccaaggccuacgccgagcagcugaaggagaacggcgugaucaacuacagcgugcuggaccugaccgccgaggagcuggaggccaucaagcaccagcugaaccccaaggacaacgacguggagcugugaggacuaguaauaaggaaacuguaugaaugucugugggcaggaagugaagagauccuucuguaaagguuuuuggaauuaugucugcugaauaauaaacuuuuuugaaauaauaaaucugguagaaaaaugagaucuaaaaaaaaaaaaaaaaaaaaaaaaaaaaaaaaaaaaaaaaaaaaaaaaaaaaaaaaaaaaaaaaugcaucccccccccccccccccccccccccccccccaaaggcucuuuucagagccaccagaauu

SEQ ID NO: 10212 - RNA, 1516 nt, Artificial Sequence
  mRNA product Design b-4 comprising derived and/or modified sequence from HRSV(A2)__P03418.1__N (opt5)
gggagagucccgcagucggcguccagcggcucugcuuguucgugugugugucguugcaggccuuauucaagcuuaccauggcccugagcaaggugaaacucaacgacacccugaauaaggaucagcuucuguccucuagcaaauacacaauccaaagauccacgggcgacucuauugauacccccaacuaugacguccagaagcacaucaauaaacucugcgggaugcugcuuauuacagaggaugcuaaccauaaguucaccggacugaucggcaugcucuacgccaugagccggcuggggcgcgaagacacaauuaagauccugagagaugcgggauaucacguuaaagcuaauggcguggacgugaccacacaucggcaggauaucaacgggaaggagaugaaauuugaaguccucacccuggccucccuuacgaccgagauucagaucaauauugaaaucgagucucgcaagagcuacaaaaagaugcugaaggagaugggagaaguggccccugaguauagacacgacuccccggauuguggcaugauuauccucugcauugcugcccugguuaucacaaaacuugcugccggcgaccggagcgggcugaccgcggugauccgcagagccaacaauguccucaagaacgaaaugaaacgguacaagggacugcugcccaaagauauugcuaauucuuucuaugagguguuugagaagcauccucacuucaucgacguuuuugugcacuucggcauugcccaauccagcacacgcgggggaucuagagucgaaggcaucuuugcuggacucuucaugaacgccuacggggcgggccaggugaugcugcgguggggcgugcuugccaaauccgucaagaauauuaugcuggggcaugcuagcguucaggccgagauggaacaggugguggaggucuacgaauaugcucaaaagcucggaggcgaggccggguuuuaccacauccugaacaaucccaaagccucucuucugucccucacccaguucccucauuuuagcuccgugguucugggaaacgcugcgggccuggggaucaugggagaguaucgcggcacgcccagaaaccaggaccucuacgaugccgcuaaggccuaugccgaacagcugaaagagaauggcgugauuaacuacucuguccuugaccugacagcugaggaacucgaagccaucaagcaccaacugaauccuaaagauaacgacguggagcuuugaggacuaguaauaaggaaacuguaugaaugucugugggcaggaagugaagagauccuucuguaaagguuuuuggaauuaugucugcugaauaauaaacuuuuuugaaauaauaaaucugguagaaaaaugagaucuaaaaaaaaaaaaaaaaaaaaaaaaaaaaaaaaaaaaaaaaaaaaaaaaaaaaaaaaaaaaaaaaugcaucccccccccccccccccccccccccccccccaaaggcucuuuucagagccaccagaauu

SEQ ID NO: 10213 - RNA, 1516 nt, Artificial Sequence
  mRNA product Design b-4 comprising derived and/or modified sequence from HRSV(A2)__P03418.1__N (opt6)
gggagagucccgcagucggcguccagcggcucugcuuguucgugugugugucguugcaggccuuauucaagcuuaccauggcacuaagcaaagucaaauuaaacgacacauuaaacaaagaccaacucuuaucaucaucaaaauacacaauacaaagaagcaccggagacaguaucgacacaccaaacuaugacguccaaaaacauauaaauaaauuaugcggcaugcucuuaaucacagaagacgccaaccauaaauuuacaggauuaauaggaauguuauaugcaaugucacgacuagguagagaagacacaauaaaaauacuaagagacgcaggcuaucacguaaaagcaaauggaguagacguaaccacacacagacaagacauaaauggaaaagaaaugaaauuugaaguauuaacacuagcaucacuaacaacagaaauacaaaucaacauagaaauagaaucaagaaaaagcuacaaaaaaauguuaaaagaaaugggagaagucgcaccagaauauagacaugauucaccagacugcggaaugauaauacuaugcauagcagcccuaguaauuacaaaacuagcagcaggagacagaagcggauuaacagcaguaauaagaagagcaaacaacguacuaaaaaacgaaaugaaaagauauaaaggauuauuaccaaaagacauagcaaacucauucuaugaaguauucgaaaaacacccccacuuuauagacgucuucguacacuucggaauagcccaaucauccacaagaggaggaucaagagucgaaggaauauucgcaggauuauucaugaacgcauauggcgcaggacaaguaaugcuaagauggggaguacuagcaaaauccgucaaaaacauaaugcuaggacacgcaucaguucaagcagaaauggaacaaguaguagaaguauacgaauacgcccaaaaacuaggaggagaagcaggauucuaccacauacuaaauaauccaaaagcaucacuacuaagccuaacccaauuuccccacuucucaaguguaguauuaggaaaugcagcuggacuaggaauaaugggagaauacagaggaacaccaagaaaccaagacuuauacgacgcagcaaaagcauacgcagagcaacuuaaagaaaacggaguaauaaacuauagcguacuagacuuaacagcagaagaacuggaagcaauaaaacaucaauuaaacccgaaagacaaugacguagaauuauaaggacuaguaauaaggaaacuguaugaaugucugugggcaggaagugaagagauccuucuguaaagguuuuuggaauuaugucugcugaauaauaaacuuuuuugaaauaauaaaucugguagaaaaaugagaucuaaaaaaaaaaaaaaaaaaaaaaaaaaaaaaaaaaaaaaaaaaaaaaaaaaaaaaaaaaaaaaaaugcaucccccccccccccccccccccccccccccccaaaggcucuuuucagagccaccagaauu

SEQ ID NO: 10214 - RNA, 1516 nt, Artificial Sequence
  mRNA product Design b-4 comprising derived and/or modified sequence from HRSV(A2)__P03418.1__N (opt11)
gggagagucccgcagucggcguccagcggcucugcuuguucgugugugugucguugcaggccuuauucaagcuuaccauggcacucucgaaaguaaaacucaacgacacccucaacaaagaccaacuccuuuccagcuccaaauacaccauccaacgauccaccggagacuccaucgacacgcccaacuacgacguccagaaacacaucaacaagcucugcggaaugcuacuaaucaccgaggacgccaaccacaaauucacaggacuuauagggaugcucuacgccaugucccgccucggacgcgaagacacaauaaaaauccuacgagacgccggcuaccacguaaaggcaaacggcgucgacgucaccacacacagacaagacaucaacggaaaggaaaugaaauucgaaguccucacccucgccagccuaaccaccgagauccaaaucaacaucgaaaucgaaucacgcaaauccuacaagaaaaugcucaaagaaaugggagaagucgcccccgaauaccgucacgacucgcccgacugcggcaugauaauccuaugcaucgccgcacucgucauaaccaaacucgccgccggugaccgaucaggacugacagcagucauccgccgagcaaacaacgugcucaaaaacgaaaugaaacgcuacaaaggccuacuccccaaagacaucgccaacuccuucuacgaagucuucgaaaaacacccacacuucaucgacgucuucguccacuucggcaucgcacaaucaucaaccagaggcggcagccgcguugaaggcaucuucgcaggacucuuuaugaacgccuacggcgccggccaagucaugcuccgcuggggcguccuggcaaaaagcgucaaaaacaucaugcuaggccacgcuagcguccaagccgaaauggaacaagucgucgaaguuuacgaguacgcacaaaaacucggcggcgaagcaggcuucuaccacauccuaaacaaccccaaagccucccugcuaucacucacccaauucccccacuucuccagcgucguccucggcaacgccgcaggacuaggcaucaugggagaauaccgcgggacaccgcgcaaccaagaccucuacgacgccgccaaagccuacgccgaacaacucaaagaaaacggcgucauaaacuacucaguccucgaccucaccgccgaagaacucgaagccaucaaacaccaacucaacccaaaagacaacgacgucgaauuauaaggacuaguaauaaggaaacuguaugaaugucugugggcaggaagugaagagauccuucuguaaagguuuuuggaauuaugucugcugaauaauaaacuuuuuugaaauaauaaaucugguagaaaaaugagaucuaaaaaaaaaaaaaaaaaaaaaaaaaaaaaaaaaaaaaaaaaaaaaaaaaaaaaaaaaaaaaaaaugcaucccccccccccccccccccccccccccccccaaaggcucuuuucagagccaccagaauu

SEQ ID NO: 10215 - RNA, 1578 nt, Artificial Sequence
  mRNA product Design b-5 comprising derived and/or modified sequence from HRSV(A2)__P03418.1__N (wt)
gggagacuccugucgggcggaaguaggaggaguagaguuuaaaaacaguacucuuuuuccgguucgggacguaguugaagcaacgacaagccggauaaccgcucuugagacaggaagcuuaccauggcucuuagcaaagucaaguugaaugauacacucaacaaagaucaacuucugucauccagcaaauacaccauccaacggagcacaggagauaguauugauacuccuaauuaugaugugcagaaacacaucaauaaguuauguggcauguuauuaaucacagaagaugcuaaucauaaauucacuggguuaauagguauguuauaugcgaugucuagguuaggaagagaagacaccauaaaaauacucagagaugcgggauaucauguaaaagcaaauggaguagauguaacaacacaucgucaagacauuaauggaaaagaaaugaaauuugaaguguuaacauuggcaagcuuaacaacugaaauucaaaucaacauugagauagaaucuagaaaauccuacaaaaaaaugcuaaaagaaaugggagagguagcuccagaauacaggcaugacucuccugauugugggaugauaauauuauguauagcagcauuaguaauaacuaaauuagcagcaggggacagaucuggucuuacagccgugauuaggagagcuaauaauguccuaaaaaaugaaaugaaacguuacaaaggcuuacuacccaaggacauagccaacagcuucuaugaaguguuugaaaaacauccccacuuuauagauguuuuuguucauuuugguauagcacaaucuucuaccagagguggcaguagaguugaagggauuuuugcaggauuguuuaugaaugccuauggugcagggcaagugauguuacgguggggagucuuagcaaaaucaguuaaaaauauuauguuaggacaugcuagugugcaagcagaaauggaacaaguuguugagguuuaugaauaugcccaaaaauuggguggugaagcaggauucuaccauauauugaacaacccaaaagcaucauuauuaucuuugacucaauuuccucacuucuccaguguaguauuaggcaaugcugcuggccuaggcauaaugggagaguacagagguacaccgaggaaucaagaucuauaugaugcagcaaaggcauaugcugaacaacucaaagaaaauggugugauuaacuacaguguacuagacuugacagcagaagaacuagaggcuaucaaacaucagcuuaauccaaaagauaaugauguagagcuuugaggacuaguacuggcugcaucucccuuuccucuguccuccauccuucucccaggauggugaagggggaccugguacccagugauccccaccccaggauccuaaaucaugacuuaccugcuaauaaaaacucauuggaaaagugagaagaucuaaaaaaaaaaaaaaaaaaaaaaaaaaaaaaaaaaaaaaaaaaaaaaaaaaaaaaaaaaaaaaaaugcaucccccccccccccccccccccccccccccccaaaggcucuuuucagagccaccagaauu

SEQ ID NO: 10216 - RNA, 1578 nt, Artificial Sequence
  mRNA product Design b-5 comprising derived and/or modified sequence from HRSV(A2)__P03418.1__N (opt1)
gggagacuccugucgggcggaaguaggaggaguagaguuuaaaaacaguacucuuuuuccgguucgggacguaguugaagcaacgacaagccggauaaccgcucuugagacaggaagcuuaccauggcccugagcaaggugaagcucaacgacacccugaacaaggaccagcugcucuccagcuccaaguacaccauccagcgcagcaccggcgacuccaucgacacccccaacuacgacguccagaagcacaucaacaagcugugcgggaugcugcucaucaccgaggacgccaaccacaaguucaccggccugaucgggaugcuguacgcgaugagccggcucggccgcgaggacacgaucaagauccugcgggacgccggguaccacgugaaggccaacggcguggacgucaccacccaccgccaggacaucaacggcaaggagaugaaguucgaggugcugacccucgccucccugacgaccgagauccagaucaacaucgagaucgagagccggaaguccuacaagaagaugcugaaggagaugggggagguggccccggaguaccgccacgacagccccgacugcggcaugaucauccucugcaucgcggcccuggucaucaccaagcuggccgccggggaccgguccggccucaccgcggugauccgccgggccaacaacgugcugaagaacgagaugaagcgcuacaaggggcugcuccccaaggacaucgccaacagcuucuacgaggucuucgagaagcacccccacuucaucgacguguucgugcacuucggcaucgcccaguccagcacgcggggcgggucccgcgucgagggcaucuucgccgggcuguucaugaacgcguacggcgccggccaggugaugcugcgguggggcgugcucgccaagagcgucaagaacaucaugcuggggcacgccuccgugcaggccgagauggagcaggucguggagguguacgaguacgcgcagaagcucgggggcgaggccggguucuaccacauccugaacaacccgaaggccagccugcugucccucacccaguucccccacuucagcagcgugguccugggcaacgccgccggccuggggaucaugggcgaguaccgcgggacgccccggaaccaggaccucuacgacgcggccaaggccuacgccgagcagcugaaggagaacggcgugaucaacuacuccgugcuggaccucaccgccgaggagcuggaggcgaucaagcaccagcugaaccccaaggacaacgacgucgagcucugaggacuaguacuggcugcaucucccuuuccucuguccuccauccuucucccaggauggugaagggggaccugguacccagugauccccaccccaggauccuaaaucaugacuuaccugcuaauaaaaacucauuggaaaagugagaagaucuaaaaaaaaaaaaaaaaaaaaaaaaaaaaaaaaaaaaaaaaaaaaaaaaaaaaaaaaaaaaaaaaugcaucccccccccccccccccccccccccccccccaaaggcucuuuucagagccaccagaauu

SEQ ID NO: 10217 - RNA, 1578 nt, Artificial Sequence
  mRNA product Design b-5 comprising derived and/or modified sequence from HRSV(A2)__P03418.1__N (opt2)
gggagacuccugucgggcggaaguaggaggaguagaguuuaaaaacaguacucuuuuuccgguucgggacguaguugaagcaacgacaagccggauaaccgcucuugagacaggaagcuuaccauggcccucuccaaggucaagcucaacgacacccucaacaaggaccagcuccucuccuccuccaaguacaccauccagcgcuccaccggcgacuccaucgacacccccaacuacgacguccagaagcacaucaacaagcucugcggcaugcuccucaucaccgaggacgccaaccacaaguucaccggccucaucggcaugcucuacgccaugucccgccucggccgcgaggacaccaucaagauccuccgcgacgccggcuaccacgucaaggccaacggcgucgacgucaccacccaccgccaggacaucaacggcaaggagaugaaguucgagguccucacccucgccucccucaccaccgagauccagaucaacaucgagaucgagucccgcaaguccuacaagaagaugcucaaggagaugggcgaggucgcccccgaguaccgccacgacucccccgacugcggcaugaucauccucugcaucgccgcccucgucaucaccaagcucgccgccggcgaccgcuccggccucaccgccgucauccgccgcgccaacaacguccucaagaacgagaugaagcgcuacaagggccuccuccccaaggacaucgccaacuccuucuacgaggucuucgagaagcacccccacuucaucgacgucuucguccacuucggcaucgcccaguccuccacccgcggcggcucccgcgucgagggcaucuucgccggccucuucaugaacgccuacggcgccggccaggucaugcuccgcuggggcguccucgccaaguccgucaagaacaucaugcucggccacgccuccguccaggccgagauggagcaggucgucgaggucuacgaguacgcccagaagcucggcggcgaggccggcuucuaccacauccucaacaaccccaaggccucccuccucucccucacccaguucccccacuucuccuccgucguccucggcaacgccgccggccucggcaucaugggcgaguaccgcggcaccccccgcaaccaggaccucuacgacgccgccaaggccuacgccgagcagcucaaggagaacggcgucaucaacuacuccguccucgaccucaccgccgaggagcucgaggccaucaagcaccagcucaaccccaaggacaacgacgucgagcucugaggacuaguacuggcugcaucucccuuuccucuguccuccauccuucucccaggauggugaagggggaccugguacccagugauccccaccccaggauccuaaaucaugacuuaccugcuaauaaaaacucauuggaaaagugagaagaucuaaaaaaaaaaaaaaaaaaaaaaaaaaaaaaaaaaaaaaaaaaaaaaaaaaaaaaaaaaaaaaaaugcaucccccccccccccccccccccccccccccccaaaggcucuuuucagagccaccagaauu

SEQ ID NO: 10218 - RNA, 1578 nt, Artificial Sequence
  mRNA product Design b-5 comprising derived and/or modified sequence from HRSV(A2)__P03418.1__N (opt3)
gggagacuccugucgggcggaaguaggaggaguagaguuuaaaaacaguacucuuuuuccgguucgggacguaguugaagcaacgacaagccggauaaccgcucuugagacaggaagcuuaccauggcccugagcaaggugaaacucaacgacacccuuaauaaggaucagcuguuguccucuucaaaauacacaauccaaagaaguacuggcgacagcauugauacgcccaacuaugacguccagaagcacauaaauaaauuaugcgggaugcugcuaaucaccgaggaugcuaaccauaaguucacaggacucauugguaugcuguacgcaauguccaggcuuggccgggaagacacuaucaagauucugcgcgaugccggguaucacguuaaagcgaauggaguggacguaaccacacaucgacaggauaucaacggcaaggagaugaaauuugaaguguugacccucgcuucucugacuacagagauacagaucaauauugaaaucgagucgcguaagucauacaaaaagaugcugaaggagaugggugaagucgccccugaguauagacacgacagcccagauugugggaugauuauccucugcauagcagccuuagugauuaccaaacuggcugcaggagacaggaguggccuuacggccguuauccggcgcgcuaacaauguguugaagaacgaaaugaaaagauacaagggccugcuaccgaaagauauugccaauuccuucuaugaggucuuugagaagcauccccacuucaucgacguguuuguacacuucgggaucgcgcaaucuagcacuaggggagguucccggguugaaggcauuuuugcaggacucuucaugaacgccuacggggcuggccaggugaugcugcgcugggguguccuugccaaaucagugaagaauauaaugcuggggcaugcaagugugcaggcugagauggaacaggucguugagguguacgaauaugcccaaaaguugggaggcgaggcgggcuuuuaccacauccucaacaauccuaaagccagccuguuaucucugacccaguucccacauuuuuccucaguagugcucgggaacgcagcuggacuugguauuaugggcgaguaucgagggacacccagaaaccaggaccuguacgaugccgcuaaggccuaugcagaacaguugaaagagaauggagucaucaacuacagcgugcuagaccugacugccgaggaacucgaagcuauaaagcaccaacugaauccuaaagauaacgacguugagcuuugaggacuaguacuggcugcaucucccuuuccucuguccuccauccuucucccaggauggugaagggggaccugguacccagugauccccaccccaggauccuaaaucaugacuuaccugcuaauaaaaacucauuggaaaagugagaagaucuaaaaaaaaaaaaaaaaaaaaaaaaaaaaaaaaaaaaaaaaaaaaaaaaaaaaaaaaaaaaaaaaugcaucccccccccccccccccccccccccccccccaaaggcucuuuucagagccaccagaauu

SEQ ID NO: 10219 - RNA, 1578 nt, Artificial Sequence
  mRNA product Design b-5 comprising derived and/or modified sequence from HRSV(A2)__P03418.1__N (opt4)
gggagacuccugucgggcggaaguaggaggaguagaguuuaaaaacaguacucuuuuuccgguucgggacguaguugaagcaacgacaagccggauaaccgcucuugagacaggaagcuuaccauggcccugagcaaggugaagcugaacgacacccugaacaaggaccagcugcugagcagcagcaaguacaccauccagagaagcaccggcgacagcaucgacacccccaacuacgacgugcagaagcacaucaacaagcugugcggcaugcugcugaucaccgaggacgccaaccacaaguucaccggccugaucggcaugcuguacgccaugagcagacugggcagagaggacaccaucaagauccugagagacgccggcuaccacgugaaggccaacggcguggacgugaccacccacagacaggacaucaacggcaaggagaugaaguucgaggugcugacccuggccagccugaccaccgagauccagaucaacaucgagaucgagagcagaaagagcuacaagaagaugcugaaggagaugggcgagguggcccccgaguacagacacgacagccccgacugcggcaugaucauccugugcaucgccgcccuggugaucaccaagcuggccgccggcgacagaagcggccugaccgccgugaucagaagagccaacaacgugcugaagaacgagaugaagagauacaagggccugcugcccaaggacaucgccaacagcuucuacgagguguucgagaagcacccccacuucaucgacguguucgugcacuucggcaucgcccagagcagcaccagaggcggcagcagaguggagggcaucuucgccggccuguucaugaacgccuacggcgccggccaggugaugcugagauggggcgugcuggccaagagcgugaagaacaucaugcugggccacgccagcgugcaggccgagauggagcaggugguggagguguacgaguacgcccagaagcugggcggcgaggccggcuucuaccacauccugaacaaccccaaggccagccugcugagccugacccaguucccccacuucagcagcguggugcugggcaacgccgccggccugggcaucaugggcgaguacagaggcacccccagaaaccaggaccuguacgacgccgccaaggccuacgccgagcagcugaaggagaacggcgugaucaacuacagcgugcuggaccugaccgccgaggagcuggaggccaucaagcaccagcugaaccccaaggacaacgacguggagcugugaggacuaguacuggcugcaucucccuuuccucuguccuccauccuucucccaggauggugaagggggaccugguacccagugauccccaccccaggauccuaaaucaugacuuaccugcuaauaaaaacucauuggaaaagugagaagaucuaaaaaaaaaaaaaaaaaaaaaaaaaaaaaaaaaaaaaaaaaaaaaaaaaaaaaaaaaaaaaaaaugcaucccccccccccccccccccccccccccccccaaaggcucuuuucagagccaccagaauu

SEQ ID NO: 10220 - RNA, 1578 nt, Artificial Sequence
  mRNA product Design b-5 comprising derived and/or modified sequence from HRSV(A2)__P03418.1__N (opt5)
gggagacuccugucgggcggaaguaggaggaguagaguuuaaaaacaguacucuuuuuccgguucgggacguaguugaagcaacgacaagccggauaaccgcucuugagacaggaagcuuaccauggcccugagcaaggugaaacucaacgacacccugaauaaggaucagcuucuguccucuagcaaauacacaauccaaagauccacgggcgacucuauugauacccccaacuaugacguccagaagcacaucaauaaacucugcgggaugcugcuuauuacagaggaugcuaaccauaaguucaccggacugaucggcaugcucuacgccaugagccggcuggggcgcgaagacacaauuaagauccugagagaugcgggauaucacguuaaagcuaauggcguggacgugaccacacaucggcaggauaucaacgggaaggagaugaaauuugaaguccucacccuggccucccuuacgaccgagauucagaucaauauugaaaucgagucucgcaagagcuacaaaaagaugcugaaggagaugggagaaguggccccugaguauagacacgacuccccggauuguggcaugauuauccucugcauugcugcccugguuaucacaaaacuugcugccggcgaccggagcgggcugaccgcggugauccgcagagccaacaauguccucaagaacgaaaugaaacgguacaagggacugcugcccaaagauauugcuaauucuuucuaugagguguuugagaagcauccucacuucaucgacguuuuugugcacuucggcauugcccaauccagcacacgcgggggaucuagagucgaaggcaucuuugcuggacucuucaugaacgccuacggggcgggccaggugaugcugcgguggggcgugcuugccaaauccgucaagaauauuaugcuggggcaugcuagcguucaggccgagauggaacaggugguggaggucuacgaauaugcucaaaagcucggaggcgaggccggguuuuaccacauccugaacaaucccaaagccucucuucugucccucacccaguucccucauuuuagcuccgugguucugggaaacgcugcgggccuggggaucaugggagaguaucgcggcacgcccagaaaccaggaccucuacgaugccgcuaaggccuaugccgaacagcugaaagagaauggcgugauuaacuacucuguccuugaccugacagcugaggaacucgaagccaucaagcaccaacugaauccuaaagauaacgacguggagcuuugaggacuaguacuggcugcaucucccuuuccucuguccuccauccuucucccaggauggugaagggggaccugguacccagugauccccaccccaggauccuaaaucaugacuuaccugcuaauaaaaacucauuggaaaagugagaagaucuaaaaaaaaaaaaaaaaaaaaaaaaaaaaaaaaaaaaaaaaaaaaaaaaaaaaaaaaaaaaaaaaugcaucccccccccccccccccccccccccccccccaaaggcucuuuucagagccaccagaauu

SEQ ID NO: 10221 - RNA, 1578 nt, Artificial Sequence
  mRNA product Design b-5 comprising derived and/or modified sequence from HRSV(A2)__P03418.1__N (opt6)
gggagacuccugucgggcggaaguaggaggaguagaguuuaaaaacaguacucuuuuuccgguucgggacguaguugaagcaacgacaagccggauaaccgcucuugagacaggaagcuuaccauggcacuaagcaaagucaaauuaaacgacacauuaaacaaagaccaacucuuaucaucaucaaaauacacaauacaaagaagcaccggagacaguaucgacacaccaaacuaugacguccaaaaacauauaaauaaauuaugcggcaugcucuuaaucacagaagacgccaaccauaaauuuacaggauuaauaggaauguuauaugcaaugucacgacuagguagagaagacacaauaaaaauacuaagagacgcaggcuaucacguaaaagcaaauggaguagacguaaccacacacagacaagacauaaauggaaaagaaaugaaauuugaaguauuaacacuagcaucacuaacaacagaaauacaaaucaacauagaaauagaaucaagaaaaagcuacaaaaaaauguuaaaagaaaugggagaagucgcaccagaauauagacaugauucaccagacugcggaaugauaauacuaugcauagcagcccuaguaauuacaaaacuagcagcaggagacagaagcggauuaacagcaguaauaagaagagcaaacaacguacuaaaaaacgaaaugaaaagauauaaaggauuauuaccaaaagacauagcaaacucauucuaugaaguauucgaaaaacacccccacuuuauagacgucuucguacacuucggaauagcccaaucauccacaagaggaggaucaagagucgaaggaauauucgcaggauuauucaugaacgcauauggcgcaggacaaguaaugcuaagauggggaguacuagcaaaauccgucaaaaacauaaugcuaggacacgcaucaguucaagcagaaauggaacaaguaguagaaguauacgaauacgcccaaaaacuaggaggagaagcaggauucuaccacauacuaaauaauccaaaagcaucacuacuaagccuaacccaauuuccccacuucucaaguguaguauuaggaaaugcagcuggacuaggaauaaugggagaauacagaggaacaccaagaaaccaagacuuauacgacgcagcaaaagcauacgcagagcaacuuaaagaaaacggaguaauaaacuauagcguacuagacuuaacagcagaagaacuggaagcaauaaaacaucaauuaaacccgaaagacaaugacguagaauuauaaggacuaguacuggcugcaucucccuuuccucuguccuccauccuucucccaggauggugaagggggaccugguacccagugauccccaccccaggauccuaaaucaugacuuaccugcuaauaaaaacucauuggaaaagugagaagaucuaaaaaaaaaaaaaaaaaaaaaaaaaaaaaaaaaaaaaaaaaaaaaaaaaaaaaaaaaaaaaaaaugcaucccccccccccccccccccccccccccccccaaaggcucuuuucagagccaccagaauu

SEQ ID NO: 10222 - RNA, 1578 nt, Artificial Sequence
  mRNA product Design b-5 comprising derived and/or modified sequence from HRSV(A2)__P03418.1__N (opt11)
gggagacuccugucgggcggaaguaggaggaguagaguuuaaaaacaguacucuuuuuccgguucgggacguaguugaagcaacgacaagccggauaaccgcucuugagacaggaagcuuaccauggcacucucgaaaguaaaacucaacgacacccucaacaaagaccaacuccuuuccagcuccaaauacaccauccaacgauccaccggagacuccaucgacacgcccaacuacgacguccagaaacacaucaacaagcucugcggaaugcuacuaaucaccgaggacgccaaccacaaauucacaggacuuauagggaugcucuacgccaugucccgccucggacgcgaagacacaauaaaaauccuacgagacgccggcuaccacguaaaggcaaacggcgucgacgucaccacacacagacaagacaucaacggaaaggaaaugaaauucgaaguccucacccucgccagccuaaccaccgagauccaaaucaacaucgaaaucgaaucacgcaaauccuacaagaaaaugcucaaagaaaugggagaagucgcccccgaauaccgucacgacucgcccgacugcggcaugauaauccuaugcaucgccgcacucgucauaaccaaacucgccgccggugaccgaucaggacugacagcagucauccgccgagcaaacaacgugcucaaaaacgaaaugaaacgcuacaaaggccuacuccccaaagacaucgccaacuccuucuacgaagucuucgaaaaacacccacacuucaucgacgucuucguccacuucggcaucgcacaaucaucaaccagaggcggcagccgcguugaaggcaucuucgcaggacucuuuaugaacgccuacggcgccggccaagucaugcuccgcuggggcguccuggcaaaaagcgucaaaaacaucaugcuaggccacgcuagcguccaagccgaaauggaacaagucgucgaaguuuacgaguacgcacaaaaacucggcggcgaagcaggcuucuaccacauccuaaacaaccccaaagccucccugcuaucacucacccaauucccccacuucuccagcgucguccucggcaacgccgcaggacuaggcaucaugggagaauaccgcgggacaccgcgcaaccaagaccucuacgacgccgccaaagccuacgccgaacaacucaaagaaaacggcgucauaaacuacucaguccucgaccucaccgccgaagaacucgaagccaucaaacaccaacucaacccaaaagacaacgacgucgaauuauaaggacuaguacuggcugcaucucccuuuccucuguccuccauccuucucccaggauggugaagggggaccugguacccagugauccccaccccaggauccuaaaucaugacuuaccugcuaauaaaaacucauuggaaaagugagaagaucuaaaaaaaaaaaaaaaaaaaaaaaaaaaaaaaaaaaaaaaaaaaaaaaaaaaaaaaaaaaaaaaaugcaucccccccccccccccccccccccccccccccaaaggcucuuuucagagccaccagaauu

SEQ ID NO: 10223 - RNA, 1484 nt, Artificial Sequence
  mRNA product Design c-1 comprising derived and/or modified sequence from HRSV(A2)__P03418.1__N (wt)
gggagaguccgcucagccagguugcagaagcggcuuagcguguguccuaaucuucucucugcguguagguaggccugugccgcaaacaagcuuaccauggcucuuagcaaagucaaguugaaugauacacucaacaaagaucaacuucugucauccagcaaauacaccauccaacggagcacaggagauaguauugauacuccuaauuaugaugugcagaaacacaucaauaaguuauguggcauguuauuaaucacagaagaugcuaaucauaaauucacuggguuaauagguauguuauaugcgaugucuagguuaggaagagaagacaccauaaaaauacucagagaugcgggauaucauguaaaagcaaauggaguagauguaacaacacaucgucaagacauuaauggaaaagaaaugaaauuugaaguguuaacauuggcaagcuuaacaacugaaauucaaaucaacauugagauagaaucuagaaaauccuacaaaaaaaugcuaaaagaaaugggagagguagcuccagaauacaggcaugacucuccugauugugggaugauaauauuauguauagcagcauuaguaauaacuaaauuagcagcaggggacagaucuggucuuacagccgugauuaggagagcuaauaauguccuaaaaaaugaaaugaaacguuacaaaggcuuacuacccaaggacauagccaacagcuucuaugaaguguuugaaaaacauccccacuuuauagauguuuuuguucauuuugguauagcacaaucuucuaccagagguggcaguagaguugaagggauuuuugcaggauuguuuaugaaugccuauggugcagggcaagugauguuacgguggggagucuuagcaaaaucaguuaaaaauauuauguuaggacaugcuagugugcaagcagaaauggaacaaguuguugagguuuaugaauaugcccaaaaauuggguggugaagcaggauucuaccauauauugaacaacccaaaagcaucauuauuaucuuugacucaauuuccucacuucuccaguguaguauuaggcaaugcugcuggccuaggcauaaugggagaguacagagguacaccgaggaaucaagaucuauaugaugcagcaaaggcauaugcugaacaacucaaagaaaauggugugauuaacuacaguguacuagacuugacagcagaagaacuagaggcuaucaaacaucagcuuaauccaaaagauaaugauguagagcuuugaggacuaguguccaccugucccuccugggcugcuggauugucucguuuuccugccaaauaaacaggaucagcgcuuuacagaucuaaaaaaaaaaaaaaaaaaaaaaaaaaaaaaaaaaaaaaaaaaaaaaaaaaaaaaaaaaaaaaaaugcaucccccccccccccccccccccccccccccccaaaggcucuuuucagagccaccagaauu

SEQ ID NO: 10224 - RNA, 1484 nt, Artificial Sequence
  mRNA product Design c-1 comprising derived and/or modified sequence from HRSV(A2)__P03418.1__N (opt1)
gggagaguccgcucagccagguugcagaagcggcuuagcguguguccuaaucuucucucugcguguagguaggccugugccgcaaacaagcuuaccauggcccugagcaaggugaagcucaacgacacccugaacaaggaccagcugcucuccagcuccaaguacaccauccagcgcagcaccggcgacuccaucgacacccccaacuacgacguccagaagcacaucaacaagcugugcgggaugcugcucaucaccgaggacgccaaccacaaguucaccggccugaucgggaugcuguacgcgaugagccggcucggccgcgaggacacgaucaagauccugcgggacgccggguaccacgugaaggccaacggcguggacgucaccacccaccgccaggacaucaacggcaaggagaugaaguucgaggugcugacccucgccucccugacgaccgagauccagaucaacaucgagaucgagagccggaaguccuacaagaagaugcugaaggagaugggggagguggccccggaguaccgccacgacagccccgacugcggcaugaucauccucugcaucgcggcccuggucaucaccaagcuggccgccggggaccgguccggccucaccgcggugauccgccgggccaacaacgugcugaagaacgagaugaagcgcuacaaggggcugcuccccaaggacaucgccaacagcuucuacgaggucuucgagaagcacccccacuucaucgacguguucgugcacuucggcaucgcccaguccagcacgcggggcgggucccgcgucgagggcaucuucgccgggcuguucaugaacgcguacggcgccggccaggugaugcugcgguggggcgugcucgccaagagcgucaagaacaucaugcuggggcacgccuccgugcaggccgagauggagcaggucguggagguguacgaguacgcgcagaagcucgggggcgaggccggguucuaccacauccugaacaacccgaaggccagccugcugucccucacccaguucccccacuucagcagcgugguccugggcaacgccgccggccuggggaucaugggcgaguaccgcgggacgccccggaaccaggaccucuacgacgcggccaaggccuacgccgagcagcugaaggagaacggcgugaucaacuacuccgugcuggaccucaccgccgaggagcuggaggcgaucaagcaccagcugaaccccaaggacaacgacgucgagcucugaggacuaguguccaccugucccuccugggcugcuggauugucucguuuuccugccaaauaaacaggaucagcgcuuuacagaucuaaaaaaaaaaaaaaaaaaaaaaaaaaaaaaaaaaaaaaaaaaaaaaaaaaaaaaaaaaaaaaaaugcaucccccccccccccccccccccccccccccccaaaggcucuuuucagagccaccagaauu

SEQ ID NO: 10225 - RNA, 1484 nt, Artificial Sequence
  mRNA product Design c-1 comprising derived and/or modified sequence from HRSV(A2)__P03418.1__N (opt2)
gggagaguccgcucagccagguugcagaagcggcuuagcguguguccuaaucuucucucugcguguagguaggccugugccgcaaacaagcuuaccauggcccucuccaaggucaagcucaacgacacccucaacaaggaccagcuccucuccuccuccaaguacaccauccagcgcuccaccggcgacuccaucgacacccccaacuacgacguccagaagcacaucaacaagcucugcggcaugcuccucaucaccgaggacgccaaccacaaguucaccggccucaucggcaugcucuacgccaugucccgccucggccgcgaggacaccaucaagauccuccgcgacgccggcuaccacgucaaggccaacggcgucgacgucaccacccaccgccaggacaucaacggcaaggagaugaaguucgagguccucacccucgccucccucaccaccgagauccagaucaacaucgagaucgagucccgcaaguccuacaagaagaugcucaaggagaugggcgaggucgcccccgaguaccgccacgacucccccgacugcggcaugaucauccucugcaucgccgcccucgucaucaccaagcucgccgccggcgaccgcuccggccucaccgccgucauccgccgcgccaacaacguccucaagaacgagaugaagcgcuacaagggccuccuccccaaggacaucgccaacuccuucuacgaggucuucgagaagcacccccacuucaucgacgucuucguccacuucggcaucgcccaguccuccacccgcggcggcucccgcgucgagggcaucuucgccggccucuucaugaacgccuacggcgccggccaggucaugcuccgcuggggcguccucgccaaguccgucaagaacaucaugcucggccacgccuccguccaggccgagauggagcaggucgucgaggucuacgaguacgcccagaagcucggcggcgaggccggcuucuaccacauccucaacaaccccaaggccucccuccucucccucacccaguucccccacuucuccuccgucguccucggcaacgccgccggccucggcaucaugggcgaguaccgcggcaccccccgcaaccaggaccucuacgacgccgccaaggccuacgccgagcagcucaaggagaacggcgucaucaacuacuccguccucgaccucaccgccgaggagcucgaggccaucaagcaccagcucaaccccaaggacaacgacgucgagcucugaggacuaguguccaccugucccuccugggcugcuggauugucucguuuuccugccaaauaaacaggaucagcgcuuuacagaucuaaaaaaaaaaaaaaaaaaaaaaaaaaaaaaaaaaaaaaaaaaaaaaaaaaaaaaaaaaaaaaaaugcaucccccccccccccccccccccccccccccccaaaggcucuuuucagagccaccagaauu

SEQ ID NO: 10226 - RNA, 1484 nt, Artificial Sequence
  mRNA product Design c-1 comprising derived and/or modified sequence from HRSV(A2)__P03418.1__N (opt3)
gggagaguccgcucagccagguugcagaagcggcuuagcguguguccuaaucuucucucugcguguagguaggccugugccgcaaacaagcuuaccauggcccugagcaaggugaaacucaacgacacccuuaauaaggaucagcuguuguccucuucaaaauacacaauccaaagaaguacuggcgacagcauugauacgcccaacuaugacguccagaagcacauaaauaaauuaugcgggaugcugcuaaucaccgaggaugcuaaccauaaguucacaggacucauugguaugcuguacgcaauguccaggcuuggccgggaagacacuaucaagauucugcgcgaugccggguaucacguuaaagcgaauggaguggacguaaccacacaucgacaggauaucaacggcaaggagaugaaauuugaaguguugacccucgcuucucugacuacagagauacagaucaauauugaaaucgagucgcguaagucauacaaaaagaugcugaaggagaugggugaagucgccccugaguauagacacgacagcccagauugugggaugauuauccucugcauagcagccuuagugauuaccaaacuggcugcaggagacaggaguggccuuacggccguuauccggcgcgcuaacaauguguugaagaacgaaaugaaaagauacaagggccugcuaccgaaagauauugccaauuccuucuaugaggucuuugagaagcauccccacuucaucgacguguuuguacacuucgggaucgcgcaaucuagcacuaggggagguucccggguugaaggcauuuuugcaggacucuucaugaacgccuacggggcuggccaggugaugcugcgcugggguguccuugccaaaucagugaagaauauaaugcuggggcaugcaagugugcaggcugagauggaacaggucguugagguguacgaauaugcccaaaaguugggaggcgaggcgggcuuuuaccacauccucaacaauccuaaagccagccuguuaucucugacccaguucccacauuuuuccucaguagugcucgggaacgcagcuggacuugguauuaugggcgaguaucgagggacacccagaaaccaggaccuguacgaugccgcuaaggccuaugcagaacaguugaaagagaauggagucaucaacuacagcgugcuagaccugacugccgaggaacucgaagcuauaaagcaccaacugaauccuaaagauaacgacguugagcuuugaggacuaguguccaccugucccuccugggcugcuggauugucucguuuuccugccaaauaaacaggaucagcgcuuuacagaucuaaaaaaaaaaaaaaaaaaaaaaaaaaaaaaaaaaaaaaaaaaaaaaaaaaaaaaaaaaaaaaaaugcaucccccccccccccccccccccccccccccccaaaggcucuuuucagagccaccagaauu

SEQ ID NO: 10227 - RNA, 1484 nt, Artificial Sequence
  mRNA product Design c-1 comprising derived and/or modified sequence from HRSV(A2)__P03418.1__N (opt4)
gggagaguccgcucagccagguugcagaagcggcuuagcguguguccuaaucuucucucugcguguagguaggccugugccgcaaacaagcuuaccauggcccugagcaaggugaagcugaacgacacccugaacaaggaccagcugcugagcagcagcaaguacaccauccagagaagcaccggcgacagcaucgacacccccaacuacgacgugcagaagcacaucaacaagcugugcggcaugcugcugaucaccgaggacgccaaccacaaguucaccggccugaucggcaugcuguacgccaugagcagacugggcagagaggacaccaucaagauccugagagacgccggcuaccacgugaaggccaacggcguggacgugaccacccacagacaggacaucaacggcaaggagaugaaguucgaggugcugacccuggccagccugaccaccgagauccagaucaacaucgagaucgagagcagaaagagcuacaagaagaugcugaaggagaugggcgagguggcccccgaguacagacacgacagccccgacugcggcaugaucauccugugcaucgccgcccuggugaucaccaagcuggccgccggcgacagaagcggccugaccgccgugaucagaagagccaacaacgugcugaagaacgagaugaagagauacaagggccugcugcccaaggacaucgccaacagcuucuacgagguguucgagaagcacccccacuucaucgacguguucgugcacuucggcaucgcccagagcagcaccagaggcggcagcagaguggagggcaucuucgccggccuguucaugaacgccuacggcgccggccaggugaugcugagauggggcgugcuggccaagagcgugaagaacaucaugcugggccacgccagcgugcaggccgagauggagcaggugguggagguguacgaguacgcccagaagcugggcggcgaggccggcuucuaccacauccugaacaaccccaaggccagccugcugagccugacccaguucccccacuucagcagcguggugcugggcaacgccgccggccugggcaucaugggcgaguacagaggcacccccagaaaccaggaccuguacgacgccgccaaggccuacgccgagcagcugaaggagaacggcgugaucaacuacagcgugcuggaccugaccgccgaggagcuggaggccaucaagcaccagcugaaccccaaggacaacgacguggagcugugaggacuaguguccaccugucccuccugggcugcuggauugucucguuuuccugccaaauaaacaggaucagcgcuuuacagaucuaaaaaaaaaaaaaaaaaaaaaaaaaaaaaaaaaaaaaaaaaaaaaaaaaaaaaaaaaaaaaaaaugcaucccccccccccccccccccccccccccccccaaaggcucuuuucagagccaccagaauu

SEQ ID NO: 10228 - RNA, 1484 nt, Artificial Sequence
  mRNA product Design c-1 comprising derived and/or modified sequence from HRSV(A2)__P03418.1__N (opt5)
gggagaguccgcucagccagguugcagaagcggcuuagcguguguccuaaucuucucucugcguguagguaggccugugccgcaaacaagcuuaccauggcccugagcaaggugaaacucaacgacacccugaauaaggaucagcuucuguccucuagcaaauacacaauccaaagauccacgggcgacucuauugauacccccaacuaugacguccagaagcacaucaauaaacucugcgggaugcugcuuauuacagaggaugcuaaccauaaguucaccggacugaucggcaugcucuacgccaugagccggcuggggcgcgaagacacaauuaagauccugagagaugcgggauaucacguuaaagcuaauggcguggacgugaccacacaucggcaggauaucaacgggaaggagaugaaauuugaaguccucacccuggccucccuuacgaccgagauucagaucaauauugaaaucgagucucgcaagagcuacaaaaagaugcugaaggagaugggagaaguggccccugaguauagacacgacuccccggauuguggcaugauuauccucugcauugcugcccugguuaucacaaaacuugcugccggcgaccggagcgggcugaccgcggugauccgcagagccaacaauguccucaagaacgaaaugaaacgguacaagggacugcugcccaaagauauugcuaauucuuucuaugagguguuugagaagcauccucacuucaucgacguuuuugugcacuucggcauugcccaauccagcacacgcgggggaucuagagucgaaggcaucuuugcuggacucuucaugaacgccuacggggcgggccaggugaugcugcgguggggcgugcuugccaaauccgucaagaauauuaugcuggggcaugcuagcguucaggccgagauggaacaggugguggaggucuacgaauaugcucaaaagcucggaggcgaggccggguuuuaccacauccugaacaaucccaaagccucucuucugucccucacccaguucccucauuuuagcuccgugguucugggaaacgcugcgggccuggggaucaugggagaguaucgcggcacgcccagaaaccaggaccucuacgaugccgcuaaggccuaugccgaacagcugaaagagaauggcgugauuaacuacucuguccuugaccugacagcugaggaacucgaagccaucaagcaccaacugaauccuaaagauaacgacguggagcuuugaggacuaguguccaccugucccuccugggcugcuggauugucucguuuuccugccaaauaaacaggaucagcgcuuuacagaucuaaaaaaaaaaaaaaaaaaaaaaaaaaaaaaaaaaaaaaaaaaaaaaaaaaaaaaaaaaaaaaaaugcaucccccccccccccccccccccccccccccccaaaggcucuuuucagagccaccagaauu

SEQ ID NO: 10229 - RNA, 1484 nt, Artificial Sequence
  mRNA product Design c-1 comprising derived and/or modified sequence from HRSV(A2)__P03418.1__N (opt6)
gggagaguccgcucagccagguugcagaagcggcuuagcguguguccuaaucuucucucugcguguagguaggccugugccgcaaacaagcuuaccauggcacuaagcaaagucaaauuaaacgacacauuaaacaaagaccaacucuuaucaucaucaaaauacacaauacaaagaagcaccggagacaguaucgacacaccaaacuaugacguccaaaaacauauaaauaaauuaugcggcaugcucuuaaucacagaagacgccaaccauaaauuuacaggauuaauaggaauguuauaugcaaugucacgacuagguagagaagacacaauaaaaauacuaagagacgcaggcuaucacguaaaagcaaauggaguagacguaaccacacacagacaagacauaaauggaaaagaaaugaaauuugaaguauuaacacuagcaucacuaacaacagaaauacaaaucaacauagaaauagaaucaagaaaaagcuacaaaaaaauguuaaaagaaaugggagaagucgcaccagaauauagacaugauucaccagacugcggaaugauaauacuaugcauagcagcccuaguaauuacaaaacuagcagcaggagacagaagcggauuaacagcaguaauaagaagagcaaacaacguacuaaaaaacgaaaugaaaagauauaaaggauuauuaccaaaagacauagcaaacucauucuaugaaguauucgaaaaacacccccacuuuauagacgucuucguacacuucggaauagcccaaucauccacaagaggaggaucaagagucgaaggaauauucgcaggauuauucaugaacgcauauggcgcaggacaaguaaugcuaagauggggaguacuagcaaaauccgucaaaaacauaaugcuaggacacgcaucaguucaagcagaaauggaacaaguaguagaaguauacgaauacgcccaaaaacuaggaggagaagcaggauucuaccacauacuaaauaauccaaaagcaucacuacuaagccuaacccaauuuccccacuucucaaguguaguauuaggaaaugcagcuggacuaggaauaaugggagaauacagaggaacaccaagaaaccaagacuuauacgacgcagcaaaagcauacgcagagcaacuuaaagaaaacggaguaauaaacuauagcguacuagacuuaacagcagaagaacuggaagcaauaaaacaucaauuaaacccgaaagacaaugacguagaauuauaaggacuaguguccaccugucccuccugggcugcuggauugucucguuuuccugccaaauaaacaggaucagcgcuuuacagaucuaaaaaaaaaaaaaaaaaaaaaaaaaaaaaaaaaaaaaaaaaaaaaaaaaaaaaaaaaaaaaaaaugcaucccccccccccccccccccccccccccccccaaaggcucuuuucagagccaccagaauu

SEQ ID NO: 10230 - RNA, 1484 nt, Artificial Sequence
  mRNA product Design c-1 comprising derived and/or modified sequence from HRSV(A2)__P03418.1__N (opt11)
gggagaguccgcucagccagguugcagaagcggcuuagcguguguccuaaucuucucucugcguguagguaggccugugccgcaaacaagcuuaccauggcacucucgaaaguaaaacucaacgacacccucaacaaagaccaacuccuuuccagcuccaaauacaccauccaacgauccaccggagacuccaucgacacgcccaacuacgacguccagaaacacaucaacaagcucugcggaaugcuacuaaucaccgaggacgccaaccacaaauucacaggacuuauagggaugcucuacgccaugucccgccucggacgcgaagacacaauaaaaauccuacgagacgccggcuaccacguaaaggcaaacggcgucgacgucaccacacacagacaagacaucaacggaaaggaaaugaaauucgaaguccucacccucgccagccuaaccaccgagauccaaaucaacaucgaaaucgaaucacgcaaauccuacaagaaaaugcucaaagaaaugggagaagucgcccccgaauaccgucacgacucgcccgacugcggcaugauaauccuaugcaucgccgcacucgucauaaccaaacucgccgccggugaccgaucaggacugacagcagucauccgccgagcaaacaacgugcucaaaaacgaaaugaaacgcuacaaaggccuacuccccaaagacaucgccaacuccuucuacgaagucuucgaaaaacacccacacuucaucgacgucuucguccacuucggcaucgcacaaucaucaaccagaggcggcagccgcguugaaggcaucuucgcaggacucuuuaugaacgccuacggcgccggccaagucaugcuccgcuggggcguccuggcaaaaagcgucaaaaacaucaugcuaggccacgcuagcguccaagccgaaauggaacaagucgucgaaguuuacgaguacgcacaaaaacucggcggcgaagcaggcuucuaccacauccuaaacaaccccaaagccucccugcuaucacucacccaauucccccacuucuccagcgucguccucggcaacgccgcaggacuaggcaucaugggagaauaccgcgggacaccgcgcaaccaagaccucuacgacgccgccaaagccuacgccgaacaacucaaagaaaacggcgucauaaacuacucaguccucgaccucaccgccgaagaacucgaagccaucaaacaccaacucaacccaaaagacaacgacgucgaauuauaaggacuaguguccaccugucccuccugggcugcuggauugucucguuuuccugccaaauaaacaggaucagcgcuuuacagaucuaaaaaaaaaaaaaaaaaaaaaaaaaaaaaaaaaaaaaaaaaaaaaaaaaaaaaaaaaaaaaaaaugcaucccccccccccccccccccccccccccccccaaaggcucuuuucagagccaccagaauu

SEQ ID NO: 10231 - RNA, 1574 nt, Artificial Sequence
  mRNA product Design c-2 comprising derived and/or modified sequence from HRSV(A2)__P03418.1__N (wt)
gggagacuccugucgggcggaaguaggaggaguagaguuuaaaaacaguacucuuuuuccgguucgggacguaguugaagcaacgacaagccggauaaccgcucuugagacaggaagcuuaccauggcucuuagcaaagucaaguugaaugauacacucaacaaagaucaacuucugucauccagcaaauacaccauccaacggagcacaggagauaguauugauacuccuaauuaugaugugcagaaacacaucaauaaguuauguggcauguuauuaaucacagaagaugcuaaucauaaauucacuggguuaauagguauguuauaugcgaugucuagguuaggaagagaagacaccauaaaaauacucagagaugcgggauaucauguaaaagcaaauggaguagauguaacaacacaucgucaagacauuaauggaaaagaaaugaaauuugaaguguuaacauuggcaagcuuaacaacugaaauucaaaucaacauugagauagaaucuagaaaauccuacaaaaaaaugcuaaaagaaaugggagagguagcuccagaauacaggcaugacucuccugauugugggaugauaauauuauguauagcagcauuaguaauaacuaaauuagcagcaggggacagaucuggucuuacagccgugauuaggagagcuaauaauguccuaaaaaaugaaaugaaacguuacaaaggcuuacuacccaaggacauagccaacagcuucuaugaaguguuugaaaaacauccccacuuuauagauguuuuuguucauuuugguauagcacaaucuucuaccagagguggcaguagaguugaagggauuuuugcaggauuguuuaugaaugccuauggugcagggcaagugauguuacgguggggagucuuagcaaaaucaguuaaaaauauuauguuaggacaugcuagugugcaagcagaaauggaacaaguuguugagguuuaugaauaugcccaaaaauuggguggugaagcaggauucuaccauauauugaacaacccaaaagcaucauuauuaucuuugacucaauuuccucacuucuccaguguaguauuaggcaaugcugcuggccuaggcauaaugggagaguacagagguacaccgaggaaucaagaucuauaugaugcagcaaaggcauaugcugaacaacucaaagaaaauggugugauuaacuacaguguacuagacuugacagcagaagaacuagaggcuaucaaacaucagcuuaauccaaaagauaaugauguagagcuuugaggacuaguggaagcauuuuccuggcugauuaaaagaaauuacucagcuauggucaucuguuccuguuagaaggcuaugcagcauauuauauacuaugcgcauguuaugaaaugcauaauaaaaaauuuuaaaaaaucuaaaagaucuaaaaaaaaaaaaaaaaaaaaaaaaaaaaaaaaaaaaaaaaaaaaaaaaaaaaaaaaaaaaaaaaugcaucccccccccccccccccccccccccccccccaaaggcucuuuucagagccaccagaauu

SEQ ID NO: 10232 - RNA, 1574 nt, Artificial Sequence
  mRNA product Design c-2 comprising derived and/or modified sequence from HRSV(A2)__P03418.1__N (opt1)
gggagacuccugucgggcggaaguaggaggaguagaguuuaaaaacaguacucuuuuuccgguucgggacguaguugaagcaacgacaagccggauaaccgcucuugagacaggaagcuuaccauggcccugagcaaggugaagcucaacgacacccugaacaaggaccagcugcucuccagcuccaaguacaccauccagcgcagcaccggcgacuccaucgacacccccaacuacgacguccagaagcacaucaacaagcugugcgggaugcugcucaucaccgaggacgccaaccacaaguucaccggccugaucgggaugcuguacgcgaugagccggcucggccgcgaggacacgaucaagauccugcgggacgccggguaccacgugaaggccaacggcguggacgucaccacccaccgccaggacaucaacggcaaggagaugaaguucgaggugcugacccucgccucccugacgaccgagauccagaucaacaucgagaucgagagccggaaguccuacaagaagaugcugaaggagaugggggagguggccccggaguaccgccacgacagccccgacugcggcaugaucauccucugcaucgcggcccuggucaucaccaagcuggccgccggggaccgguccggccucaccgcggugauccgccgggccaacaacgugcugaagaacgagaugaagcgcuacaaggggcugcuccccaaggacaucgccaacagcuucuacgaggucuucgagaagcacccccacuucaucgacguguucgugcacuucggcaucgcccaguccagcacgcggggcgggucccgcgucgagggcaucuucgccgggcuguucaugaacgcguacggcgccggccaggugaugcugcgguggggcgugcucgccaagagcgucaagaacaucaugcuggggcacgccuccgugcaggccgagauggagcaggucguggagguguacgaguacgcgcagaagcucgggggcgaggccggguucuaccacauccugaacaacccgaaggccagccugcugucccucacccaguucccccacuucagcagcgugguccugggcaacgccgccggccuggggaucaugggcgaguaccgcgggacgccccggaaccaggaccucuacgacgcggccaaggccuacgccgagcagcugaaggagaacggcgugaucaacuacuccgugcuggaccucaccgccgaggagcuggaggcgaucaagcaccagcugaaccccaaggacaacgacgucgagcucugaggacuaguggaagcauuuuccuggcugauuaaaagaaauuacucagcuauggucaucuguuccuguuagaaggcuaugcagcauauuauauacuaugcgcauguuaugaaaugcauaauaaaaaauuuuaaaaaaucuaaaagaucuaaaaaaaaaaaaaaaaaaaaaaaaaaaaaaaaaaaaaaaaaaaaaaaaaaaaaaaaaaaaaaaaugcaucccccccccccccccccccccccccccccccaaaggcucuuuucagagccaccagaauu

SEQ ID NO: 10233 - RNA, 1574 nt, Artificial Sequence
  mRNA product Design c-2 comprising derived and/or modified sequence from HRSV(A2)__P03418.1__N (opt2)
gggagacuccugucgggcggaaguaggaggaguagaguuuaaaaacaguacucuuuuuccgguucgggacguaguugaagcaacgacaagccggauaaccgcucuugagacaggaagcuuaccauggcccucuccaaggucaagcucaacgacacccucaacaaggaccagcuccucuccuccuccaaguacaccauccagcgcuccaccggcgacuccaucgacacccccaacuacgacguccagaagcacaucaacaagcucugcggcaugcuccucaucaccgaggacgccaaccacaaguucaccggccucaucggcaugcucuacgccaugucccgccucggccgcgaggacaccaucaagauccuccgcgacgccggcuaccacgucaaggccaacggcgucgacgucaccacccaccgccaggacaucaacggcaaggagaugaaguucgagguccucacccucgccucccucaccaccgagauccagaucaacaucgagaucgagucccgcaaguccuacaagaagaugcucaaggagaugggcgaggucgcccccgaguaccgccacgacucccccgacugcggcaugaucauccucugcaucgccgcccucgucaucaccaagcucgccgccggcgaccgcuccggccucaccgccgucauccgccgcgccaacaacguccucaagaacgagaugaagcgcuacaagggccuccuccccaaggacaucgccaacuccuucuacgaggucuucgagaagcacccccacuucaucgacgucuucguccacuucggcaucgcccaguccuccacccgcggcggcucccgcgucgagggcaucuucgccggccucuucaugaacgccuacggcgccggccaggucaugcuccgcuggggcguccucgccaaguccgucaagaacaucaugcucggccacgccuccguccaggccgagauggagcaggucgucgaggucuacgaguacgcccagaagcucggcggcgaggccggcuucuaccacauccucaacaaccccaaggccucccuccucucccucacccaguucccccacuucuccuccgucguccucggcaacgccgccggccucggcaucaugggcgaguaccgcggcaccccccgcaaccaggaccucuacgacgccgccaaggccuacgccgagcagcucaaggagaacggcgucaucaacuacuccguccucgaccucaccgccgaggagcucgaggccaucaagcaccagcucaaccccaaggacaacgacgucgagcucugaggacuaguggaagcauuuuccuggcugauuaaaagaaauuacucagcuauggucaucuguuccuguuagaaggcuaugcagcauauuauauacuaugcgcauguuaugaaaugcauaauaaaaaauuuuaaaaaaucuaaaagaucuaaaaaaaaaaaaaaaaaaaaaaaaaaaaaaaaaaaaaaaaaaaaaaaaaaaaaaaaaaaaaaaaugcaucccccccccccccccccccccccccccccccaaaggcucuuuucagagccaccagaauu

SEQ ID NO: 10234 - RNA, 1574 nt, Artificial Sequence
  mRNA product Design c-2 comprising derived and/or modified sequence from HRSV(A2)__P03418.1__N (opt3)
gggagacuccugucgggcggaaguaggaggaguagaguuuaaaaacaguacucuuuuuccgguucgggacguaguugaagcaacgacaagccggauaaccgcucuugagacaggaagcuuaccauggcccugagcaaggugaaacucaacgacacccuuaauaaggaucagcuguuguccucuucaaaauacacaauccaaagaaguacuggcgacagcauugauacgcccaacuaugacguccagaagcacauaaauaaauuaugcgggaugcugcuaaucaccgaggaugcuaaccauaaguucacaggacucauugguaugcuguacgcaauguccaggcuuggccgggaagacacuaucaagauucugcgcgaugccggguaucacguuaaagcgaauggaguggacguaaccacacaucgacaggauaucaacggcaaggagaugaaauuugaaguguugacccucgcuucucugacuacagagauacagaucaauauugaaaucgagucgcguaagucauacaaaaagaugcugaaggagaugggugaagucgccccugaguauagacacgacagcccagauugugggaugauuauccucugcauagcagccuuagugauuaccaaacuggcugcaggagacaggaguggccuuacggccguuauccggcgcgcuaacaauguguugaagaacgaaaugaaaagauacaagggccugcuaccgaaagauauugccaauuccuucuaugaggucuuugagaagcauccccacuucaucgacguguuuguacacuucgggaucgcgcaaucuagcacuaggggagguucccggguugaaggcauuuuugcaggacucuucaugaacgccuacggggcuggccaggugaugcugcgcugggguguccuugccaaaucagugaagaauauaaugcuggggcaugcaagugugcaggcugagauggaacaggucguugagguguacgaauaugcccaaaaguugggaggcgaggcgggcuuuuaccacauccucaacaauccuaaagccagccuguuaucucugacccaguucccacauuuuuccucaguagugcucgggaacgcagcuggacuugguauuaugggcgaguaucgagggacacccagaaaccaggaccuguacgaugccgcuaaggccuaugcagaacaguugaaagagaauggagucaucaacuacagcgugcuagaccugacugccgaggaacucgaagcuauaaagcaccaacugaauccuaaagauaacgacguugagcuuugaggacuaguggaagcauuuuccuggcugauuaaaagaaauuacucagcuauggucaucuguuccuguuagaaggcuaugcagcauauuauauacuaugcgcauguuaugaaaugcauaauaaaaaauuuuaaaaaaucuaaaagaucuaaaaaaaaaaaaaaaaaaaaaaaaaaaaaaaaaaaaaaaaaaaaaaaaaaaaaaaaaaaaaaaaugcaucccccccccccccccccccccccccccccccaaaggcucuuuucagagccaccagaauu

SEQ ID NO: 10235 - RNA, 1574 nt, Artificial Sequence
  mRNA product Design c-2 comprising derived and/or modified sequence from HRSV(A2)__P03418.1__N (opt4)
gggagacuccugucgggcggaaguaggaggaguagaguuuaaaaacaguacucuuuuuccgguucgggacguaguugaagcaacgacaagccggauaaccgcucuugagacaggaagcuuaccauggcccugagcaaggugaagcugaacgacacccugaacaaggaccagcugcugagcagcagcaaguacaccauccagagaagcaccggcgacagcaucgacacccccaacuacgacgugcagaagcacaucaacaagcugugcggcaugcugcugaucaccgaggacgccaaccacaaguucaccggccugaucggcaugcuguacgccaugagcagacugggcagagaggacaccaucaagauccugagagacgccggcuaccacgugaaggccaacggcguggacgugaccacccacagacaggacaucaacggcaaggagaugaaguucgaggugcugacccuggccagccugaccaccgagauccagaucaacaucgagaucgagagcagaaagagcuacaagaagaugcugaaggagaugggcgagguggcccccgaguacagacacgacagccccgacugcggcaugaucauccugugcaucgccgcccuggugaucaccaagcuggccgccggcgacagaagcggccugaccgccgugaucagaagagccaacaacgugcugaagaacgagaugaagagauacaagggccugcugcccaaggacaucgccaacagcuucuacgagguguucgagaagcacccccacuucaucgacguguucgugcacuucggcaucgcccagagcagcaccagaggcggcagcagaguggagggcaucuucgccggccuguucaugaacgccuacggcgccggccaggugaugcugagauggggcgugcuggccaagagcgugaagaacaucaugcugggccacgccagcgugcaggccgagauggagcaggugguggagguguacgaguacgcccagaagcugggcggcgaggccggcuucuaccacauccugaacaaccccaaggccagccugcugagccugacccaguucccccacuucagcagcguggugcugggcaacgccgccggccugggcaucaugggcgaguacagaggcacccccagaaaccaggaccuguacgacgccgccaaggccuacgccgagcagcugaaggagaacggcgugaucaacuacagcgugcuggaccugaccgccgaggagcuggaggccaucaagcaccagcugaaccccaaggacaacgacguggagcugugaggacuaguggaagcauuuuccuggcugauuaaaagaaauuacucagcuauggucaucuguuccuguuagaaggcuaugcagcauauuauauacuaugcgcauguuaugaaaugcauaauaaaaaauuuuaaaaaaucuaaaagaucuaaaaaaaaaaaaaaaaaaaaaaaaaaaaaaaaaaaaaaaaaaaaaaaaaaaaaaaaaaaaaaaaugcaucccccccccccccccccccccccccccccccaaaggcucuuuucagagccaccagaauu

SEQ ID NO: 10236 - RNA, 1574 nt, Artificial Sequence
  mRNA product Design c-2 comprising derived and/or modified sequence from HRSV(A2)__P03418.1__N (opt5)
gggagacuccugucgggcggaaguaggaggaguagaguuuaaaaacaguacucuuuuuccgguucgggacguaguugaagcaacgacaagccggauaaccgcucuugagacaggaagcuuaccauggcccugagcaaggugaaacucaacgacacccugaauaaggaucagcuucuguccucuagcaaauacacaauccaaagauccacgggcgacucuauugauacccccaacuaugacguccagaagcacaucaauaaacucugcgggaugcugcuuauuacagaggaugcuaaccauaaguucaccggacugaucggcaugcucuacgccaugagccggcuggggcgcgaagacacaauuaagauccugagagaugcgggauaucacguuaaagcuaauggcguggacgugaccacacaucggcaggauaucaacgggaaggagaugaaauuugaaguccucacccuggccucccuuacgaccgagauucagaucaauauugaaaucgagucucgcaagagcuacaaaaagaugcugaaggagaugggagaaguggccccugaguauagacacgacuccccggauuguggcaugauuauccucugcauugcugcccugguuaucacaaaacuugcugccggcgaccggagcgggcugaccgcggugauccgcagagccaacaauguccucaagaacgaaaugaaacgguacaagggacugcugcccaaagauauugcuaauucuuucuaugagguguuugagaagcauccucacuucaucgacguuuuugugcacuucggcauugcccaauccagcacacgcgggggaucuagagucgaaggcaucuuugcuggacucuucaugaacgccuacggggcgggccaggugaugcugcgguggggcgugcuugccaaauccgucaagaauauuaugcuggggcaugcuagcguucaggccgagauggaacaggugguggaggucuacgaauaugcucaaaagcucggaggcgaggccggguuuuaccacauccugaacaaucccaaagccucucuucugucccucacccaguucccucauuuuagcuccgugguucugggaaacgcugcgggccuggggaucaugggagaguaucgcggcacgcccagaaaccaggaccucuacgaugccgcuaaggccuaugccgaacagcugaaagagaauggcgugauuaacuacucuguccuugaccugacagcugaggaacucgaagccaucaagcaccaacugaauccuaaagauaacgacguggagcuuugaggacuaguggaagcauuuuccuggcugauuaaaagaaauuacucagcuauggucaucuguuccuguuagaaggcuaugcagcauauuauauacuaugcgcauguuaugaaaugcauaauaaaaaauuuuaaaaaaucuaaaagaucuaaaaaaaaaaaaaaaaaaaaaaaaaaaaaaaaaaaaaaaaaaaaaaaaaaaaaaaaaaaaaaaaugcaucccccccccccccccccccccccccccccccaaaggcucuuuucagagccaccagaauu

SEQ ID NO: 10237 - RNA, 1574 nt, Artificial Sequence
  mRNA product Design c-2 comprising derived and/or modified sequence from HRSV(A2)__P03418.1__N (opt6)
gggagacuccugucgggcggaaguaggaggaguagaguuuaaaaacaguacucuuuuuccgguucgggacguaguugaagcaacgacaagccggauaaccgcucuugagacaggaagcuuaccauggcacuaagcaaagucaaauuaaacgacacauuaaacaaagaccaacucuuaucaucaucaaaauacacaauacaaagaagcaccggagacaguaucgacacaccaaacuaugacguccaaaaacauauaaauaaauuaugcggcaugcucuuaaucacagaagacgccaaccauaaauuuacaggauuaauaggaauguuauaugcaaugucacgacuagguagagaagacacaauaaaaauacuaagagacgcaggcuaucacguaaaagcaaauggaguagacguaaccacacacagacaagacauaaauggaaaagaaaugaaauuugaaguauuaacacuagcaucacuaacaacagaaauacaaaucaacauagaaauagaaucaagaaaaagcuacaaaaaaauguuaaaagaaaugggagaagucgcaccagaauauagacaugauucaccagacugcggaaugauaauacuaugcauagcagcccuaguaauuacaaaacuagcagcaggagacagaagcggauuaacagcaguaauaagaagagcaaacaacguacuaaaaaacgaaaugaaaagauauaaaggauuauuaccaaaagacauagcaaacucauucuaugaaguauucgaaaaacacccccacuuuauagacgucuucguacacuucggaauagcccaaucauccacaagaggaggaucaagagucgaaggaauauucgcaggauuauucaugaacgcauauggcgcaggacaaguaaugcuaagauggggaguacuagcaaaauccgucaaaaacauaaugcuaggacacgcaucaguucaagcagaaauggaacaaguaguagaaguauacgaauacgcccaaaaacuaggaggagaagcaggauucuaccacauacuaaauaauccaaaagcaucacuacuaagccuaacccaauuuccccacuucucaaguguaguauuaggaaaugcagcuggacuaggaauaaugggagaauacagaggaacaccaagaaaccaagacuuauacgacgcagcaaaagcauacgcagagcaacuuaaagaaaacggaguaauaaacuauagcguacuagacuuaacagcagaagaacuggaagcaauaaaacaucaauuaaacccgaaagacaaugacguagaauuauaaggacuaguggaagcauuuuccuggcugauuaaaagaaauuacucagcuauggucaucuguuccuguuagaaggcuaugcagcauauuauauacuaugcgcauguuaugaaaugcauaauaaaaaauuuuaaaaaaucuaaaagaucuaaaaaaaaaaaaaaaaaaaaaaaaaaaaaaaaaaaaaaaaaaaaaaaaaaaaaaaaaaaaaaaaugcaucccccccccccccccccccccccccccccccaaaggcucuuuucagagccaccagaauu

SEQ ID NO: 10238 - RNA, 1574 nt, Artificial Sequence
  mRNA product Design c-2 comprising derived and/or modified sequence from HRSV(A2)__P03418.1__N (opt11)
gggagacuccugucgggcggaaguaggaggaguagaguuuaaaaacaguacucuuuuuccgguucgggacguaguugaagcaacgacaagccggauaaccgcucuugagacaggaagcuuaccauggcacucucgaaaguaaaacucaacgacacccucaacaaagaccaacuccuuuccagcuccaaauacaccauccaacgauccaccggagacuccaucgacacgcccaacuacgacguccagaaacacaucaacaagcucugcggaaugcuacuaaucaccgaggacgccaaccacaaauucacaggacuuauagggaugcucuacgccaugucccgccucggacgcgaagacacaauaaaaauccuacgagacgccggcuaccacguaaaggcaaacggcgucgacgucaccacacacagacaagacaucaacggaaaggaaaugaaauucgaaguccucacccucgccagccuaaccaccgagauccaaaucaacaucgaaaucgaaucacgcaaauccuacaagaaaaugcucaaagaaaugggagaagucgcccccgaauaccgucacgacucgcccgacugcggcaugauaauccuaugcaucgccgcacucgucauaaccaaacucgccgccggugaccgaucaggacugacagcagucauccgccgagcaaacaacgugcucaaaaacgaaaugaaacgcuacaaaggccuacuccccaaagacaucgccaacuccuucuacgaagucuucgaaaaacacccacacuucaucgacgucuucguccacuucggcaucgcacaaucaucaaccagaggcggcagccgcguugaaggcaucuucgcaggacucuuuaugaacgccuacggcgccggccaagucaugcuccgcuggggcguccuggcaaaaagcgucaaaaacaucaugcuaggccacgcuagcguccaagccgaaauggaacaagucgucgaaguuuacgaguacgcacaaaaacucggcggcgaagcaggcuucuaccacauccuaaacaaccccaaagccucccugcuaucacucacccaauucccccacuucuccagcgucguccucggcaacgccgcaggacuaggcaucaugggagaauaccgcgggacaccgcgcaaccaagaccucuacgacgccgccaaagccuacgccgaacaacucaaagaaaacggcgucauaaacuacucaguccucgaccucaccgccgaagaacucgaagccaucaaacaccaacucaacccaaaagacaacgacgucgaauuauaaggacuaguggaagcauuuuccuggcugauuaaaagaaauuacucagcuauggucaucuguuccuguuagaaggcuaugcagcauauuauauacuaugcgcauguuaugaaaugcauaauaaaaaauuuuaaaaaaucuaaaagaucuaaaaaaaaaaaaaaaaaaaaaaaaaaaaaaaaaaaaaaaaaaaaaaaaaaaaaaaaaaaaaaaaugcaucccccccccccccccccccccccccccccccaaaggcucuuuucagagccaccagaauu

SEQ ID NO: 10239 - RNA, 1551 nt, Artificial Sequence
  mRNA product Design c-3 comprising derived and/or modified sequence from HRSV(A2)__P03418.1__N (wt)
gggagaguccgcucagccagguugcagaagcggcuuagcguguguccuaaucuucucucugcguguagguaggccugugccgcaaacaagcuuaccauggcucuuagcaaagucaaguugaaugauacacucaacaaagaucaacuucugucauccagcaaauacaccauccaacggagcacaggagauaguauugauacuccuaauuaugaugugcagaaacacaucaauaaguuauguggcauguuauuaaucacagaagaugcuaaucauaaauucacuggguuaauagguauguuauaugcgaugucuagguuaggaagagaagacaccauaaaaauacucagagaugcgggauaucauguaaaagcaaauggaguagauguaacaacacaucgucaagacauuaauggaaaagaaaugaaauuugaaguguuaacauuggcaagcuuaacaacugaaauucaaaucaacauugagauagaaucuagaaaauccuacaaaaaaaugcuaaaagaaaugggagagguagcuccagaauacaggcaugacucuccugauugugggaugauaauauuauguauagcagcauuaguaauaacuaaauuagcagcaggggacagaucuggucuuacagccgugauuaggagagcuaauaauguccuaaaaaaugaaaugaaacguuacaaaggcuuacuacccaaggacauagccaacagcuucuaugaaguguuugaaaaacauccccacuuuauagauguuuuuguucauuuugguauagcacaaucuucuaccagagguggcaguagaguugaagggauuuuugcaggauuguuuaugaaugccuauggugcagggcaagugauguuacgguggggagucuuagcaaaaucaguuaaaaauauuauguuaggacaugcuagugugcaagcagaaauggaacaaguuguugagguuuaugaauaugcccaaaaauuggguggugaagcaggauucuaccauauauugaacaacccaaaagcaucauuauuaucuuugacucaauuuccucacuucuccaguguaguauuaggcaaugcugcuggccuaggcauaaugggagaguacagagguacaccgaggaaucaagaucuauaugaugcagcaaaggcauaugcugaacaacucaaagaaaauggugugauuaacuacaguguacuagacuugacagcagaagaacuagaggcuaucaaacaucagcuuaauccaaaagauaaugauguagagcuuugaggacuaguacuggcugcaucucccuuuccucuguccuccauccuucucccaggauggugaagggggaccugguacccagugauccccaccccaggauccuaaaucaugacuuaccugcuaauaaaaacucauuggaaaagugagaagaucuaaaaaaaaaaaaaaaaaaaaaaaaaaaaaaaaaaaaaaaaaaaaaaaaaaaaaaaaaaaaaaaaugcaucccccccccccccccccccccccccccccccaaaggcucuuuucagagccaccagaauu

SEQ ID NO: 10240 - RNA, 1551 nt, Artificial Sequence
  mRNA product Design c-3 comprising derived and/or modified sequence from HRSV(A2)__P03418.1__N (opt1)
gggagaguccgcucagccagguugcagaagcggcuuagcguguguccuaaucuucucucugcguguagguaggccugugccgcaaacaagcuuaccauggcccugagcaaggugaagcucaacgacacccugaacaaggaccagcugcucuccagcuccaaguacaccauccagcgcagcaccggcgacuccaucgacacccccaacuacgacguccagaagcacaucaacaagcugugcgggaugcugcucaucaccgaggacgccaaccacaaguucaccggccugaucgggaugcuguacgcgaugagccggcucggccgcgaggacacgaucaagauccugcgggacgccggguaccacgugaaggccaacggcguggacgucaccacccaccgccaggacaucaacggcaaggagaugaaguucgaggugcugacccucgccucccugacgaccgagauccagaucaacaucgagaucgagagccggaaguccuacaagaagaugcugaaggagaugggggagguggccccggaguaccgccacgacagccccgacugcggcaugaucauccucugcaucgcggcccuggucaucaccaagcuggccgccggggaccgguccggccucaccgcggugauccgccgggccaacaacgugcugaagaacgagaugaagcgcuacaaggggcugcuccccaaggacaucgccaacagcuucuacgaggucuucgagaagcacccccacuucaucgacguguucgugcacuucggcaucgcccaguccagcacgcggggcgggucccgcgucgagggcaucuucgccgggcuguucaugaacgcguacggcgccggccaggugaugcugcgguggggcgugcucgccaagagcgucaagaacaucaugcuggggcacgccuccgugcaggccgagauggagcaggucguggagguguacgaguacgcgcagaagcucgggggcgaggccggguucuaccacauccugaacaacccgaaggccagccugcugucccucacccaguucccccacuucagcagcgugguccugggcaacgccgccggccuggggaucaugggcgaguaccgcgggacgccccggaaccaggaccucuacgacgcggccaaggccuacgccgagcagcugaaggagaacggcgugaucaacuacuccgugcuggaccucaccgccgaggagcuggaggcgaucaagcaccagcugaaccccaaggacaacgacgucgagcucugaggacuaguacuggcugcaucucccuuuccucuguccuccauccuucucccaggauggugaagggggaccugguacccagugauccccaccccaggauccuaaaucaugacuuaccugcuaauaaaaacucauuggaaaagugagaagaucuaaaaaaaaaaaaaaaaaaaaaaaaaaaaaaaaaaaaaaaaaaaaaaaaaaaaaaaaaaaaaaaaugcaucccccccccccccccccccccccccccccccaaaggcucuuuucagagccaccagaauu

SEQ ID NO: 10241 - RNA, 1551 nt, Artificial Sequence
  mRNA product Design c-3 comprising derived and/or modified sequence from HRSV(A2)__P03418.1__N (opt2)
gggagaguccgcucagccagguugcagaagcggcuuagcguguguccuaaucuucucucugcguguagguaggccugugccgcaaacaagcuuaccauggcccucuccaaggucaagcucaacgacacccucaacaaggaccagcuccucuccuccuccaaguacaccauccagcgcuccaccggcgacuccaucgacacccccaacuacgacguccagaagcacaucaacaagcucugcggcaugcuccucaucaccgaggacgccaaccacaaguucaccggccucaucggcaugcucuacgccaugucccgccucggccgcgaggacaccaucaagauccuccgcgacgccggcuaccacgucaaggccaacggcgucgacgucaccacccaccgccaggacaucaacggcaaggagaugaaguucgagguccucacccucgccucccucaccaccgagauccagaucaacaucgagaucgagucccgcaaguccuacaagaagaugcucaaggagaugggcgaggucgcccccgaguaccgccacgacucccccgacugcggcaugaucauccucugcaucgccgcccucgucaucaccaagcucgccgccggcgaccgcuccggccucaccgccgucauccgccgcgccaacaacguccucaagaacgagaugaagcgcuacaagggccuccuccccaaggacaucgccaacuccuucuacgaggucuucgagaagcacccccacuucaucgacgucuucguccacuucggcaucgcccaguccuccacccgcggcggcucccgcgucgagggcaucuucgccggccucuucaugaacgccuacggcgccggccaggucaugcuccgcuggggcguccucgccaaguccgucaagaacaucaugcucggccacgccuccguccaggccgagauggagcaggucgucgaggucuacgaguacgcccagaagcucggcggcgaggccggcuucuaccacauccucaacaaccccaaggccucccuccucucccucacccaguucccccacuucuccuccgucguccucggcaacgccgccggccucggcaucaugggcgaguaccgcggcaccccccgcaaccaggaccucuacgacgccgccaaggccuacgccgagcagcucaaggagaacggcgucaucaacuacuccguccucgaccucaccgccgaggagcucgaggccaucaagcaccagcucaaccccaaggacaacgacgucgagcucugaggacuaguacuggcugcaucucccuuuccucuguccuccauccuucucccaggauggugaagggggaccugguacccagugauccccaccccaggauccuaaaucaugacuuaccugcuaauaaaaacucauuggaaaagugagaagaucuaaaaaaaaaaaaaaaaaaaaaaaaaaaaaaaaaaaaaaaaaaaaaaaaaaaaaaaaaaaaaaaaugcaucccccccccccccccccccccccccccccccaaaggcucuuuucagagccaccagaauu

SEQ ID NO: 10242 - RNA, 1551 nt, Artificial Sequence
  mRNA product Design c-3 comprising derived and/or modified sequence from HRSV(A2)__P03418.1__N (opt3)
gggagaguccgcucagccagguugcagaagcggcuuagcguguguccuaaucuucucucugcguguagguaggccugugccgcaaacaagcuuaccauggcccugagcaaggugaaacucaacgacacccuuaauaaggaucagcuguuguccucuucaaaauacacaauccaaagaaguacuggcgacagcauugauacgcccaacuaugacguccagaagcacauaaauaaauuaugcgggaugcugcuaaucaccgaggaugcuaaccauaaguucacaggacucauugguaugcuguacgcaauguccaggcuuggccgggaagacacuaucaagauucugcgcgaugccggguaucacguuaaagcgaauggaguggacguaaccacacaucgacaggauaucaacggcaaggagaugaaauuugaaguguugacccucgcuucucugacuacagagauacagaucaauauugaaaucgagucgcguaagucauacaaaaagaugcugaaggagaugggugaagucgccccugaguauagacacgacagcccagauugugggaugauuauccucugcauagcagccuuagugauuaccaaacuggcugcaggagacaggaguggccuuacggccguuauccggcgcgcuaacaauguguugaagaacgaaaugaaaagauacaagggccugcuaccgaaagauauugccaauuccuucuaugaggucuuugagaagcauccccacuucaucgacguguuuguacacuucgggaucgcgcaaucuagcacuaggggagguucccggguugaaggcauuuuugcaggacucuucaugaacgccuacggggcuggccaggugaugcugcgcugggguguccuugccaaaucagugaagaauauaaugcuggggcaugcaagugugcaggcugagauggaacaggucguugagguguacgaauaugcccaaaaguugggaggcgaggcgggcuuuuaccacauccucaacaauccuaaagccagccuguuaucucugacccaguucccacauuuuuccucaguagugcucgggaacgcagcuggacuugguauuaugggcgaguaucgagggacacccagaaaccaggaccuguacgaugccgcuaaggccuaugcagaacaguugaaagagaauggagucaucaacuacagcgugcuagaccugacugccgaggaacucgaagcuauaaagcaccaacugaauccuaaagauaacgacguugagcuuugaggacuaguacuggcugcaucucccuuuccucuguccuccauccuucucccaggauggugaagggggaccugguacccagugauccccaccccaggauccuaaaucaugacuuaccugcuaauaaaaacucauuggaaaagugagaagaucuaaaaaaaaaaaaaaaaaaaaaaaaaaaaaaaaaaaaaaaaaaaaaaaaaaaaaaaaaaaaaaaaugcaucccccccccccccccccccccccccccccccaaaggcucuuuucagagccaccagaauu

SEQ ID NO: 10243 - RNA, 1551 nt, Artificial Sequence
  mRNA product Design c-3 comprising derived and/or modified sequence from HRSV(A2)__P03418.1__N (opt4)
gggagaguccgcucagccagguugcagaagcggcuuagcguguguccuaaucuucucucugcguguagguaggccugugccgcaaacaagcuuaccauggcccugagcaaggugaagcugaacgacacccugaacaaggaccagcugcugagcagcagcaaguacaccauccagagaagcaccggcgacagcaucgacacccccaacuacgacgugcagaagcacaucaacaagcugugcggcaugcugcugaucaccgaggacgccaaccacaaguucaccggccugaucggcaugcuguacgccaugagcagacugggcagagaggacaccaucaagauccugagagacgccggcuaccacgugaaggccaacggcguggacgugaccacccacagacaggacaucaacggcaaggagaugaaguucgaggugcugacccuggccagccugaccaccgagauccagaucaacaucgagaucgagagcagaaagagcuacaagaagaugcugaaggagaugggcgagguggcccccgaguacagacacgacagccccgacugcggcaugaucauccugugcaucgccgcccuggugaucaccaagcuggccgccggcgacagaagcggccugaccgccgugaucagaagagccaacaacgugcugaagaacgagaugaagagauacaagggccugcugcccaaggacaucgccaacagcuucuacgagguguucgagaagcacccccacuucaucgacguguucgugcacuucggcaucgcccagagcagcaccagaggcggcagcagaguggagggcaucuucgccggccuguucaugaacgccuacggcgccggccaggugaugcugagauggggcgugcuggccaagagcgugaagaacaucaugcugggccacgccagcgugcaggccgagauggagcaggugguggagguguacgaguacgcccagaagcugggcggcgaggccggcuucuaccacauccugaacaaccccaaggccagccugcugagccugacccaguucccccacuucagcagcguggugcugggcaacgccgccggccugggcaucaugggcgaguacagaggcacccccagaaaccaggaccuguacgacgccgccaaggccuacgccgagcagcugaaggagaacggcgugaucaacuacagcgugcuggaccugaccgccgaggagcuggaggccaucaagcaccagcugaaccccaaggacaacgacguggagcugugaggacuaguacuggcugcaucucccuuuccucuguccuccauccuucucccaggauggugaagggggaccugguacccagugauccccaccccaggauccuaaaucaugacuuaccugcuaauaaaaacucauuggaaaagugagaagaucuaaaaaaaaaaaaaaaaaaaaaaaaaaaaaaaaaaaaaaaaaaaaaaaaaaaaaaaaaaaaaaaaugcaucccccccccccccccccccccccccccccccaaaggcucuuuucagagccaccagaauu

SEQ ID NO: 10244 - RNA, 1551 nt, Artificial Sequence
  mRNA product Design c-3 comprising derived and/or modified sequence from HRSV(A2)__P03418.1__N (opt5)
gggagaguccgcucagccagguugcagaagcggcuuagcguguguccuaaucuucucucugcguguagguaggccugugccgcaaacaagcuuaccauggcccugagcaaggugaaacucaacgacacccugaauaaggaucagcuucuguccucuagcaaauacacaauccaaagauccacgggcgacucuauugauacccccaacuaugacguccagaagcacaucaauaaacucugcgggaugcugcuuauuacagaggaugcuaaccauaaguucaccggacugaucggcaugcucuacgccaugagccggcuggggcgcgaagacacaauuaagauccugagagaugcgggauaucacguuaaagcuaauggcguggacgugaccacacaucggcaggauaucaacgggaaggagaugaaauuugaaguccucacccuggccucccuuacgaccgagauucagaucaauauugaaaucgagucucgcaagagcuacaaaaagaugcugaaggagaugggagaaguggccccugaguauagacacgacuccccggauuguggcaugauuauccucugcauugcugcccugguuaucacaaaacuugcugccggcgaccggagcgggcugaccgcggugauccgcagagccaacaauguccucaagaacgaaaugaaacgguacaagggacugcugcccaaagauauugcuaauucuuucuaugagguguuugagaagcauccucacuucaucgacguuuuugugcacuucggcauugcccaauccagcacacgcgggggaucuagagucgaaggcaucuuugcuggacucuucaugaacgccuacggggcgggccaggugaugcugcgguggggcgugcuugccaaauccgucaagaauauuaugcuggggcaugcuagcguucaggccgagauggaacaggugguggaggucuacgaauaugcucaaaagcucggaggcgaggccggguuuuaccacauccugaacaaucccaaagccucucuucugucccucacccaguucccucauuuuagcuccgugguucugggaaacgcugcgggccuggggaucaugggagaguaucgcggcacgcccagaaaccaggaccucuacgaugccgcuaaggccuaugccgaacagcugaaagagaauggcgugauuaacuacucuguccuugaccugacagcugaggaacucgaagccaucaagcaccaacugaauccuaaagauaacgacguggagcuuugaggacuaguacuggcugcaucucccuuuccucuguccuccauccuucucccaggauggugaagggggaccugguacccagugauccccaccccaggauccuaaaucaugacuuaccugcuaauaaaaacucauuggaaaagugagaagaucuaaaaaaaaaaaaaaaaaaaaaaaaaaaaaaaaaaaaaaaaaaaaaaaaaaaaaaaaaaaaaaaaugcaucccccccccccccccccccccccccccccccaaaggcucuuuucagagccaccagaauu

SEQ ID NO: 10245 - RNA, 1551 nt, Artificial Sequence
  mRNA product Design c-3 comprising derived and/or modified sequence from HRSV(A2)__P03418.1__N (opt6)
gggagaguccgcucagccagguugcagaagcggcuuagcguguguccuaaucuucucucugcguguagguaggccugugccgcaaacaagcuuaccauggcacuaagcaaagucaaauuaaacgacacauuaaacaaagaccaacucuuaucaucaucaaaauacacaauacaaagaagcaccggagacaguaucgacacaccaaacuaugacguccaaaaacauauaaauaaauuaugcggcaugcucuuaaucacagaagacgccaaccauaaauuuacaggauuaauaggaauguuauaugcaaugucacgacuagguagagaagacacaauaaaaauacuaagagacgcaggcuaucacguaaaagcaaauggaguagacguaaccacacacagacaagacauaaauggaaaagaaaugaaauuugaaguauuaacacuagcaucacuaacaacagaaauacaaaucaacauagaaauagaaucaagaaaaagcuacaaaaaaauguuaaaagaaaugggagaagucgcaccagaauauagacaugauucaccagacugcggaaugauaauacuaugcauagcagcccuaguaauuacaaaacuagcagcaggagacagaagcggauuaacagcaguaauaagaagagcaaacaacguacuaaaaaacgaaaugaaaagauauaaaggauuauuaccaaaagacauagcaaacucauucuaugaaguauucgaaaaacacccccacuuuauagacgucuucguacacuucggaauagcccaaucauccacaagaggaggaucaagagucgaaggaauauucgcaggauuauucaugaacgcauauggcgcaggacaaguaaugcuaagauggggaguacuagcaaaauccgucaaaaacauaaugcuaggacacgcaucaguucaagcagaaauggaacaaguaguagaaguauacgaauacgcccaaaaacuaggaggagaagcaggauucuaccacauacuaaauaauccaaaagcaucacuacuaagccuaacccaauuuccccacuucucaaguguaguauuaggaaaugcagcuggacuaggaauaaugggagaauacagaggaacaccaagaaaccaagacuuauacgacgcagcaaaagcauacgcagagcaacuuaaagaaaacggaguaauaaacuauagcguacuagacuuaacagcagaagaacuggaagcaauaaaacaucaauuaaacccgaaagacaaugacguagaauuauaaggacuaguacuggcugcaucucccuuuccucuguccuccauccuucucccaggauggugaagggggaccugguacccagugauccccaccccaggauccuaaaucaugacuuaccugcuaauaaaaacucauuggaaaagugagaagaucuaaaaaaaaaaaaaaaaaaaaaaaaaaaaaaaaaaaaaaaaaaaaaaaaaaaaaaaaaaaaaaaaugcaucccccccccccccccccccccccccccccccaaaggcucuuuucagagccaccagaauu

SEQ ID NO: 10246 - RNA, 1551 nt, Artificial Sequence
  mRNA product Design c-3 comprising derived and/or modified sequence from HRSV(A2)__P03418.1__N (opt11)
gggagaguccgcucagccagguugcagaagcggcuuagcguguguccuaaucuucucucugcguguagguaggccugugccgcaaacaagcuuaccauggcacucucgaaaguaaaacucaacgacacccucaacaaagaccaacuccuuuccagcuccaaauacaccauccaacgauccaccggagacuccaucgacacgcccaacuacgacguccagaaacacaucaacaagcucugcggaaugcuacuaaucaccgaggacgccaaccacaaauucacaggacuuauagggaugcucuacgccaugucccgccucggacgcgaagacacaauaaaaauccuacgagacgccggcuaccacguaaaggcaaacggcgucgacgucaccacacacagacaagacaucaacggaaaggaaaugaaauucgaaguccucacccucgccagccuaaccaccgagauccaaaucaacaucgaaaucgaaucacgcaaauccuacaagaaaaugcucaaagaaaugggagaagucgcccccgaauaccgucacgacucgcccgacugcggcaugauaauccuaugcaucgccgcacucgucauaaccaaacucgccgccggugaccgaucaggacugacagcagucauccgccgagcaaacaacgugcucaaaaacgaaaugaaacgcuacaaaggccuacuccccaaagacaucgccaacuccuucuacgaagucuucgaaaaacacccacacuucaucgacgucuucguccacuucggcaucgcacaaucaucaaccagaggcggcagccgcguugaaggcaucuucgcaggacucuuuaugaacgccuacggcgccggccaagucaugcuccgcuggggcguccuggcaaaaagcgucaaaaacaucaugcuaggccacgcuagcguccaagccgaaauggaacaagucgucgaaguuuacgaguacgcacaaaaacucggcggcgaagcaggcuucuaccacauccuaaacaaccccaaagccucccugcuaucacucacccaauucccccacuucuccagcgucguccucggcaacgccgcaggacuaggcaucaugggagaauaccgcgggacaccgcgcaaccaagaccucuacgacgccgccaaagccuacgccgaacaacucaaagaaaacggcgucauaaacuacucaguccucgaccucaccgccgaagaacucgaagccaucaaacaccaacucaacccaaaagacaacgacgucgaauuauaaggacuaguacuggcugcaucucccuuuccucuguccuccauccuucucccaggauggugaagggggaccugguacccagugauccccaccccaggauccuaaaucaugacuuaccugcuaauaaaaacucauuggaaaagugagaagaucuaaaaaaaaaaaaaaaaaaaaaaaaaaaaaaaaaaaaaaaaaaaaaaaaaaaaaaaaaaaaaaaaugcaucccccccccccccccccccccccccccccccaaaggcucuuuucagagccaccagaauu

SEQ ID NO: 10247 - RNA, 1547 nt, Artificial Sequence
  mRNA product Design c-4 comprising derived and/or modified sequence from HRSV(A2)__P03418.1__N (wt)
gggagaguccgcucagccagguugcagaagcggcuuagcguguguccuaaucuucucucugcguguagguaggccugugccgcaaacaagcuuaccauggcucuuagcaaagucaaguugaaugauacacucaacaaagaucaacuucugucauccagcaaauacaccauccaacggagcacaggagauaguauugauacuccuaauuaugaugugcagaaacacaucaauaaguuauguggcauguuauuaaucacagaagaugcuaaucauaaauucacuggguuaauagguauguuauaugcgaugucuagguuaggaagagaagacaccauaaaaauacucagagaugcgggauaucauguaaaagcaaauggaguagauguaacaacacaucgucaagacauuaauggaaaagaaaugaaauuugaaguguuaacauuggcaagcuuaacaacugaaauucaaaucaacauugagauagaaucuagaaaauccuacaaaaaaaugcuaaaagaaaugggagagguagcuccagaauacaggcaugacucuccugauugugggaugauaauauuauguauagcagcauuaguaauaacuaaauuagcagcaggggacagaucuggucuuacagccgugauuaggagagcuaauaauguccuaaaaaaugaaaugaaacguuacaaaggcuuacuacccaaggacauagccaacagcuucuaugaaguguuugaaaaacauccccacuuuauagauguuuuuguucauuuugguauagcacaaucuucuaccagagguggcaguagaguugaagggauuuuugcaggauuguuuaugaaugccuauggugcagggcaagugauguuacgguggggagucuuagcaaaaucaguuaaaaauauuauguuaggacaugcuagugugcaagcagaaauggaacaaguuguugagguuuaugaauaugcccaaaaauuggguggugaagcaggauucuaccauauauugaacaacccaaaagcaucauuauuaucuuugacucaauuuccucacuucuccaguguaguauuaggcaaugcugcuggccuaggcauaaugggagaguacagagguacaccgaggaaucaagaucuauaugaugcagcaaaggcauaugcugaacaacucaaagaaaauggugugauuaacuacaguguacuagacuugacagcagaagaacuagaggcuaucaaacaucagcuuaauccaaaagauaaugauguagagcuuugaggacuaguggaagcauuuuccuggcugauuaaaagaaauuacucagcuauggucaucuguuccuguuagaaggcuaugcagcauauuauauacuaugcgcauguuaugaaaugcauaauaaaaaauuuuaaaaaaucuaaaagaucuaaaaaaaaaaaaaaaaaaaaaaaaaaaaaaaaaaaaaaaaaaaaaaaaaaaaaaaaaaaaaaaaugcaucccccccccccccccccccccccccccccccaaaggcucuuuucagagccaccagaauu

SEQ ID NO: 10248 - RNA, 1547 nt, Artificial Sequence
  mRNA product Design c-4 comprising derived and/or modified sequence from HRSV(A2)__P03418.1__N (opt1)
gggagaguccgcucagccagguugcagaagcggcuuagcguguguccuaaucuucucucugcguguagguaggccugugccgcaaacaagcuuaccauggcccugagcaaggugaagcucaacgacacccugaacaaggaccagcugcucuccagcuccaaguacaccauccagcgcagcaccggcgacuccaucgacacccccaacuacgacguccagaagcacaucaacaagcugugcgggaugcugcucaucaccgaggacgccaaccacaaguucaccggccugaucgggaugcuguacgcgaugagccggcucggccgcgaggacacgaucaagauccugcgggacgccggguaccacgugaaggccaacggcguggacgucaccacccaccgccaggacaucaacggcaaggagaugaaguucgaggugcugacccucgccucccugacgaccgagauccagaucaacaucgagaucgagagccggaaguccuacaagaagaugcugaaggagaugggggagguggccccggaguaccgccacgacagccccgacugcggcaugaucauccucugcaucgcggcccuggucaucaccaagcuggccgccggggaccgguccggccucaccgcggugauccgccgggccaacaacgugcugaagaacgagaugaagcgcuacaaggggcugcuccccaaggacaucgccaacagcuucuacgaggucuucgagaagcacccccacuucaucgacguguucgugcacuucggcaucgcccaguccagcacgcggggcgggucccgcgucgagggcaucuucgccgggcuguucaugaacgcguacggcgccggccaggugaugcugcgguggggcgugcucgccaagagcgucaagaacaucaugcuggggcacgccuccgugcaggccgagauggagcaggucguggagguguacgaguacgcgcagaagcucgggggcgaggccggguucuaccacauccugaacaacccgaaggccagccugcugucccucacccaguucccccacuucagcagcgugguccugggcaacgccgccggccuggggaucaugggcgaguaccgcgggacgccccggaaccaggaccucuacgacgcggccaaggccuacgccgagcagcugaaggagaacggcgugaucaacuacuccgugcuggaccucaccgccgaggagcuggaggcgaucaagcaccagcugaaccccaaggacaacgacgucgagcucugaggacuaguggaagcauuuuccuggcugauuaaaagaaauuacucagcuauggucaucuguuccuguuagaaggcuaugcagcauauuauauacuaugcgcauguuaugaaaugcauaauaaaaaauuuuaaaaaaucuaaaagaucuaaaaaaaaaaaaaaaaaaaaaaaaaaaaaaaaaaaaaaaaaaaaaaaaaaaaaaaaaaaaaaaaugcaucccccccccccccccccccccccccccccccaaaggcucuuuucagagccaccagaauu

SEQ ID NO: 10249 - RNA, 1547 nt, Artificial Sequence
  mRNA product Design c-4 comprising derived and/or modified sequence from HRSV(A2)__P03418.1__N (opt2)
gggagaguccgcucagccagguugcagaagcggcuuagcguguguccuaaucuucucucugcguguagguaggccugugccgcaaacaagcuuaccauggcccucuccaaggucaagcucaacgacacccucaacaaggaccagcuccucuccuccuccaaguacaccauccagcgcuccaccggcgacuccaucgacacccccaacuacgacguccagaagcacaucaacaagcucugcggcaugcuccucaucaccgaggacgccaaccacaaguucaccggccucaucggcaugcucuacgccaugucccgccucggccgcgaggacaccaucaagauccuccgcgacgccggcuaccacgucaaggccaacggcgucgacgucaccacccaccgccaggacaucaacggcaaggagaugaaguucgagguccucacccucgccucccucaccaccgagauccagaucaacaucgagaucgagucccgcaaguccuacaagaagaugcucaaggagaugggcgaggucgcccccgaguaccgccacgacucccccgacugcggcaugaucauccucugcaucgccgcccucgucaucaccaagcucgccgccggcgaccgcuccggccucaccgccgucauccgccgcgccaacaacguccucaagaacgagaugaagcgcuacaagggccuccuccccaaggacaucgccaacuccuucuacgaggucuucgagaagcacccccacuucaucgacgucuucguccacuucggcaucgcccaguccuccacccgcggcggcucccgcgucgagggcaucuucgccggccucuucaugaacgccuacggcgccggccaggucaugcuccgcuggggcguccucgccaaguccgucaagaacaucaugcucggccacgccuccguccaggccgagauggagcaggucgucgaggucuacgaguacgcccagaagcucggcggcgaggccggcuucuaccacauccucaacaaccccaaggccucccuccucucccucacccaguucccccacuucuccuccgucguccucggcaacgccgccggccucggcaucaugggcgaguaccgcggcaccccccgcaaccaggaccucuacgacgccgccaaggccuacgccgagcagcucaaggagaacggcgucaucaacuacuccguccucgaccucaccgccgaggagcucgaggccaucaagcaccagcucaaccccaaggacaacgacgucgagcucugaggacuaguggaagcauuuuccuggcugauuaaaagaaauuacucagcuauggucaucuguuccuguuagaaggcuaugcagcauauuauauacuaugcgcauguuaugaaaugcauaauaaaaaauuuuaaaaaaucuaaaagaucuaaaaaaaaaaaaaaaaaaaaaaaaaaaaaaaaaaaaaaaaaaaaaaaaaaaaaaaaaaaaaaaaugcaucccccccccccccccccccccccccccccccaaaggcucuuuucagagccaccagaauu

SEQ ID NO: 10250 - RNA, 1547 nt, Artificial Sequence
  mRNA product Design c-4 comprising derived and/or modified sequence from HRSV(A2)__P03418.1__N (opt3)
gggagaguccgcucagccagguugcagaagcggcuuagcguguguccuaaucuucucucugcguguagguaggccugugccgcaaacaagcuuaccauggcccugagcaaggugaaacucaacgacacccuuaauaaggaucagcuguuguccucuucaaaauacacaauccaaagaaguacuggcgacagcauugauacgcccaacuaugacguccagaagcacauaaauaaauuaugcgggaugcugcuaaucaccgaggaugcuaaccauaaguucacaggacucauugguaugcuguacgcaauguccaggcuuggccgggaagacacuaucaagauucugcgcgaugccggguaucacguuaaagcgaauggaguggacguaaccacacaucgacaggauaucaacggcaaggagaugaaauuugaaguguugacccucgcuucucugacuacagagauacagaucaauauugaaaucgagucgcguaagucauacaaaaagaugcugaaggagaugggugaagucgccccugaguauagacacgacagcccagauugugggaugauuauccucugcauagcagccuuagugauuaccaaacuggcugcaggagacaggaguggccuuacggccguuauccggcgcgcuaacaauguguugaagaacgaaaugaaaagauacaagggccugcuaccgaaagauauugccaauuccuucuaugaggucuuugagaagcauccccacuucaucgacguguuuguacacuucgggaucgcgcaaucuagcacuaggggagguucccggguugaaggcauuuuugcaggacucuucaugaacgccuacggggcuggccaggugaugcugcgcugggguguccuugccaaaucagugaagaauauaaugcuggggcaugcaagugugcaggcugagauggaacaggucguugagguguacgaauaugcccaaaaguugggaggcgaggcgggcuuuuaccacauccucaacaauccuaaagccagccuguuaucucugacccaguucccacauuuuuccucaguagugcucgggaacgcagcuggacuugguauuaugggcgaguaucgagggacacccagaaaccaggaccuguacgaugccgcuaaggccuaugcagaacaguugaaagagaauggagucaucaacuacagcgugcuagaccugacugccgaggaacucgaagcuauaaagcaccaacugaauccuaaagauaacgacguugagcuuugaggacuaguggaagcauuuuccuggcugauuaaaagaaauuacucagcuauggucaucuguuccuguuagaaggcuaugcagcauauuauauacuaugcgcauguuaugaaaugcauaauaaaaaauuuuaaaaaaucuaaaagaucuaaaaaaaaaaaaaaaaaaaaaaaaaaaaaaaaaaaaaaaaaaaaaaaaaaaaaaaaaaaaaaaaugcaucccccccccccccccccccccccccccccccaaaggcucuuuucagagccaccagaauu

SEQ ID NO: 10251 - RNA, 1547 nt, Artificial Sequence
  mRNA product Design c-4 comprising derived and/or modified sequence from HRSV(A2)__P03418.1__N (opt4)
gggagaguccgcucagccagguugcagaagcggcuuagcguguguccuaaucuucucucugcguguagguaggccugugccgcaaacaagcuuaccauggcccugagcaaggugaagcugaacgacacccugaacaaggaccagcugcugagcagcagcaaguacaccauccagagaagcaccggcgacagcaucgacacccccaacuacgacgugcagaagcacaucaacaagcugugcggcaugcugcugaucaccgaggacgccaaccacaaguucaccggccugaucggcaugcuguacgccaugagcagacugggcagagaggacaccaucaagauccugagagacgccggcuaccacgugaaggccaacggcguggacgugaccacccacagacaggacaucaacggcaaggagaugaaguucgaggugcugacccuggccagccugaccaccgagauccagaucaacaucgagaucgagagcagaaagagcuacaagaagaugcugaaggagaugggcgagguggcccccgaguacagacacgacagccccgacugcggcaugaucauccugugcaucgccgcccuggugaucaccaagcuggccgccggcgacagaagcggccugaccgccgugaucagaagagccaacaacgugcugaagaacgagaugaagagauacaagggccugcugcccaaggacaucgccaacagcuucuacgagguguucgagaagcacccccacuucaucgacguguucgugcacuucggcaucgcccagagcagcaccagaggcggcagcagaguggagggcaucuucgccggccuguucaugaacgccuacggcgccggccaggugaugcugagauggggcgugcuggccaagagcgugaagaacaucaugcugggccacgccagcgugcaggccgagauggagcaggugguggagguguacgaguacgcccagaagcugggcggcgaggccggcuucuaccacauccugaacaaccccaaggccagccugcugagccugacccaguucccccacuucagcagcguggugcugggcaacgccgccggccugggcaucaugggcgaguacagaggcacccccagaaaccaggaccuguacgacgccgccaaggccuacgccgagcagcugaaggagaacggcgugaucaacuacagcgugcuggaccugaccgccgaggagcuggaggccaucaagcaccagcugaaccccaaggacaacgacguggagcugugaggacuaguggaagcauuuuccuggcugauuaaaagaaauuacucagcuauggucaucuguuccuguuagaaggcuaugcagcauauuauauacuaugcgcauguuaugaaaugcauaauaaaaaauuuuaaaaaaucuaaaagaucuaaaaaaaaaaaaaaaaaaaaaaaaaaaaaaaaaaaaaaaaaaaaaaaaaaaaaaaaaaaaaaaaugcaucccccccccccccccccccccccccccccccaaaggcucuuuucagagccaccagaauu

SEQ ID NO: 10252 - RNA, 1547 nt, Artificial Sequence
  mRNA product Design c-4 comprising derived and/or modified sequence from HRSV(A2)__P03418.1__N (opt5)
gggagaguccgcucagccagguugcagaagcggcuuagcguguguccuaaucuucucucugcguguagguaggccugugccgcaaacaagcuuaccauggcccugagcaaggugaaacucaacgacacccugaauaaggaucagcuucuguccucuagcaaauacacaauccaaagauccacgggcgacucuauugauacccccaacuaugacguccagaagcacaucaauaaacucugcgggaugcugcuuauuacagaggaugcuaaccauaaguucaccggacugaucggcaugcucuacgccaugagccggcuggggcgcgaagacacaauuaagauccugagagaugcgggauaucacguuaaagcuaauggcguggacgugaccacacaucggcaggauaucaacgggaaggagaugaaauuugaaguccucacccuggccucccuuacgaccgagauucagaucaauauugaaaucgagucucgcaagagcuacaaaaagaugcugaaggagaugggagaaguggccccugaguauagacacgacuccccggauuguggcaugauuauccucugcauugcugcccugguuaucacaaaacuugcugccggcgaccggagcgggcugaccgcggugauccgcagagccaacaauguccucaagaacgaaaugaaacgguacaagggacugcugcccaaagauauugcuaauucuuucuaugagguguuugagaagcauccucacuucaucgacguuuuugugcacuucggcauugcccaauccagcacacgcgggggaucuagagucgaaggcaucuuugcuggacucuucaugaacgccuacggggcgggccaggugaugcugcgguggggcgugcuugccaaauccgucaagaauauuaugcuggggcaugcuagcguucaggccgagauggaacaggugguggaggucuacgaauaugcucaaaagcucggaggcgaggccggguuuuaccacauccugaacaaucccaaagccucucuucugucccucacccaguucccucauuuuagcuccgugguucugggaaacgcugcgggccuggggaucaugggagaguaucgcggcacgcccagaaaccaggaccucuacgaugccgcuaaggccuaugccgaacagcugaaagagaauggcgugauuaacuacucuguccuugaccugacagcugaggaacucgaagccaucaagcaccaacugaauccuaaagauaacgacguggagcuuugaggacuaguggaagcauuuuccuggcugauuaaaagaaauuacucagcuauggucaucuguuccuguuagaaggcuaugcagcauauuauauacuaugcgcauguuaugaaaugcauaauaaaaaauuuuaaaaaaucuaaaagaucuaaaaaaaaaaaaaaaaaaaaaaaaaaaaaaaaaaaaaaaaaaaaaaaaaaaaaaaaaaaaaaaaugcaucccccccccccccccccccccccccccccccaaaggcucuuuucagagccaccagaauu

SEQ ID NO: 10253 - RNA, 1547 nt, Artificial Sequence
  mRNA product Design c-4 comprising derived and/or modified sequence from HRSV(A2)__P03418.1__N (opt6)
gggagaguccgcucagccagguugcagaagcggcuuagcguguguccuaaucuucucucugcguguagguaggccugugccgcaaacaagcuuaccauggcacuaagcaaagucaaauuaaacgacacauuaaacaaagaccaacucuuaucaucaucaaaauacacaauacaaagaagcaccggagacaguaucgacacaccaaacuaugacguccaaaaacauauaaauaaauuaugcggcaugcucuuaaucacagaagacgccaaccauaaauuuacaggauuaauaggaauguuauaugcaaugucacgacuagguagagaagacacaauaaaaauacuaagagacgcaggcuaucacguaaaagcaaauggaguagacguaaccacacacagacaagacauaaauggaaaagaaaugaaauuugaaguauuaacacuagcaucacuaacaacagaaauacaaaucaacauagaaauagaaucaagaaaaagcuacaaaaaaauguuaaaagaaaugggagaagucgcaccagaauauagacaugauucaccagacugcggaaugauaauacuaugcauagcagcccuaguaauuacaaaacuagcagcaggagacagaagcggauuaacagcaguaauaagaagagcaaacaacguacuaaaaaacgaaaugaaaagauauaaaggauuauuaccaaaagacauagcaaacucauucuaugaaguauucgaaaaacacccccacuuuauagacgucuucguacacuucggaauagcccaaucauccacaagaggaggaucaagagucgaaggaauauucgcaggauuauucaugaacgcauauggcgcaggacaaguaaugcuaagauggggaguacuagcaaaauccgucaaaaacauaaugcuaggacacgcaucaguucaagcagaaauggaacaaguaguagaaguauacgaauacgcccaaaaacuaggaggagaagcaggauucuaccacauacuaaauaauccaaaagcaucacuacuaagccuaacccaauuuccccacuucucaaguguaguauuaggaaaugcagcuggacuaggaauaaugggagaauacagaggaacaccaagaaaccaagacuuauacgacgcagcaaaagcauacgcagagcaacuuaaagaaaacggaguaauaaacuauagcguacuagacuuaacagcagaagaacuggaagcaauaaaacaucaauuaaacccgaaagacaaugacguagaauuauaaggacuaguggaagcauuuuccuggcugauuaaaagaaauuacucagcuauggucaucuguuccuguuagaaggcuaugcagcauauuauauacuaugcgcauguuaugaaaugcauaauaaaaaauuuuaaaaaaucuaaaagaucuaaaaaaaaaaaaaaaaaaaaaaaaaaaaaaaaaaaaaaaaaaaaaaaaaaaaaaaaaaaaaaaaugcaucccccccccccccccccccccccccccccccaaaggcucuuuucagagccaccagaauu

SEQ ID NO: 10254 - RNA, 1547 nt, Artificial Sequence
  mRNA product Design c-4 comprising derived and/or modified sequence from HRSV(A2)__P03418.1__N (opt11)
gggagaguccgcucagccagguugcagaagcggcuuagcguguguccuaaucuucucucugcguguagguaggccugugccgcaaacaagcuuaccauggcacucucgaaaguaaaacucaacgacacccucaacaaagaccaacuccuuuccagcuccaaauacaccauccaacgauccaccggagacuccaucgacacgcccaacuacgacguccagaaacacaucaacaagcucugcggaaugcuacuaaucaccgaggacgccaaccacaaauucacaggacuuauagggaugcucuacgccaugucccgccucggacgcgaagacacaauaaaaauccuacgagacgccggcuaccacguaaaggcaaacggcgucgacgucaccacacacagacaagacaucaacggaaaggaaaugaaauucgaaguccucacccucgccagccuaaccaccgagauccaaaucaacaucgaaaucgaaucacgcaaauccuacaagaaaaugcucaaagaaaugggagaagucgcccccgaauaccgucacgacucgcccgacugcggcaugauaauccuaugcaucgccgcacucgucauaaccaaacucgccgccggugaccgaucaggacugacagcagucauccgccgagcaaacaacgugcucaaaaacgaaaugaaacgcuacaaaggccuacuccccaaagacaucgccaacuccuucuacgaagucuucgaaaaacacccacacuucaucgacgucuucguccacuucggcaucgcacaaucaucaaccagaggcggcagccgcguugaaggcaucuucgcaggacucuuuaugaacgccuacggcgccggccaagucaugcuccgcuggggcguccuggcaaaaagcgucaaaaacaucaugcuaggccacgcuagcguccaagccgaaauggaacaagucgucgaaguuuacgaguacgcacaaaaacucggcggcgaagcaggcuucuaccacauccuaaacaaccccaaagccucccugcuaucacucacccaauucccccacuucuccagcgucguccucggcaacgccgcaggacuaggcaucaugggagaauaccgcgggacaccgcgcaaccaagaccucuacgacgccgccaaagccuacgccgaacaacucaaagaaaacggcgucauaaacuacucaguccucgaccucaccgccgaagaacucgaagccaucaaacaccaacucaacccaaaagacaacgacgucgaauuauaaggacuaguggaagcauuuuccuggcugauuaaaagaaauuacucagcuauggucaucuguuccuguuagaaggcuaugcagcauauuauauacuaugcgcauguuaugaaaugcauaauaaaaaauuuuaaaaaaucuaaaagaucuaaaaaaaaaaaaaaaaaaaaaaaaaaaaaaaaaaaaaaaaaaaaaaaaaaaaaaaaaaaaaaaaugcaucccccccccccccccccccccccccccccccaaaggcucuuuucagagccaccagaauu

SEQ ID NO: 10255 - RNA, 1465 nt, Artificial Sequence
  mRNA product Design c-5 comprising derived and/or modified sequence from HRSV(A2)__P03418.1__N (wt)
gggagagcggcucggccauuuugucccagucaguccggaggcugcggcugcagaaguaccgccugcggaguaacugcaaagaagcuuaccauggcucuuagcaaagucaaguugaaugauacacucaacaaagaucaacuucugucauccagcaaauacaccauccaacggagcacaggagauaguauugauacuccuaauuaugaugugcagaaacacaucaauaaguuauguggcauguuauuaaucacagaagaugcuaaucauaaauucacuggguuaauagguauguuauaugcgaugucuagguuaggaagagaagacaccauaaaaauacucagagaugcgggauaucauguaaaagcaaauggaguagauguaacaacacaucgucaagacauuaauggaaaagaaaugaaauuugaaguguuaacauuggcaagcuuaacaacugaaauucaaaucaacauugagauagaaucuagaaaauccuacaaaaaaaugcuaaaagaaaugggagagguagcuccagaauacaggcaugacucuccugauugugggaugauaauauuauguauagcagcauuaguaauaacuaaauuagcagcaggggacagaucuggucuuacagccgugauuaggagagcuaauaauguccuaaaaaaugaaaugaaacguuacaaaggcuuacuacccaaggacauagccaacagcuucuaugaaguguuugaaaaacauccccacuuuauagauguuuuuguucauuuugguauagcacaaucuucuaccagagguggcaguagaguugaagggauuuuugcaggauuguuuaugaaugccuauggugcagggcaagugauguuacgguggggagucuuagcaaaaucaguuaaaaauauuauguuaggacaugcuagugugcaagcagaaauggaacaaguuguugagguuuaugaauaugcccaaaaauuggguggugaagcaggauucuaccauauauugaacaacccaaaagcaucauuauuaucuuugacucaauuuccucacuucuccaguguaguauuaggcaaugcugcuggccuaggcauaaugggagaguacagagguacaccgaggaaucaagaucuauaugaugcagcaaaggcauaugcugaacaacucaaagaaaauggugugauuaacuacaguguacuagacuugacagcagaagaacuagaggcuaucaaacaucagcuuaauccaaaagauaaugauguagagcuuugaggacuagucccuguucccagagcccacuuuuuuuucuuuuuuugaaauaaaauagccugucuuucagaucuaaaaaaaaaaaaaaaaaaaaaaaaaaaaaaaaaaaaaaaaaaaaaaaaaaaaaaaaaaaaaaaaugcaucccccccccccccccccccccccccccccccaaaggcucuuuucagagccaccagaauu

SEQ ID NO: 10256 - RNA, 1465 nt, Artificial Sequence
  mRNA product Design c-5 comprising derived and/or modified sequence from HRSV(A2)__P03418.1__N (opt1)
gggagagcggcucggccauuuugucccagucaguccggaggcugcggcugcagaaguaccgccugcggaguaacugcaaagaagcuuaccauggcccugagcaaggugaagcucaacgacacccugaacaaggaccagcugcucuccagcuccaaguacaccauccagcgcagcaccggcgacuccaucgacacccccaacuacgacguccagaagcacaucaacaagcugugcgggaugcugcucaucaccgaggacgccaaccacaaguucaccggccugaucgggaugcuguacgcgaugagccggcucggccgcgaggacacgaucaagauccugcgggacgccggguaccacgugaaggccaacggcguggacgucaccacccaccgccaggacaucaacggcaaggagaugaaguucgaggugcugacccucgccucccugacgaccgagauccagaucaacaucgagaucgagagccggaaguccuacaagaagaugcugaaggagaugggggagguggccccggaguaccgccacgacagccccgacugcggcaugaucauccucugcaucgcggcccuggucaucaccaagcuggccgccggggaccgguccggccucaccgcggugauccgccgggccaacaacgugcugaagaacgagaugaagcgcuacaaggggcugcuccccaaggacaucgccaacagcuucuacgaggucuucgagaagcacccccacuucaucgacguguucgugcacuucggcaucgcccaguccagcacgcggggcgggucccgcgucgagggcaucuucgccgggcuguucaugaacgcguacggcgccggccaggugaugcugcgguggggcgugcucgccaagagcgucaagaacaucaugcuggggcacgccuccgugcaggccgagauggagcaggucguggagguguacgaguacgcgcagaagcucgggggcgaggccggguucuaccacauccugaacaacccgaaggccagccugcugucccucacccaguucccccacuucagcagcgugguccugggcaacgccgccggccuggggaucaugggcgaguaccgcgggacgccccggaaccaggaccucuacgacgcggccaaggccuacgccgagcagcugaaggagaacggcgugaucaacuacuccgugcuggaccucaccgccgaggagcuggaggcgaucaagcaccagcugaaccccaaggacaacgacgucgagcucugaggacuagucccuguucccagagcccacuuuuuuuucuuuuuuugaaauaaaauagccugucuuucagaucuaaaaaaaaaaaaaaaaaaaaaaaaaaaaaaaaaaaaaaaaaaaaaaaaaaaaaaaaaaaaaaaaugcaucccccccccccccccccccccccccccccccaaaggcucuuuucagagccaccagaauu

SEQ ID NO: 10257 - RNA, 1465 nt, Artificial Sequence
  mRNA product Design c-5 comprising derived and/or modified sequence from HRSV(A2)__P03418.1__N (opt2)
gggagagcggcucggccauuuugucccagucaguccggaggcugcggcugcagaaguaccgccugcggaguaacugcaaagaagcuuaccauggcccucuccaaggucaagcucaacgacacccucaacaaggaccagcuccucuccuccuccaaguacaccauccagcgcuccaccggcgacuccaucgacacccccaacuacgacguccagaagcacaucaacaagcucugcggcaugcuccucaucaccgaggacgccaaccacaaguucaccggccucaucggcaugcucuacgccaugucccgccucggccgcgaggacaccaucaagauccuccgcgacgccggcuaccacgucaaggccaacggcgucgacgucaccacccaccgccaggacaucaacggcaaggagaugaaguucgagguccucacccucgccucccucaccaccgagauccagaucaacaucgagaucgagucccgcaaguccuacaagaagaugcucaaggagaugggcgaggucgcccccgaguaccgccacgacucccccgacugcggcaugaucauccucugcaucgccgcccucgucaucaccaagcucgccgccggcgaccgcuccggccucaccgccgucauccgccgcgccaacaacguccucaagaacgagaugaagcgcuacaagggccuccuccccaaggacaucgccaacuccuucuacgaggucuucgagaagcacccccacuucaucgacgucuucguccacuucggcaucgcccaguccuccacccgcggcggcucccgcgucgagggcaucuucgccggccucuucaugaacgccuacggcgccggccaggucaugcuccgcuggggcguccucgccaaguccgucaagaacaucaugcucggccacgccuccguccaggccgagauggagcaggucgucgaggucuacgaguacgcccagaagcucggcggcgaggccggcuucuaccacauccucaacaaccccaaggccucccuccucucccucacccaguucccccacuucuccuccgucguccucggcaacgccgccggccucggcaucaugggcgaguaccgcggcaccccccgcaaccaggaccucuacgacgccgccaaggccuacgccgagcagcucaaggagaacggcgucaucaacuacuccguccucgaccucaccgccgaggagcucgaggccaucaagcaccagcucaaccccaaggacaacgacgucgagcucugaggacuagucccuguucccagagcccacuuuuuuuucuuuuuuugaaauaaaauagccugucuuucagaucuaaaaaaaaaaaaaaaaaaaaaaaaaaaaaaaaaaaaaaaaaaaaaaaaaaaaaaaaaaaaaaaaugcaucccccccccccccccccccccccccccccccaaaggcucuuuucagagccaccagaauu

SEQ ID NO: 10258 - RNA, 1465 nt, Artificial Sequence
  mRNA product Design c-5 comprising derived and/or modified sequence from HRSV(A2)__P03418.1__N (opt3)
gggagagcggcucggccauuuugucccagucaguccggaggcugcggcugcagaaguaccgccugcggaguaacugcaaagaagcuuaccauggcccugagcaaggugaaacucaacgacacccuuaauaaggaucagcuguuguccucuucaaaauacacaauccaaagaaguacuggcgacagcauugauacgcccaacuaugacguccagaagcacauaaauaaauuaugcgggaugcugcuaaucaccgaggaugcuaaccauaaguucacaggacucauugguaugcuguacgcaauguccaggcuuggccgggaagacacuaucaagauucugcgcgaugccggguaucacguuaaagcgaauggaguggacguaaccacacaucgacaggauaucaacggcaaggagaugaaauuugaaguguugacccucgcuucucugacuacagagauacagaucaauauugaaaucgagucgcguaagucauacaaaaagaugcugaaggagaugggugaagucgccccugaguauagacacgacagcccagauugugggaugauuauccucugcauagcagccuuagugauuaccaaacuggcugcaggagacaggaguggccuuacggccguuauccggcgcgcuaacaauguguugaagaacgaaaugaaaagauacaagggccugcuaccgaaagauauugccaauuccuucuaugaggucuuugagaagcauccccacuucaucgacguguuuguacacuucgggaucgcgcaaucuagcacuaggggagguucccggguugaaggcauuuuugcaggacucuucaugaacgccuacggggcuggccaggugaugcugcgcugggguguccuugccaaaucagugaagaauauaaugcuggggcaugcaagugugcaggcugagauggaacaggucguugagguguacgaauaugcccaaaaguugggaggcgaggcgggcuuuuaccacauccucaacaauccuaaagccagccuguuaucucugacccaguucccacauuuuuccucaguagugcucgggaacgcagcuggacuugguauuaugggcgaguaucgagggacacccagaaaccaggaccuguacgaugccgcuaaggccuaugcagaacaguugaaagagaauggagucaucaacuacagcgugcuagaccugacugccgaggaacucgaagcuauaaagcaccaacugaauccuaaagauaacgacguugagcuuugaggacuagucccuguucccagagcccacuuuuuuuucuuuuuuugaaauaaaauagccugucuuucagaucuaaaaaaaaaaaaaaaaaaaaaaaaaaaaaaaaaaaaaaaaaaaaaaaaaaaaaaaaaaaaaaaaugcaucccccccccccccccccccccccccccccccaaaggcucuuuucagagccaccagaauu

SEQ ID NO: 10259 - RNA, 1465 nt, Artificial Sequence
  mRNA product Design c-5 comprising derived and/or modified sequence from HRSV(A2)__P03418.1__N (opt4)
gggagagcggcucggccauuuugucccagucaguccggaggcugcggcugcagaaguaccgccugcggaguaacugcaaagaagcuuaccauggcccugagcaaggugaagcugaacgacacccugaacaaggaccagcugcugagcagcagcaaguacaccauccagagaagcaccggcgacagcaucgacacccccaacuacgacgugcagaagcacaucaacaagcugugcggcaugcugcugaucaccgaggacgccaaccacaaguucaccggccugaucggcaugcuguacgccaugagcagacugggcagagaggacaccaucaagauccugagagacgccggcuaccacgugaaggccaacggcguggacgugaccacccacagacaggacaucaacggcaaggagaugaaguucgaggugcugacccuggccagccugaccaccgagauccagaucaacaucgagaucgagagcagaaagagcuacaagaagaugcugaaggagaugggcgagguggcccccgaguacagacacgacagccccgacugcggcaugaucauccugugcaucgccgcccuggugaucaccaagcuggccgccggcgacagaagcggccugaccgccgugaucagaagagccaacaacgugcugaagaacgagaugaagagauacaagggccugcugcccaaggacaucgccaacagcuucuacgagguguucgagaagcacccccacuucaucgacguguucgugcacuucggcaucgcccagagcagcaccagaggcggcagcagaguggagggcaucuucgccggccuguucaugaacgccuacggcgccggccaggugaugcugagauggggcgugcuggccaagagcgugaagaacaucaugcugggccacgccagcgugcaggccgagauggagcaggugguggagguguacgaguacgcccagaagcugggcggcgaggccggcuucuaccacauccugaacaaccccaaggccagccugcugagccugacccaguucccccacuucagcagcguggugcugggcaacgccgccggccugggcaucaugggcgaguacagaggcacccccagaaaccaggaccuguacgacgccgccaaggccuacgccgagcagcugaaggagaacggcgugaucaacuacagcgugcuggaccugaccgccgaggagcuggaggccaucaagcaccagcugaaccccaaggacaacgacguggagcugugaggacuagucccuguucccagagcccacuuuuuuuucuuuuuuugaaauaaaauagccugucuuucagaucuaaaaaaaaaaaaaaaaaaaaaaaaaaaaaaaaaaaaaaaaaaaaaaaaaaaaaaaaaaaaaaaaugcaucccccccccccccccccccccccccccccccaaaggcucuuuucagagccaccagaauu

SEQ ID NO: 10260 - RNA, 1465 nt, Artificial Sequence
  mRNA product Design c-5 comprising derived and/or modified sequence from HRSV(A2)__P03418.1__N (opt5)
gggagagcggcucggccauuuugucccagucaguccggaggcugcggcugcagaaguaccgccugcggaguaacugcaaagaagcuuaccauggcccugagcaaggugaaacucaacgacacccugaauaaggaucagcuucuguccucuagcaaauacacaauccaaagauccacgggcgacucuauugauacccccaacuaugacguccagaagcacaucaauaaacucugcgggaugcugcuuauuacagaggaugcuaaccauaaguucaccggacugaucggcaugcucuacgccaugagccggcuggggcgcgaagacacaauuaagauccugagagaugcgggauaucacguuaaagcuaauggcguggacgugaccacacaucggcaggauaucaacgggaaggagaugaaauuugaaguccucacccuggccucccuuacgaccgagauucagaucaauauugaaaucgagucucgcaagagcuacaaaaagaugcugaaggagaugggagaaguggccccugaguauagacacgacuccccggauuguggcaugauuauccucugcauugcugcccugguuaucacaaaacuugcugccggcgaccggagcgggcugaccgcggugauccgcagagccaacaauguccucaagaacgaaaugaaacgguacaagggacugcugcccaaagauauugcuaauucuuucuaugagguguuugagaagcauccucacuucaucgacguuuuugugcacuucggcauugcccaauccagcacacgcgggggaucuagagucgaaggcaucuuugcuggacucuucaugaacgccuacggggcgggccaggugaugcugcgguggggcgugcuugccaaauccgucaagaauauuaugcuggggcaugcuagcguucaggccgagauggaacaggugguggaggucuacgaauaugcucaaaagcucggaggcgaggccggguuuuaccacauccugaacaaucccaaagccucucuucugucccucacccaguucccucauuuuagcuccgugguucugggaaacgcugcgggccuggggaucaugggagaguaucgcggcacgcccagaaaccaggaccucuacgaugccgcuaaggccuaugccgaacagcugaaagagaauggcgugauuaacuacucuguccuugaccugacagcugaggaacucgaagccaucaagcaccaacugaauccuaaagauaacgacguggagcuuugaggacuagucccuguucccagagcccacuuuuuuuucuuuuuuugaaauaaaauagccugucuuucagaucuaaaaaaaaaaaaaaaaaaaaaaaaaaaaaaaaaaaaaaaaaaaaaaaaaaaaaaaaaaaaaaaaugcaucccccccccccccccccccccccccccccccaaaggcucuuuucagagccaccagaauu

SEQ ID NO: 10261 - RNA, 1465 nt, Artificial Sequence
  mRNA product Design c-5 comprising derived and/or modified sequence from HRSV(A2)__P03418.1__N (opt6)
gggagagcggcucggccauuuugucccagucaguccggaggcugcggcugcagaaguaccgccugcggaguaacugcaaagaagcuuaccauggcacuaagcaaagucaaauuaaacgacacauuaaacaaagaccaacucuuaucaucaucaaaauacacaauacaaagaagcaccggagacaguaucgacacaccaaacuaugacguccaaaaacauauaaauaaauuaugcggcaugcucuuaaucacagaagacgccaaccauaaauuuacaggauuaauaggaauguuauaugcaaugucacgacuagguagagaagacacaauaaaaauacuaagagacgcaggcuaucacguaaaagcaaauggaguagacguaaccacacacagacaagacauaaauggaaaagaaaugaaauuugaaguauuaacacuagcaucacuaacaacagaaauacaaaucaacauagaaauagaaucaagaaaaagcuacaaaaaaauguuaaaagaaaugggagaagucgcaccagaauauagacaugauucaccagacugcggaaugauaauacuaugcauagcagcccuaguaauuacaaaacuagcagcaggagacagaagcggauuaacagcaguaauaagaagagcaaacaacguacuaaaaaacgaaaugaaaagauauaaaggauuauuaccaaaagacauagcaaacucauucuaugaaguauucgaaaaacacccccacuuuauagacgucuucguacacuucggaauagcccaaucauccacaagaggaggaucaagagucgaaggaauauucgcaggauuauucaugaacgcauauggcgcaggacaaguaaugcuaagauggggaguacuagcaaaauccgucaaaaacauaaugcuaggacacgcaucaguucaagcagaaauggaacaaguaguagaaguauacgaauacgcccaaaaacuaggaggagaagcaggauucuaccacauacuaaauaauccaaaagcaucacuacuaagccuaacccaauuuccccacuucucaaguguaguauuaggaaaugcagcuggacuaggaauaaugggagaauacagaggaacaccaagaaaccaagacuuauacgacgcagcaaaagcauacgcagagcaacuuaaagaaaacggaguaauaaacuauagcguacuagacuuaacagcagaagaacuggaagcaauaaaacaucaauuaaacccgaaagacaaugacguagaauuauaaggacuagucccuguucccagagcccacuuuuuuuucuuuuuuugaaauaaaauagccugucuuucagaucuaaaaaaaaaaaaaaaaaaaaaaaaaaaaaaaaaaaaaaaaaaaaaaaaaaaaaaaaaaaaaaaaugcaucccccccccccccccccccccccccccccccaaaggcucuuuucagagccaccagaauu

SEQ ID NO: 10262 - RNA, 1465 nt, Artificial Sequence
  mRNA product Design c-5 comprising derived and/or modified sequence from HRSV(A2)__P03418.1__N (opt11)
gggagagcggcucggccauuuugucccagucaguccggaggcugcggcugcagaaguaccgccugcggaguaacugcaaagaagcuuaccauggcacucucgaaaguaaaacucaacgacacccucaacaaagaccaacuccuuuccagcuccaaauacaccauccaacgauccaccggagacuccaucgacacgcccaacuacgacguccagaaacacaucaacaagcucugcggaaugcuacuaaucaccgaggacgccaaccacaaauucacaggacuuauagggaugcucuacgccaugucccgccucggacgcgaagacacaauaaaaauccuacgagacgccggcuaccacguaaaggcaaacggcgucgacgucaccacacacagacaagacaucaacggaaaggaaaugaaauucgaaguccucacccucgccagccuaaccaccgagauccaaaucaacaucgaaaucgaaucacgcaaauccuacaagaaaaugcucaaagaaaugggagaagucgcccccgaauaccgucacgacucgcccgacugcggcaugauaauccuaugcaucgccgcacucgucauaaccaaacucgccgccggugaccgaucaggacugacagcagucauccgccgagcaaacaacgugcucaaaaacgaaaugaaacgcuacaaaggccuacuccccaaagacaucgccaacuccuucuacgaagucuucgaaaaacacccacacuucaucgacgucuucguccacuucggcaucgcacaaucaucaaccagaggcggcagccgcguugaaggcaucuucgcaggacucuuuaugaacgccuacggcgccggccaagucaugcuccgcuggggcguccuggcaaaaagcgucaaaaacaucaugcuaggccacgcuagcguccaagccgaaauggaacaagucgucgaaguuuacgaguacgcacaaaaacucggcggcgaagcaggcuucuaccacauccuaaacaaccccaaagccucccugcuaucacucacccaauucccccacuucuccagcgucguccucggcaacgccgcaggacuaggcaucaugggagaauaccgcgggacaccgcgcaaccaagaccucuacgacgccgccaaagccuacgccgaacaacucaaagaaaacggcgucauaaacuacucaguccucgaccucaccgccgaagaacucgaagccaucaaacaccaacucaacccaaaagacaacgacgucgaauuauaaggacuagucccuguucccagagcccacuuuuuuuucuuuuuuugaaauaaaauagccugucuuucagaucuaaaaaaaaaaaaaaaaaaaaaaaaaaaaaaaaaaaaaaaaaaaaaaaaaaaaaaaaaaaaaaaaugcaucccccccccccccccccccccccccccccccaaaggcucuuuucagagccaccagaauu

SEQ ID NO: 10263 - RNA, 1474 nt, Artificial Sequence
  mRNA product Design d-1 comprising derived and/or modified sequence from HRSV(A2)__P03418.1__N (wt)
gggagacccgugacccggaaguuguacggcuacgcgacuuucccucccacaaacccucgcgcccuuccuuuccuacuugggcccggcagaaagcuuaccauggcucuuagcaaagucaaguugaaugauacacucaacaaagaucaacuucugucauccagcaaauacaccauccaacggagcacaggagauaguauugauacuccuaauuaugaugugcagaaacacaucaauaaguuauguggcauguuauuaaucacagaagaugcuaaucauaaauucacuggguuaauagguauguuauaugcgaugucuagguuaggaagagaagacaccauaaaaauacucagagaugcgggauaucauguaaaagcaaauggaguagauguaacaacacaucgucaagacauuaauggaaaagaaaugaaauuugaaguguuaacauuggcaagcuuaacaacugaaauucaaaucaacauugagauagaaucuagaaaauccuacaaaaaaaugcuaaaagaaaugggagagguagcuccagaauacaggcaugacucuccugauugugggaugauaauauuauguauagcagcauuaguaauaacuaaauuagcagcaggggacagaucuggucuuacagccgugauuaggagagcuaauaauguccuaaaaaaugaaaugaaacguuacaaaggcuuacuacccaaggacauagccaacagcuucuaugaaguguuugaaaaacauccccacuuuauagauguuuuuguucauuuugguauagcacaaucuucuaccagagguggcaguagaguugaagggauuuuugcaggauuguuuaugaaugccuauggugcagggcaagugauguuacgguggggagucuuagcaaaaucaguuaaaaauauuauguuaggacaugcuagugugcaagcagaaauggaacaaguuguugagguuuaugaauaugcccaaaaauuggguggugaagcaggauucuaccauauauugaacaacccaaaagcaucauuauuaucuuugacucaauuuccucacuucuccaguguaguauuaggcaaugcugcuggccuaggcauaaugggagaguacagagguacaccgaggaaucaagaucuauaugaugcagcaaaggcauaugcugaacaacucaaagaaaauggugugauuaacuacaguguacuagacuugacagcagaagaacuagaggcuaucaaacaucagcuuaauccaaaagauaaugauguagagcuuugaggacuagucccuguucccagagcccacuuuuuuuucuuuuuuugaaauaaaauagccugucuuucagaucuaaaaaaaaaaaaaaaaaaaaaaaaaaaaaaaaaaaaaaaaaaaaaaaaaaaaaaaaaaaaaaaaugcaucccccccccccccccccccccccccccccccaaaggcucuuuucagagccaccagaauu

SEQ ID NO: 10264 - RNA, 1474 nt, Artificial Sequence
  mRNA product Design d-1 comprising derived and/or modified sequence from HRSV(A2)__P03418.1__N (opt1)
gggagacccgugacccggaaguuguacggcuacgcgacuuucccucccacaaacccucgcgcccuuccuuuccuacuugggcccggcagaaagcuuaccauggcccugagcaaggugaagcucaacgacacccugaacaaggaccagcugcucuccagcuccaaguacaccauccagcgcagcaccggcgacuccaucgacacccccaacuacgacguccagaagcacaucaacaagcugugcgggaugcugcucaucaccgaggacgccaaccacaaguucaccggccugaucgggaugcuguacgcgaugagccggcucggccgcgaggacacgaucaagauccugcgggacgccggguaccacgugaaggccaacggcguggacgucaccacccaccgccaggacaucaacggcaaggagaugaaguucgaggugcugacccucgccucccugacgaccgagauccagaucaacaucgagaucgagagccggaaguccuacaagaagaugcugaaggagaugggggagguggccccggaguaccgccacgacagccccgacugcggcaugaucauccucugcaucgcggcccuggucaucaccaagcuggccgccggggaccgguccggccucaccgcggugauccgccgggccaacaacgugcugaagaacgagaugaagcgcuacaaggggcugcuccccaaggacaucgccaacagcuucuacgaggucuucgagaagcacccccacuucaucgacguguucgugcacuucggcaucgcccaguccagcacgcggggcgggucccgcgucgagggcaucuucgccgggcuguucaugaacgcguacggcgccggccaggugaugcugcgguggggcgugcucgccaagagcgucaagaacaucaugcuggggcacgccuccgugcaggccgagauggagcaggucguggagguguacgaguacgcgcagaagcucgggggcgaggccggguucuaccacauccugaacaacccgaaggccagccugcugucccucacccaguucccccacuucagcagcgugguccugggcaacgccgccggccuggggaucaugggcgaguaccgcgggacgccccggaaccaggaccucuacgacgcggccaaggccuacgccgagcagcugaaggagaacggcgugaucaacuacuccgugcuggaccucaccgccgaggagcuggaggcgaucaagcaccagcugaaccccaaggacaacgacgucgagcucugaggacuagucccuguucccagagcccacuuuuuuuucuuuuuuugaaauaaaauagccugucuuucagaucuaaaaaaaaaaaaaaaaaaaaaaaaaaaaaaaaaaaaaaaaaaaaaaaaaaaaaaaaaaaaaaaaugcaucccccccccccccccccccccccccccccccaaaggcucuuuucagagccaccagaauu

SEQ ID NO: 10265 - RNA, 1474 nt, Artificial Sequence
  mRNA product Design d-1 comprising derived and/or modified sequence from HRSV(A2)__P03418.1__N (opt2)
gggagacccgugacccggaaguuguacggcuacgcgacuuucccucccacaaacccucgcgcccuuccuuuccuacuugggcccggcagaaagcuuaccauggcccucuccaaggucaagcucaacgacacccucaacaaggaccagcuccucuccuccuccaaguacaccauccagcgcuccaccggcgacuccaucgacacccccaacuacgacguccagaagcacaucaacaagcucugcggcaugcuccucaucaccgaggacgccaaccacaaguucaccggccucaucggcaugcucuacgccaugucccgccucggccgcgaggacaccaucaagauccuccgcgacgccggcuaccacgucaaggccaacggcgucgacgucaccacccaccgccaggacaucaacggcaaggagaugaaguucgagguccucacccucgccucccucaccaccgagauccagaucaacaucgagaucgagucccgcaaguccuacaagaagaugcucaaggagaugggcgaggucgcccccgaguaccgccacgacucccccgacugcggcaugaucauccucugcaucgccgcccucgucaucaccaagcucgccgccggcgaccgcuccggccucaccgccgucauccgccgcgccaacaacguccucaagaacgagaugaagcgcuacaagggccuccuccccaaggacaucgccaacuccuucuacgaggucuucgagaagcacccccacuucaucgacgucuucguccacuucggcaucgcccaguccuccacccgcggcggcucccgcgucgagggcaucuucgccggccucuucaugaacgccuacggcgccggccaggucaugcuccgcuggggcguccucgccaaguccgucaagaacaucaugcucggccacgccuccguccaggccgagauggagcaggucgucgaggucuacgaguacgcccagaagcucggcggcgaggccggcuucuaccacauccucaacaaccccaaggccucccuccucucccucacccaguucccccacuucuccuccgucguccucggcaacgccgccggccucggcaucaugggcgaguaccgcggcaccccccgcaaccaggaccucuacgacgccgccaaggccuacgccgagcagcucaaggagaacggcgucaucaacuacuccguccucgaccucaccgccgaggagcucgaggccaucaagcaccagcucaaccccaaggacaacgacgucgagcucugaggacuagucccuguucccagagcccacuuuuuuuucuuuuuuugaaauaaaauagccugucuuucagaucuaaaaaaaaaaaaaaaaaaaaaaaaaaaaaaaaaaaaaaaaaaaaaaaaaaaaaaaaaaaaaaaaugcaucccccccccccccccccccccccccccccccaaaggcucuuuucagagccaccagaauu

SEQ ID NO: 10266 - RNA, 1474 nt, Artificial Sequence
  mRNA product Design d-1 comprising derived and/or modified sequence from HRSV(A2)__P03418.1__N (opt3)
gggagacccgugacccggaaguuguacggcuacgcgacuuucccucccacaaacccucgcgcccuuccuuuccuacuugggcccggcagaaagcuuaccauggcccugagcaaggugaaacucaacgacacccuuaauaaggaucagcuguuguccucuucaaaauacacaauccaaagaaguacuggcgacagcauugauacgcccaacuaugacguccagaagcacauaaauaaauuaugcgggaugcugcuaaucaccgaggaugcuaaccauaaguucacaggacucauugguaugcuguacgcaauguccaggcuuggccgggaagacacuaucaagauucugcgcgaugccggguaucacguuaaagcgaauggaguggacguaaccacacaucgacaggauaucaacggcaaggagaugaaauuugaaguguugacccucgcuucucugacuacagagauacagaucaauauugaaaucgagucgcguaagucauacaaaaagaugcugaaggagaugggugaagucgccccugaguauagacacgacagcccagauugugggaugauuauccucugcauagcagccuuagugauuaccaaacuggcugcaggagacaggaguggccuuacggccguuauccggcgcgcuaacaauguguugaagaacgaaaugaaaagauacaagggccugcuaccgaaagauauugccaauuccuucuaugaggucuuugagaagcauccccacuucaucgacguguuuguacacuucgggaucgcgcaaucuagcacuaggggagguucccggguugaaggcauuuuugcaggacucuucaugaacgccuacggggcuggccaggugaugcugcgcugggguguccuugccaaaucagugaagaauauaaugcuggggcaugcaagugugcaggcugagauggaacaggucguugagguguacgaauaugcccaaaaguugggaggcgaggcgggcuuuuaccacauccucaacaauccuaaagccagccuguuaucucugacccaguucccacauuuuuccucaguagugcucgggaacgcagcuggacuugguauuaugggcgaguaucgagggacacccagaaaccaggaccuguacgaugccgcuaaggccuaugcagaacaguugaaagagaauggagucaucaacuacagcgugcuagaccugacugccgaggaacucgaagcuauaaagcaccaacugaauccuaaagauaacgacguugagcuuugaggacuagucccuguucccagagcccacuuuuuuuucuuuuuuugaaauaaaauagccugucuuucagaucuaaaaaaaaaaaaaaaaaaaaaaaaaaaaaaaaaaaaaaaaaaaaaaaaaaaaaaaaaaaaaaaaugcaucccccccccccccccccccccccccccccccaaaggcucuuuucagagccaccagaauu

SEQ ID NO: 10267 - RNA, 1474 nt, Artificial Sequence
  mRNA product Design d-1 comprising derived and/or modified sequence from HRSV(A2)__P03418.1__N (opt4)
gggagacccgugacccggaaguuguacggcuacgcgacuuucccucccacaaacccucgcgcccuuccuuuccuacuugggcccggcagaaagcuuaccauggcccugagcaaggugaagcugaacgacacccugaacaaggaccagcugcugagcagcagcaaguacaccauccagagaagcaccggcgacagcaucgacacccccaacuacgacgugcagaagcacaucaacaagcugugcggcaugcugcugaucaccgaggacgccaaccacaaguucaccggccugaucggcaugcuguacgccaugagcagacugggcagagaggacaccaucaagauccugagagacgccggcuaccacgugaaggccaacggcguggacgugaccacccacagacaggacaucaacggcaaggagaugaaguucgaggugcugacccuggccagccugaccaccgagauccagaucaacaucgagaucgagagcagaaagagcuacaagaagaugcugaaggagaugggcgagguggcccccgaguacagacacgacagccccgacugcggcaugaucauccugugcaucgccgcccuggugaucaccaagcuggccgccggcgacagaagcggccugaccgccgugaucagaagagccaacaacgugcugaagaacgagaugaagagauacaagggccugcugcccaaggacaucgccaacagcuucuacgagguguucgagaagcacccccacuucaucgacguguucgugcacuucggcaucgcccagagcagcaccagaggcggcagcagaguggagggcaucuucgccggccuguucaugaacgccuacggcgccggccaggugaugcugagauggggcgugcuggccaagagcgugaagaacaucaugcugggccacgccagcgugcaggccgagauggagcaggugguggagguguacgaguacgcccagaagcugggcggcgaggccggcuucuaccacauccugaacaaccccaaggccagccugcugagccugacccaguucccccacuucagcagcguggugcugggcaacgccgccggccugggcaucaugggcgaguacagaggcacccccagaaaccaggaccuguacgacgccgccaaggccuacgccgagcagcugaaggagaacggcgugaucaacuacagcgugcuggaccugaccgccgaggagcuggaggccaucaagcaccagcugaaccccaaggacaacgacguggagcugugaggacuagucccuguucccagagcccacuuuuuuuucuuuuuuugaaauaaaauagccugucuuucagaucuaaaaaaaaaaaaaaaaaaaaaaaaaaaaaaaaaaaaaaaaaaaaaaaaaaaaaaaaaaaaaaaaugcaucccccccccccccccccccccccccccccccaaaggcucuuuucagagccaccagaauu

SEQ ID NO: 10268 - RNA, 1474 nt, Artificial Sequence
  mRNA product Design d-1 comprising derived and/or modified sequence from HRSV(A2)__P03418.1__N (opt5)
gggagacccgugacccggaaguuguacggcuacgcgacuuucccucccacaaacccucgcgcccuuccuuuccuacuugggcccggcagaaagcuuaccauggcccugagcaaggugaaacucaacgacacccugaauaaggaucagcuucuguccucuagcaaauacacaauccaaagauccacgggcgacucuauugauacccccaacuaugacguccagaagcacaucaauaaacucugcgggaugcugcuuauuacagaggaugcuaaccauaaguucaccggacugaucggcaugcucuacgccaugagccggcuggggcgcgaagacacaauuaagauccugagagaugcgggauaucacguuaaagcuaauggcguggacgugaccacacaucggcaggauaucaacgggaaggagaugaaauuugaaguccucacccuggccucccuuacgaccgagauucagaucaauauugaaaucgagucucgcaagagcuacaaaaagaugcugaaggagaugggagaaguggccccugaguauagacacgacuccccggauuguggcaugauuauccucugcauugcugcccugguuaucacaaaacuugcugccggcgaccggagcgggcugaccgcggugauccgcagagccaacaauguccucaagaacgaaaugaaacgguacaagggacugcugcccaaagauauugcuaauucuuucuaugagguguuugagaagcauccucacuucaucgacguuuuugugcacuucggcauugcccaauccagcacacgcgggggaucuagagucgaaggcaucuuugcuggacucuucaugaacgccuacggggcgggccaggugaugcugcgguggggcgugcuugccaaauccgucaagaauauuaugcuggggcaugcuagcguucaggccgagauggaacaggugguggaggucuacgaauaugcucaaaagcucggaggcgaggccggguuuuaccacauccugaacaaucccaaagccucucuucugucccucacccaguucccucauuuuagcuccgugguucugggaaacgcugcgggccuggggaucaugggagaguaucgcggcacgcccagaaaccaggaccucuacgaugccgcuaaggccuaugccgaacagcugaaagagaauggcgugauuaacuacucuguccuugaccugacagcugaggaacucgaagccaucaagcaccaacugaauccuaaagauaacgacguggagcuuugaggacuagucccuguucccagagcccacuuuuuuuucuuuuuuugaaauaaaauagccugucuuucagaucuaaaaaaaaaaaaaaaaaaaaaaaaaaaaaaaaaaaaaaaaaaaaaaaaaaaaaaaaaaaaaaaaugcaucccccccccccccccccccccccccccccccaaaggcucuuuucagagccaccagaauu

SEQ ID NO: 10269 - RNA, 1474 nt, Artificial Sequence
  mRNA product Design d-1 comprising derived and/or modified sequence from HRSV(A2)__P03418.1__N (opt6)
gggagacccgugacccggaaguuguacggcuacgcgacuuucccucccacaaacccucgcgcccuuccuuuccuacuugggcccggcagaaagcuuaccauggcacuaagcaaagucaaauuaaacgacacauuaaacaaagaccaacucuuaucaucaucaaaauacacaauacaaagaagcaccggagacaguaucgacacaccaaacuaugacguccaaaaacauauaaauaaauuaugcggcaugcucuuaaucacagaagacgccaaccauaaauuuacaggauuaauaggaauguuauaugcaaugucacgacuagguagagaagacacaauaaaaauacuaagagacgcaggcuaucacguaaaagcaaauggaguagacguaaccacacacagacaagacauaaauggaaaagaaaugaaauuugaaguauuaacacuagcaucacuaacaacagaaauacaaaucaacauagaaauagaaucaagaaaaagcuacaaaaaaauguuaaaagaaaugggagaagucgcaccagaauauagacaugauucaccagacugcggaaugauaauacuaugcauagcagcccuaguaauuacaaaacuagcagcaggagacagaagcggauuaacagcaguaauaagaagagcaaacaacguacuaaaaaacgaaaugaaaagauauaaaggauuauuaccaaaagacauagcaaacucauucuaugaaguauucgaaaaacacccccacuuuauagacgucuucguacacuucggaauagcccaaucauccacaagaggaggaucaagagucgaaggaauauucgcaggauuauucaugaacgcauauggcgcaggacaaguaaugcuaagauggggaguacuagcaaaauccgucaaaaacauaaugcuaggacacgcaucaguucaagcagaaauggaacaaguaguagaaguauacgaauacgcccaaaaacuaggaggagaagcaggauucuaccacauacuaaauaauccaaaagcaucacuacuaagccuaacccaauuuccccacuucucaaguguaguauuaggaaaugcagcuggacuaggaauaaugggagaauacagaggaacaccaagaaaccaagacuuauacgacgcagcaaaagcauacgcagagcaacuuaaagaaaacggaguaauaaacuauagcguacuagacuuaacagcagaagaacuggaagcaauaaaacaucaauuaaacccgaaagacaaugacguagaauuauaaggacuagucccuguucccagagcccacuuuuuuuucuuuuuuugaaauaaaauagccugucuuucagaucuaaaaaaaaaaaaaaaaaaaaaaaaaaaaaaaaaaaaaaaaaaaaaaaaaaaaaaaaaaaaaaaaugcaucccccccccccccccccccccccccccccccaaaggcucuuuucagagccaccagaauu

SEQ ID NO: 10270 - RNA, 1474 nt, Artificial Sequence
  mRNA product Design d-1 comprising derived and/or modified sequence from HRSV(A2)__P03418.1__N (opt11)
gggagacccgugacccggaaguuguacggcuacgcgacuuucccucccacaaacccucgcgcccuuccuuuccuacuugggcccggcagaaagcuuaccauggcacucucgaaaguaaaacucaacgacacccucaacaaagaccaacuccuuuccagcuccaaauacaccauccaacgauccaccggagacuccaucgacacgcccaacuacgacguccagaaacacaucaacaagcucugcggaaugcuacuaaucaccgaggacgccaaccacaaauucacaggacuuauagggaugcucuacgccaugucccgccucggacgcgaagacacaauaaaaauccuacgagacgccggcuaccacguaaaggcaaacggcgucgacgucaccacacacagacaagacaucaacggaaaggaaaugaaauucgaaguccucacccucgccagccuaaccaccgagauccaaaucaacaucgaaaucgaaucacgcaaauccuacaagaaaaugcucaaagaaaugggagaagucgcccccgaauaccgucacgacucgcccgacugcggcaugauaauccuaugcaucgccgcacucgucauaaccaaacucgccgccggugaccgaucaggacugacagcagucauccgccgagcaaacaacgugcucaaaaacgaaaugaaacgcuacaaaggccuacuccccaaagacaucgccaacuccuucuacgaagucuucgaaaaacacccacacuucaucgacgucuucguccacuucggcaucgcacaaucaucaaccagaggcggcagccgcguugaaggcaucuucgcaggacucuuuaugaacgccuacggcgccggccaagucaugcuccgcuggggcguccuggcaaaaagcgucaaaaacaucaugcuaggccacgcuagcguccaagccgaaauggaacaagucgucgaaguuuacgaguacgcacaaaaacucggcggcgaagcaggcuucuaccacauccuaaacaaccccaaagccucccugcuaucacucacccaauucccccacuucuccagcgucguccucggcaacgccgcaggacuaggcaucaugggagaauaccgcgggacaccgcgcaaccaagaccucuacgacgccgccaaagccuacgccgaacaacucaaagaaaacggcgucauaaacuacucaguccucgaccucaccgccgaagaacucgaagccaucaaacaccaacucaacccaaaagacaacgacgucgaauuauaaggacuagucccuguucccagagcccacuuuuuuuucuuuuuuugaaauaaaauagccugucuuucagaucuaaaaaaaaaaaaaaaaaaaaaaaaaaaaaaaaaaaaaaaaaaaaaaaaaaaaaaaaaaaaaaaaugcaucccccccccccccccccccccccccccccccaaaggcucuuuucagagccaccagaauu

SEQ ID NO: 10271 - RNA, 1529 nt, Artificial Sequence
  mRNA product Design d-2 comprising derived and/or modified sequence from HRSV(A2)__P03418.1__N (wt)
gggagagcggcucggccauuuugucccagucaguccggaggcugcggcugcagaaguaccgccugcggaguaacugcaaagaagcuuaccauggcucuuagcaaagucaaguugaaugauacacucaacaaagaucaacuucugucauccagcaaauacaccauccaacggagcacaggagauaguauugauacuccuaauuaugaugugcagaaacacaucaauaaguuauguggcauguuauuaaucacagaagaugcuaaucauaaauucacuggguuaauagguauguuauaugcgaugucuagguuaggaagagaagacaccauaaaaauacucagagaugcgggauaucauguaaaagcaaauggaguagauguaacaacacaucgucaagacauuaauggaaaagaaaugaaauuugaaguguuaacauuggcaagcuuaacaacugaaauucaaaucaacauugagauagaaucuagaaaauccuacaaaaaaaugcuaaaagaaaugggagagguagcuccagaauacaggcaugacucuccugauugugggaugauaauauuauguauagcagcauuaguaauaacuaaauuagcagcaggggacagaucuggucuuacagccgugauuaggagagcuaauaauguccuaaaaaaugaaaugaaacguuacaaaggcuuacuacccaaggacauagccaacagcuucuaugaaguguuugaaaaacauccccacuuuauagauguuuuuguucauuuugguauagcacaaucuucuaccagagguggcaguagaguugaagggauuuuugcaggauuguuuaugaaugccuauggugcagggcaagugauguuacgguggggagucuuagcaaaaucaguuaaaaauauuauguuaggacaugcuagugugcaagcagaaauggaacaaguuguugagguuuaugaauaugcccaaaaauuggguggugaagcaggauucuaccauauauugaacaacccaaaagcaucauuauuaucuuugacucaauuuccucacuucuccaguguaguauuaggcaaugcugcuggccuaggcauaaugggagaguacagagguacaccgaggaaucaagaucuauaugaugcagcaaaggcauaugcugaacaacucaaagaaaauggugugauuaacuacaguguacuagacuugacagcagaagaacuagaggcuaucaaacaucagcuuaauccaaaagauaaugauguagagcuuugaggacuaguaauaaggaaacuguaugaaugucugugggcaggaagugaagagauccuucuguaaagguuuuuggaauuaugucugcugaauaauaaacuuuuuugaaauaauaaaucugguagaaaaaugagaucuaaaaaaaaaaaaaaaaaaaaaaaaaaaaaaaaaaaaaaaaaaaaaaaaaaaaaaaaaaaaaaaaugcaucccccccccccccccccccccccccccccccaaaggcucuuuucagagccaccagaauu

SEQ ID NO: 10272 - RNA, 1529 nt, Artificial Sequence
  mRNA product Design d-2 comprising derived and/or modified sequence from HRSV(A2)__P03418.1__N (opt1)
gggagagcggcucggccauuuugucccagucaguccggaggcugcggcugcagaaguaccgccugcggaguaacugcaaagaagcuuaccauggcccugagcaaggugaagcucaacgacacccugaacaaggaccagcugcucuccagcuccaaguacaccauccagcgcagcaccggcgacuccaucgacacccccaacuacgacguccagaagcacaucaacaagcugugcgggaugcugcucaucaccgaggacgccaaccacaaguucaccggccugaucgggaugcuguacgcgaugagccggcucggccgcgaggacacgaucaagauccugcgggacgccggguaccacgugaaggccaacggcguggacgucaccacccaccgccaggacaucaacggcaaggagaugaaguucgaggugcugacccucgccucccugacgaccgagauccagaucaacaucgagaucgagagccggaaguccuacaagaagaugcugaaggagaugggggagguggccccggaguaccgccacgacagccccgacugcggcaugaucauccucugcaucgcggcccuggucaucaccaagcuggccgccggggaccgguccggccucaccgcggugauccgccgggccaacaacgugcugaagaacgagaugaagcgcuacaaggggcugcuccccaaggacaucgccaacagcuucuacgaggucuucgagaagcacccccacuucaucgacguguucgugcacuucggcaucgcccaguccagcacgcggggcgggucccgcgucgagggcaucuucgccgggcuguucaugaacgcguacggcgccggccaggugaugcugcgguggggcgugcucgccaagagcgucaagaacaucaugcuggggcacgccuccgugcaggccgagauggagcaggucguggagguguacgaguacgcgcagaagcucgggggcgaggccggguucuaccacauccugaacaacccgaaggccagccugcugucccucacccaguucccccacuucagcagcgugguccugggcaacgccgccggccuggggaucaugggcgaguaccgcgggacgccccggaaccaggaccucuacgacgcggccaaggccuacgccgagcagcugaaggagaacggcgugaucaacuacuccgugcuggaccucaccgccgaggagcuggaggcgaucaagcaccagcugaaccccaaggacaacgacgucgagcucugaggacuaguaauaaggaaacuguaugaaugucugugggcaggaagugaagagauccuucuguaaagguuuuuggaauuaugucugcugaauaauaaacuuuuuugaaauaauaaaucugguagaaaaaugagaucuaaaaaaaaaaaaaaaaaaaaaaaaaaaaaaaaaaaaaaaaaaaaaaaaaaaaaaaaaaaaaaaaugcaucccccccccccccccccccccccccccccccaaaggcucuuuucagagccaccagaauu

SEQ ID NO: 10273 - RNA, 1529 nt, Artificial Sequence
  mRNA product Design d-2 comprising derived and/or modified sequence from HRSV(A2)__P03418.1__N (opt2)
gggagagcggcucggccauuuugucccagucaguccggaggcugcggcugcagaaguaccgccugcggaguaacugcaaagaagcuuaccauggcccucuccaaggucaagcucaacgacacccucaacaaggaccagcuccucuccuccuccaaguacaccauccagcgcuccaccggcgacuccaucgacacccccaacuacgacguccagaagcacaucaacaagcucugcggcaugcuccucaucaccgaggacgccaaccacaaguucaccggccucaucggcaugcucuacgccaugucccgccucggccgcgaggacaccaucaagauccuccgcgacgccggcuaccacgucaaggccaacggcgucgacgucaccacccaccgccaggacaucaacggcaaggagaugaaguucgagguccucacccucgccucccucaccaccgagauccagaucaacaucgagaucgagucccgcaaguccuacaagaagaugcucaaggagaugggcgaggucgcccccgaguaccgccacgacucccccgacugcggcaugaucauccucugcaucgccgcccucgucaucaccaagcucgccgccggcgaccgcuccggccucaccgccgucauccgccgcgccaacaacguccucaagaacgagaugaagcgcuacaagggccuccuccccaaggacaucgccaacuccuucuacgaggucuucgagaagcacccccacuucaucgacgucuucguccacuucggcaucgcccaguccuccacccgcggcggcucccgcgucgagggcaucuucgccggccucuucaugaacgccuacggcgccggccaggucaugcuccgcuggggcguccucgccaaguccgucaagaacaucaugcucggccacgccuccguccaggccgagauggagcaggucgucgaggucuacgaguacgcccagaagcucggcggcgaggccggcuucuaccacauccucaacaaccccaaggccucccuccucucccucacccaguucccccacuucuccuccgucguccucggcaacgccgccggccucggcaucaugggcgaguaccgcggcaccccccgcaaccaggaccucuacgacgccgccaaggccuacgccgagcagcucaaggagaacggcgucaucaacuacuccguccucgaccucaccgccgaggagcucgaggccaucaagcaccagcucaaccccaaggacaacgacgucgagcucugaggacuaguaauaaggaaacuguaugaaugucugugggcaggaagugaagagauccuucuguaaagguuuuuggaauuaugucugcugaauaauaaacuuuuuugaaauaauaaaucugguagaaaaaugagaucuaaaaaaaaaaaaaaaaaaaaaaaaaaaaaaaaaaaaaaaaaaaaaaaaaaaaaaaaaaaaaaaaugcaucccccccccccccccccccccccccccccccaaaggcucuuuucagagccaccagaauu

SEQ ID NO: 10274 - RNA, 1529 nt, Artificial Sequence
  mRNA product Design d-2 comprising derived and/or modified sequence from HRSV(A2)__P03418.1__N (opt3)
gggagagcggcucggccauuuugucccagucaguccggaggcugcggcugcagaaguaccgccugcggaguaacugcaaagaagcuuaccauggcccugagcaaggugaaacucaacgacacccuuaauaaggaucagcuguuguccucuucaaaauacacaauccaaagaaguacuggcgacagcauugauacgcccaacuaugacguccagaagcacauaaauaaauuaugcgggaugcugcuaaucaccgaggaugcuaaccauaaguucacaggacucauugguaugcuguacgcaauguccaggcuuggccgggaagacacuaucaagauucugcgcgaugccggguaucacguuaaagcgaauggaguggacguaaccacacaucgacaggauaucaacggcaaggagaugaaauuugaaguguugacccucgcuucucugacuacagagauacagaucaauauugaaaucgagucgcguaagucauacaaaaagaugcugaaggagaugggugaagucgccccugaguauagacacgacagcccagauugugggaugauuauccucugcauagcagccuuagugauuaccaaacuggcugcaggagacaggaguggccuuacggccguuauccggcgcgcuaacaauguguugaagaacgaaaugaaaagauacaagggccugcuaccgaaagauauugccaauuccuucuaugaggucuuugagaagcauccccacuucaucgacguguuuguacacuucgggaucgcgcaaucuagcacuaggggagguucccggguugaaggcauuuuugcaggacucuucaugaacgccuacggggcuggccaggugaugcugcgcugggguguccuugccaaaucagugaagaauauaaugcuggggcaugcaagugugcaggcugagauggaacaggucguugagguguacgaauaugcccaaaaguugggaggcgaggcgggcuuuuaccacauccucaacaauccuaaagccagccuguuaucucugacccaguucccacauuuuuccucaguagugcucgggaacgcagcuggacuugguauuaugggcgaguaucgagggacacccagaaaccaggaccuguacgaugccgcuaaggccuaugcagaacaguugaaagagaauggagucaucaacuacagcgugcuagaccugacugccgaggaacucgaagcuauaaagcaccaacugaauccuaaagauaacgacguugagcuuugaggacuaguaauaaggaaacuguaugaaugucugugggcaggaagugaagagauccuucuguaaagguuuuuggaauuaugucugcugaauaauaaacuuuuuugaaauaauaaaucugguagaaaaaugagaucuaaaaaaaaaaaaaaaaaaaaaaaaaaaaaaaaaaaaaaaaaaaaaaaaaaaaaaaaaaaaaaaaugcaucccccccccccccccccccccccccccccccaaaggcucuuuucagagccaccagaauu

SEQ ID NO: 10275 - RNA, 1529 nt, Artificial Sequence
  mRNA product Design d-2 comprising derived and/or modified sequence from HRSV(A2)__P03418.1__N (opt4)
gggagagcggcucggccauuuugucccagucaguccggaggcugcggcugcagaaguaccgccugcggaguaacugcaaagaagcuuaccauggcccugagcaaggugaagcugaacgacacccugaacaaggaccagcugcugagcagcagcaaguacaccauccagagaagcaccggcgacagcaucgacacccccaacuacgacgugcagaagcacaucaacaagcugugcggcaugcugcugaucaccgaggacgccaaccacaaguucaccggccugaucggcaugcuguacgccaugagcagacugggcagagaggacaccaucaagauccugagagacgccggcuaccacgugaaggccaacggcguggacgugaccacccacagacaggacaucaacggcaaggagaugaaguucgaggugcugacccuggccagccugaccaccgagauccagaucaacaucgagaucgagagcagaaagagcuacaagaagaugcugaaggagaugggcgagguggcccccgaguacagacacgacagccccgacugcggcaugaucauccugugcaucgccgcccuggugaucaccaagcuggccgccggcgacagaagcggccugaccgccgugaucagaagagccaacaacgugcugaagaacgagaugaagagauacaagggccugcugcccaaggacaucgccaacagcuucuacgagguguucgagaagcacccccacuucaucgacguguucgugcacuucggcaucgcccagagcagcaccagaggcggcagcagaguggagggcaucuucgccggccuguucaugaacgccuacggcgccggccaggugaugcugagauggggcgugcuggccaagagcgugaagaacaucaugcugggccacgccagcgugcaggccgagauggagcaggugguggagguguacgaguacgcccagaagcugggcggcgaggccggcuucuaccacauccugaacaaccccaaggccagccugcugagccugacccaguucccccacuucagcagcguggugcugggcaacgccgccggccugggcaucaugggcgaguacagaggcacccccagaaaccaggaccuguacgacgccgccaaggccuacgccgagcagcugaaggagaacggcgugaucaacuacagcgugcuggaccugaccgccgaggagcuggaggccaucaagcaccagcugaaccccaaggacaacgacguggagcugugaggacuaguaauaaggaaacuguaugaaugucugugggcaggaagugaagagauccuucuguaaagguuuuuggaauuaugucugcugaauaauaaacuuuuuugaaauaauaaaucugguagaaaaaugagaucuaaaaaaaaaaaaaaaaaaaaaaaaaaaaaaaaaaaaaaaaaaaaaaaaaaaaaaaaaaaaaaaaugcaucccccccccccccccccccccccccccccccaaaggcucuuuucagagccaccagaauu

SEQ ID NO: 10276 - RNA, 1529 nt, Artificial Sequence
  mRNA product Design d-2 comprising derived and/or modified sequence from HRSV(A2)__P03418.1__N (opt5)
gggagagcggcucggccauuuugucccagucaguccggaggcugcggcugcagaaguaccgccugcggaguaacugcaaagaagcuuaccauggcccugagcaaggugaaacucaacgacacccugaauaaggaucagcuucuguccucuagcaaauacacaauccaaagauccacgggcgacucuauugauacccccaacuaugacguccagaagcacaucaauaaacucugcgggaugcugcuuauuacagaggaugcuaaccauaaguucaccggacugaucggcaugcucuacgccaugagccggcuggggcgcgaagacacaauuaagauccugagagaugcgggauaucacguuaaagcuaauggcguggacgugaccacacaucggcaggauaucaacgggaaggagaugaaauuugaaguccucacccuggccucccuuacgaccgagauucagaucaauauugaaaucgagucucgcaagagcuacaaaaagaugcugaaggagaugggagaaguggccccugaguauagacacgacuccccggauuguggcaugauuauccucugcauugcugcccugguuaucacaaaacuugcugccggcgaccggagcgggcugaccgcggugauccgcagagccaacaauguccucaagaacgaaaugaaacgguacaagggacugcugcccaaagauauugcuaauucuuucuaugagguguuugagaagcauccucacuucaucgacguuuuugugcacuucggcauugcccaauccagcacacgcgggggaucuagagucgaaggcaucuuugcuggacucuucaugaacgccuacggggcgggccaggugaugcugcgguggggcgugcuugccaaauccgucaagaauauuaugcuggggcaugcuagcguucaggccgagauggaacaggugguggaggucuacgaauaugcucaaaagcucggaggcgaggccggguuuuaccacauccugaacaaucccaaagccucucuucugucccucacccaguucccucauuuuagcuccgugguucugggaaacgcugcgggccuggggaucaugggagaguaucgcggcacgcccagaaaccaggaccucuacgaugccgcuaaggccuaugccgaacagcugaaagagaauggcgugauuaacuacucuguccuugaccugacagcugaggaacucgaagccaucaagcaccaacugaauccuaaagauaacgacguggagcuuugaggacuaguaauaaggaaacuguaugaaugucugugggcaggaagugaagagauccuucuguaaagguuuuuggaauuaugucugcugaauaauaaacuuuuuugaaauaauaaaucugguagaaaaaugagaucuaaaaaaaaaaaaaaaaaaaaaaaaaaaaaaaaaaaaaaaaaaaaaaaaaaaaaaaaaaaaaaaaugcaucccccccccccccccccccccccccccccccaaaggcucuuuucagagccaccagaauu

SEQ ID NO: 10277 - RNA, 1529 nt, Artificial Sequence
  mRNA product Design d-2 comprising derived and/or modified sequence from HRSV(A2)__P03418.1__N (opt6)
gggagagcggcucggccauuuugucccagucaguccggaggcugcggcugcagaaguaccgccugcggaguaacugcaaagaagcuuaccauggcacuaagcaaagucaaauuaaacgacacauuaaacaaagaccaacucuuaucaucaucaaaauacacaauacaaagaagcaccggagacaguaucgacacaccaaacuaugacguccaaaaacauauaaauaaauuaugcggcaugcucuuaaucacagaagacgccaaccauaaauuuacaggauuaauaggaauguuauaugcaaugucacgacuagguagagaagacacaauaaaaauacuaagagacgcaggcuaucacguaaaagcaaauggaguagacguaaccacacacagacaagacauaaauggaaaagaaaugaaauuugaaguauuaacacuagcaucacuaacaacagaaauacaaaucaacauagaaauagaaucaagaaaaagcuacaaaaaaauguuaaaagaaaugggagaagucgcaccagaauauagacaugauucaccagacugcggaaugauaauacuaugcauagcagcccuaguaauuacaaaacuagcagcaggagacagaagcggauuaacagcaguaauaagaagagcaaacaacguacuaaaaaacgaaaugaaaagauauaaaggauuauuaccaaaagacauagcaaacucauucuaugaaguauucgaaaaacacccccacuuuauagacgucuucguacacuucggaauagcccaaucauccacaagaggaggaucaagagucgaaggaauauucgcaggauuauucaugaacgcauauggcgcaggacaaguaaugcuaagauggggaguacuagcaaaauccgucaaaaacauaaugcuaggacacgcaucaguucaagcagaaauggaacaaguaguagaaguauacgaauacgcccaaaaacuaggaggagaagcaggauucuaccacauacuaaauaauccaaaagcaucacuacuaagccuaacccaauuuccccacuucucaaguguaguauuaggaaaugcagcuggacuaggaauaaugggagaauacagaggaacaccaagaaaccaagacuuauacgacgcagcaaaagcauacgcagagcaacuuaaagaaaacggaguaauaaacuauagcguacuagacuuaacagcagaagaacuggaagcaauaaaacaucaauuaaacccgaaagacaaugacguagaauuauaaggacuaguaauaaggaaacuguaugaaugucugugggcaggaagugaagagauccuucuguaaagguuuuuggaauuaugucugcugaauaauaaacuuuuuugaaauaauaaaucugguagaaaaaugagaucuaaaaaaaaaaaaaaaaaaaaaaaaaaaaaaaaaaaaaaaaaaaaaaaaaaaaaaaaaaaaaaaaugcaucccccccccccccccccccccccccccccccaaaggcucuuuucagagccaccagaauu

SEQ ID NO: 10278 - RNA, 1529 nt, Artificial Sequence
  mRNA product Design d-2 comprising derived and/or modified sequence from HRSV(A2)__P03418.1__N (opt11)
gggagagcggcucggccauuuugucccagucaguccggaggcugcggcugcagaaguaccgccugcggaguaacugcaaagaagcuuaccauggcacucucgaaaguaaaacucaacgacacccucaacaaagaccaacuccuuuccagcuccaaauacaccauccaacgauccaccggagacuccaucgacacgcccaacuacgacguccagaaacacaucaacaagcucugcggaaugcuacuaaucaccgaggacgccaaccacaaauucacaggacuuauagggaugcucuacgccaugucccgccucggacgcgaagacacaauaaaaauccuacgagacgccggcuaccacguaaaggcaaacggcgucgacgucaccacacacagacaagacaucaacggaaaggaaaugaaauucgaaguccucacccucgccagccuaaccaccgagauccaaaucaacaucgaaaucgaaucacgcaaauccuacaagaaaaugcucaaagaaaugggagaagucgcccccgaauaccgucacgacucgcccgacugcggcaugauaauccuaugcaucgccgcacucgucauaaccaaacucgccgccggugaccgaucaggacugacagcagucauccgccgagcaaacaacgugcucaaaaacgaaaugaaacgcuacaaaggccuacuccccaaagacaucgccaacuccuucuacgaagucuucgaaaaacacccacacuucaucgacgucuucguccacuucggcaucgcacaaucaucaaccagaggcggcagccgcguugaaggcaucuucgcaggacucuuuaugaacgccuacggcgccggccaagucaugcuccgcuggggcguccuggcaaaaagcgucaaaaacaucaugcuaggccacgcuagcguccaagccgaaauggaacaagucgucgaaguuuacgaguacgcacaaaaacucggcggcgaagcaggcuucuaccacauccuaaacaaccccaaagccucccugcuaucacucacccaauucccccacuucuccagcgucguccucggcaacgccgcaggacuaggcaucaugggagaauaccgcgggacaccgcgcaaccaagaccucuacgacgccgccaaagccuacgccgaacaacucaaagaaaacggcgucauaaacuacucaguccucgaccucaccgccgaagaacucgaagccaucaaacaccaacucaacccaaaagacaacgacgucgaauuauaaggacuaguaauaaggaaacuguaugaaugucugugggcaggaagugaagagauccuucuguaaagguuuuuggaauuaugucugcugaauaauaaacuuuuuugaaauaauaaaucugguagaaaaaugagaucuaaaaaaaaaaaaaaaaaaaaaaaaaaaaaaaaaaaaaaaaaaaaaaaaaaaaaaaaaaaaaaaaugcaucccccccccccccccccccccccccccccccaaaggcucuuuucagagccaccagaauu

SEQ ID NO: 10279 - RNA, 1845 nt, Artificial Sequence
  mRNA product Design d-3 comprising derived and/or modified sequence from HRSV(A2)__P03418.1__N (wt)
gggagagggcgcuuggcuugcaaggacccugagcugcggcauugaagcacacccaacccaacucgacugaagucagccucacugaaccggaucugagaaucuucucucucugggcuugccagggcucuccgaaccuagcuagcauccucuucaauuccaacuagaaagcuuaccauggcucuuagcaaagucaaguugaaugauacacucaacaaagaucaacuucugucauccagcaaauacaccauccaacggagcacaggagauaguauugauacuccuaauuaugaugugcagaaacacaucaauaaguuauguggcauguuauuaaucacagaagaugcuaaucauaaauucacuggguuaauagguauguuauaugcgaugucuagguuaggaagagaagacaccauaaaaauacucagagaugcgggauaucauguaaaagcaaauggaguagauguaacaacacaucgucaagacauuaauggaaaagaaaugaaauuugaaguguuaacauuggcaagcuuaacaacugaaauucaaaucaacauugagauagaaucuagaaaauccuacaaaaaaaugcuaaaagaaaugggagagguagcuccagaauacaggcaugacucuccugauugugggaugauaauauuauguauagcagcauuaguaauaacuaaauuagcagcaggggacagaucuggucuuacagccgugauuaggagagcuaauaauguccuaaaaaaugaaaugaaacguuacaaaggcuuacuacccaaggacauagccaacagcuucuaugaaguguuugaaaaacauccccacuuuauagauguuuuuguucauuuugguauagcacaaucuucuaccagagguggcaguagaguugaagggauuuuugcaggauuguuuaugaaugccuauggugcagggcaagugauguuacgguggggagucuuagcaaaaucaguuaaaaauauuauguuaggacaugcuagugugcaagcagaaauggaacaaguuguugagguuuaugaauaugcccaaaaauuggguggugaagcaggauucuaccauauauugaacaacccaaaagcaucauuauuaucuuugacucaauuuccucacuucuccaguguaguauuaggcaaugcugcuggccuaggcauaaugggagaguacagagguacaccgaggaaucaagaucuauaugaugcagcaaaggcauaugcugaacaacucaaagaaaauggugugauuaacuacaguguacuagacuugacagcagaagaacuagaggcuaucaaacaucagcuuaauccaaaagauaaugauguagagcuuugaggacuagugaagggaacacccaaauuuaauucagccuuaagcacaauuaauuaagagugaaacguaauuguacaagcaguuggucacccaccauagggcaugaucaacaccgcaaccuuuccuuuuucccccagugauucugaaaaaccccucuucccuucagcuugcuuagauguuccaaauuuaguaagcuuaaggcggccuacagaagaaaaagaaaaaaaaggccacaaaaguucccucucacuuucaguaaauaaaauaaaagcagcaacagaaauaaagaaauaaaugaaauucaaaaugaaauaaauauuguguugugcagcauuaaaaaaucaauaaaaauuaaaaaugagcaagaucuaaaaaaaaaaaaaaaaaaaaaaaaaaaaaaaaaaaaaaaaaaaaaaaaaaaaaaaaaaaaaaaaugcaucccccccccccccccccccccccccccccccaaaggcucuuuucagagccaccagaauu

SEQ ID NO: 10280 - RNA, 1845 nt, Artificial Sequence
  mRNA product Design d-3 comprising derived and/or modified sequence from HRSV(A2)__P03418.1__N (opt1)
gggagagggcgcuuggcuugcaaggacccugagcugcggcauugaagcacacccaacccaacucgacugaagucagccucacugaaccggaucugagaaucuucucucucugggcuugccagggcucuccgaaccuagcuagcauccucuucaauuccaacuagaaagcuuaccauggcccugagcaaggugaagcucaacgacacccugaacaaggaccagcugcucuccagcuccaaguacaccauccagcgcagcaccggcgacuccaucgacacccccaacuacgacguccagaagcacaucaacaagcugugcgggaugcugcucaucaccgaggacgccaaccacaaguucaccggccugaucgggaugcuguacgcgaugagccggcucggccgcgaggacacgaucaagauccugcgggacgccggguaccacgugaaggccaacggcguggacgucaccacccaccgccaggacaucaacggcaaggagaugaaguucgaggugcugacccucgccucccugacgaccgagauccagaucaacaucgagaucgagagccggaaguccuacaagaagaugcugaaggagaugggggagguggccccggaguaccgccacgacagccccgacugcggcaugaucauccucugcaucgcggcccuggucaucaccaagcuggccgccggggaccgguccggccucaccgcggugauccgccgggccaacaacgugcugaagaacgagaugaagcgcuacaaggggcugcuccccaaggacaucgccaacagcuucuacgaggucuucgagaagcacccccacuucaucgacguguucgugcacuucggcaucgcccaguccagcacgcggggcgggucccgcgucgagggcaucuucgccgggcuguucaugaacgcguacggcgccggccaggugaugcugcgguggggcgugcucgccaagagcgucaagaacaucaugcuggggcacgccuccgugcaggccgagauggagcaggucguggagguguacgaguacgcgcagaagcucgggggcgaggccggguucuaccacauccugaacaacccgaaggccagccugcugucccucacccaguucccccacuucagcagcgugguccugggcaacgccgccggccuggggaucaugggcgaguaccgcgggacgccccggaaccaggaccucuacgacgcggccaaggccuacgccgagcagcugaaggagaacggcgugaucaacuacuccgugcuggaccucaccgccgaggagcuggaggcgaucaagcaccagcugaaccccaaggacaacgacgucgagcucugaggacuagugaagggaacacccaaauuuaauucagccuuaagcacaauuaauuaagagugaaacguaauuguacaagcaguuggucacccaccauagggcaugaucaacaccgcaaccuuuccuuuuucccccagugauucugaaaaaccccucuucccuucagcuugcuuagauguuccaaauuuaguaagcuuaaggcggccuacagaagaaaaagaaaaaaaaggccacaaaaguucccucucacuuucaguaaauaaaauaaaagcagcaacagaaauaaagaaauaaaugaaauucaaaaugaaauaaauauuguguugugcagcauuaaaaaaucaauaaaaauuaaaaaugagcaagaucuaaaaaaaaaaaaaaaaaaaaaaaaaaaaaaaaaaaaaaaaaaaaaaaaaaaaaaaaaaaaaaaaugcaucccccccccccccccccccccccccccccccaaaggcucuuuucagagccaccagaauu

SEQ ID NO: 10281 - RNA, 1845 nt, Artificial Sequence
  mRNA product Design d-3 comprising derived and/or modified sequence from HRSV(A2)__P03418.1__N (opt2)
gggagagggcgcuuggcuugcaaggacccugagcugcggcauugaagcacacccaacccaacucgacugaagucagccucacugaaccggaucugagaaucuucucucucugggcuugccagggcucuccgaaccuagcuagcauccucuucaauuccaacuagaaagcuuaccauggcccucuccaaggucaagcucaacgacacccucaacaaggaccagcuccucuccuccuccaaguacaccauccagcgcuccaccggcgacuccaucgacacccccaacuacgacguccagaagcacaucaacaagcucugcggcaugcuccucaucaccgaggacgccaaccacaaguucaccggccucaucggcaugcucuacgccaugucccgccucggccgcgaggacaccaucaagauccuccgcgacgccggcuaccacgucaaggccaacggcgucgacgucaccacccaccgccaggacaucaacggcaaggagaugaaguucgagguccucacccucgccucccucaccaccgagauccagaucaacaucgagaucgagucccgcaaguccuacaagaagaugcucaaggagaugggcgaggucgcccccgaguaccgccacgacucccccgacugcggcaugaucauccucugcaucgccgcccucgucaucaccaagcucgccgccggcgaccgcuccggccucaccgccgucauccgccgcgccaacaacguccucaagaacgagaugaagcgcuacaagggccuccuccccaaggacaucgccaacuccuucuacgaggucuucgagaagcacccccacuucaucgacgucuucguccacuucggcaucgcccaguccuccacccgcggcggcucccgcgucgagggcaucuucgccggccucuucaugaacgccuacggcgccggccaggucaugcuccgcuggggcguccucgccaaguccgucaagaacaucaugcucggccacgccuccguccaggccgagauggagcaggucgucgaggucuacgaguacgcccagaagcucggcggcgaggccggcuucuaccacauccucaacaaccccaaggccucccuccucucccucacccaguucccccacuucuccuccgucguccucggcaacgccgccggccucggcaucaugggcgaguaccgcggcaccccccgcaaccaggaccucuacgacgccgccaaggccuacgccgagcagcucaaggagaacggcgucaucaacuacuccguccucgaccucaccgccgaggagcucgaggccaucaagcaccagcucaaccccaaggacaacgacgucgagcucugaggacuagugaagggaacacccaaauuuaauucagccuuaagcacaauuaauuaagagugaaacguaauuguacaagcaguuggucacccaccauagggcaugaucaacaccgcaaccuuuccuuuuucccccagugauucugaaaaaccccucuucccuucagcuugcuuagauguuccaaauuuaguaagcuuaaggcggccuacagaagaaaaagaaaaaaaaggccacaaaaguucccucucacuuucaguaaauaaaauaaaagcagcaacagaaauaaagaaauaaaugaaauucaaaaugaaauaaauauuguguugugcagcauuaaaaaaucaauaaaaauuaaaaaugagcaagaucuaaaaaaaaaaaaaaaaaaaaaaaaaaaaaaaaaaaaaaaaaaaaaaaaaaaaaaaaaaaaaaaaugcaucccccccccccccccccccccccccccccccaaaggcucuuuucagagccaccagaauu

SEQ ID NO: 10282 - RNA, 1845 nt, Artificial Sequence
  mRNA product Design d-3 comprising derived and/or modified sequence from HRSV(A2)__P03418.1__N (opt3)
gggagagggcgcuuggcuugcaaggacccugagcugcggcauugaagcacacccaacccaacucgacugaagucagccucacugaaccggaucugagaaucuucucucucugggcuugccagggcucuccgaaccuagcuagcauccucuucaauuccaacuagaaagcuuaccauggcccugagcaaggugaaacucaacgacacccuuaauaaggaucagcuguuguccucuucaaaauacacaauccaaagaaguacuggcgacagcauugauacgcccaacuaugacguccagaagcacauaaauaaauuaugcgggaugcugcuaaucaccgaggaugcuaaccauaaguucacaggacucauugguaugcuguacgcaauguccaggcuuggccgggaagacacuaucaagauucugcgcgaugccggguaucacguuaaagcgaauggaguggacguaaccacacaucgacaggauaucaacggcaaggagaugaaauuugaaguguugacccucgcuucucugacuacagagauacagaucaauauugaaaucgagucgcguaagucauacaaaaagaugcugaaggagaugggugaagucgccccugaguauagacacgacagcccagauugugggaugauuauccucugcauagcagccuuagugauuaccaaacuggcugcaggagacaggaguggccuuacggccguuauccggcgcgcuaacaauguguugaagaacgaaaugaaaagauacaagggccugcuaccgaaagauauugccaauuccuucuaugaggucuuugagaagcauccccacuucaucgacguguuuguacacuucgggaucgcgcaaucuagcacuaggggagguucccggguugaaggcauuuuugcaggacucuucaugaacgccuacggggcuggccaggugaugcugcgcugggguguccuugccaaaucagugaagaauauaaugcuggggcaugcaagugugcaggcugagauggaacaggucguugagguguacgaauaugcccaaaaguugggaggcgaggcgggcuuuuaccacauccucaacaauccuaaagccagccuguuaucucugacccaguucccacauuuuuccucaguagugcucgggaacgcagcuggacuugguauuaugggcgaguaucgagggacacccagaaaccaggaccuguacgaugccgcuaaggccuaugcagaacaguugaaagagaauggagucaucaacuacagcgugcuagaccugacugccgaggaacucgaagcuauaaagcaccaacugaauccuaaagauaacgacguugagcuuugaggacuagugaagggaacacccaaauuuaauucagccuuaagcacaauuaauuaagagugaaacguaauuguacaagcaguuggucacccaccauagggcaugaucaacaccgcaaccuuuccuuuuucccccagugauucugaaaaaccccucuucccuucagcuugcuuagauguuccaaauuuaguaagcuuaaggcggccuacagaagaaaaagaaaaaaaaggccacaaaaguucccucucacuuucaguaaauaaaauaaaagcagcaacagaaauaaagaaauaaaugaaauucaaaaugaaauaaauauuguguugugcagcauuaaaaaaucaauaaaaauuaaaaaugagcaagaucuaaaaaaaaaaaaaaaaaaaaaaaaaaaaaaaaaaaaaaaaaaaaaaaaaaaaaaaaaaaaaaaaugcaucccccccccccccccccccccccccccccccaaaggcucuuuucagagccaccagaauu

SEQ ID NO: 10283 - RNA, 1845 nt, Artificial Sequence
  mRNA product Design d-3 comprising derived and/or modified sequence from HRSV(A2)__P03418.1__N (opt4)
gggagagggcgcuuggcuugcaaggacccugagcugcggcauugaagcacacccaacccaacucgacugaagucagccucacugaaccggaucugagaaucuucucucucugggcuugccagggcucuccgaaccuagcuagcauccucuucaauuccaacuagaaagcuuaccauggcccugagcaaggugaagcugaacgacacccugaacaaggaccagcugcugagcagcagcaaguacaccauccagagaagcaccggcgacagcaucgacacccccaacuacgacgugcagaagcacaucaacaagcugugcggcaugcugcugaucaccgaggacgccaaccacaaguucaccggccugaucggcaugcuguacgccaugagcagacugggcagagaggacaccaucaagauccugagagacgccggcuaccacgugaaggccaacggcguggacgugaccacccacagacaggacaucaacggcaaggagaugaaguucgaggugcugacccuggccagccugaccaccgagauccagaucaacaucgagaucgagagcagaaagagcuacaagaagaugcugaaggagaugggcgagguggcccccgaguacagacacgacagccccgacugcggcaugaucauccugugcaucgccgcccuggugaucaccaagcuggccgccggcgacagaagcggccugaccgccgugaucagaagagccaacaacgugcugaagaacgagaugaagagauacaagggccugcugcccaaggacaucgccaacagcuucuacgagguguucgagaagcacccccacuucaucgacguguucgugcacuucggcaucgcccagagcagcaccagaggcggcagcagaguggagggcaucuucgccggccuguucaugaacgccuacggcgccggccaggugaugcugagauggggcgugcuggccaagagcgugaagaacaucaugcugggccacgccagcgugcaggccgagauggagcaggugguggagguguacgaguacgcccagaagcugggcggcgaggccggcuucuaccacauccugaacaaccccaaggccagccugcugagccugacccaguucccccacuucagcagcguggugcugggcaacgccgccggccugggcaucaugggcgaguacagaggcacccccagaaaccaggaccuguacgacgccgccaaggccuacgccgagcagcugaaggagaacggcgugaucaacuacagcgugcuggaccugaccgccgaggagcuggaggccaucaagcaccagcugaaccccaaggacaacgacguggagcugugaggacuagugaagggaacacccaaauuuaauucagccuuaagcacaauuaauuaagagugaaacguaauuguacaagcaguuggucacccaccauagggcaugaucaacaccgcaaccuuuccuuuuucccccagugauucugaaaaaccccucuucccuucagcuugcuuagauguuccaaauuuaguaagcuuaaggcggccuacagaagaaaaagaaaaaaaaggccacaaaaguucccucucacuuucaguaaauaaaauaaaagcagcaacagaaauaaagaaauaaaugaaauucaaaaugaaauaaauauuguguugugcagcauuaaaaaaucaauaaaaauuaaaaaugagcaagaucuaaaaaaaaaaaaaaaaaaaaaaaaaaaaaaaaaaaaaaaaaaaaaaaaaaaaaaaaaaaaaaaaugcaucccccccccccccccccccccccccccccccaaaggcucuuuucagagccaccagaauu

SEQ ID NO: 10284 - RNA, 1845 nt, Artificial Sequence
  mRNA product Design d-3 comprising derived and/or modified sequence from HRSV(A2)__P03418.1__N (opt5)
gggagagggcgcuuggcuugcaaggacccugagcugcggcauugaagcacacccaacccaacucgacugaagucagccucacugaaccggaucugagaaucuucucucucugggcuugccagggcucuccgaaccuagcuagcauccucuucaauuccaacuagaaagcuuaccauggcccugagcaaggugaaacucaacgacacccugaauaaggaucagcuucuguccucuagcaaauacacaauccaaagauccacgggcgacucuauugauacccccaacuaugacguccagaagcacaucaauaaacucugcgggaugcugcuuauuacagaggaugcuaaccauaaguucaccggacugaucggcaugcucuacgccaugagccggcuggggcgcgaagacacaauuaagauccugagagaugcgggauaucacguuaaagcuaauggcguggacgugaccacacaucggcaggauaucaacgggaaggagaugaaauuugaaguccucacccuggccucccuuacgaccgagauucagaucaauauugaaaucgagucucgcaagagcuacaaaaagaugcugaaggagaugggagaaguggccccugaguauagacacgacuccccggauuguggcaugauuauccucugcauugcugcccugguuaucacaaaacuugcugccggcgaccggagcgggcugaccgcggugauccgcagagccaacaauguccucaagaacgaaaugaaacgguacaagggacugcugcccaaagauauugcuaauucuuucuaugagguguuugagaagcauccucacuucaucgacguuuuugugcacuucggcauugcccaauccagcacacgcgggggaucuagagucgaaggcaucuuugcuggacucuucaugaacgccuacggggcgggccaggugaugcugcgguggggcgugcuugccaaauccgucaagaauauuaugcuggggcaugcuagcguucaggccgagauggaacaggugguggaggucuacgaauaugcucaaaagcucggaggcgaggccggguuuuaccacauccugaacaaucccaaagccucucuucugucccucacccaguucccucauuuuagcuccgugguucugggaaacgcugcgggccuggggaucaugggagaguaucgcggcacgcccagaaaccaggaccucuacgaugccgcuaaggccuaugccgaacagcugaaagagaauggcgugauuaacuacucuguccuugaccugacagcugaggaacucgaagccaucaagcaccaacugaauccuaaagauaacgacguggagcuuugaggacuagugaagggaacacccaaauuuaauucagccuuaagcacaauuaauuaagagugaaacguaauuguacaagcaguuggucacccaccauagggcaugaucaacaccgcaaccuuuccuuuuucccccagugauucugaaaaaccccucuucccuucagcuugcuuagauguuccaaauuuaguaagcuuaaggcggccuacagaagaaaaagaaaaaaaaggccacaaaaguucccucucacuuucaguaaauaaaauaaaagcagcaacagaaauaaagaaauaaaugaaauucaaaaugaaauaaauauuguguugugcagcauuaaaaaaucaauaaaaauuaaaaaugagcaagaucuaaaaaaaaaaaaaaaaaaaaaaaaaaaaaaaaaaaaaaaaaaaaaaaaaaaaaaaaaaaaaaaaugcaucccccccccccccccccccccccccccccccaaaggcucuuuucagagccaccagaauu

SEQ ID NO: 10285 - RNA, 1845 nt, Artificial Sequence
  mRNA product Design d-3 comprising derived and/or modified sequence from HRSV(A2)__P03418.1__N (opt6)
gggagagggcgcuuggcuugcaaggacccugagcugcggcauugaagcacacccaacccaacucgacugaagucagccucacugaaccggaucugagaaucuucucucucugggcuugccagggcucuccgaaccuagcuagcauccucuucaauuccaacuagaaagcuuaccauggcacuaagcaaagucaaauuaaacgacacauuaaacaaagaccaacucuuaucaucaucaaaauacacaauacaaagaagcaccggagacaguaucgacacaccaaacuaugacguccaaaaacauauaaauaaauuaugcggcaugcucuuaaucacagaagacgccaaccauaaauuuacaggauuaauaggaauguuauaugcaaugucacgacuagguagagaagacacaauaaaaauacuaagagacgcaggcuaucacguaaaagcaaauggaguagacguaaccacacacagacaagacauaaauggaaaagaaaugaaauuugaaguauuaacacuagcaucacuaacaacagaaauacaaaucaacauagaaauagaaucaagaaaaagcuacaaaaaaauguuaaaagaaaugggagaagucgcaccagaauauagacaugauucaccagacugcggaaugauaauacuaugcauagcagcccuaguaauuacaaaacuagcagcaggagacagaagcggauuaacagcaguaauaagaagagcaaacaacguacuaaaaaacgaaaugaaaagauauaaaggauuauuaccaaaagacauagcaaacucauucuaugaaguauucgaaaaacacccccacuuuauagacgucuucguacacuucggaauagcccaaucauccacaagaggaggaucaagagucgaaggaauauucgcaggauuauucaugaacgcauauggcgcaggacaaguaaugcuaagauggggaguacuagcaaaauccgucaaaaacauaaugcuaggacacgcaucaguucaagcagaaauggaacaaguaguagaaguauacgaauacgcccaaaaacuaggaggagaagcaggauucuaccacauacuaaauaauccaaaagcaucacuacuaagccuaacccaauuuccccacuucucaaguguaguauuaggaaaugcagcuggacuaggaauaaugggagaauacagaggaacaccaagaaaccaagacuuauacgacgcagcaaaagcauacgcagagcaacuuaaagaaaacggaguaauaaacuauagcguacuagacuuaacagcagaagaacuggaagcaauaaaacaucaauuaaacccgaaagacaaugacguagaauuauaaggacuagugaagggaacacccaaauuuaauucagccuuaagcacaauuaauuaagagugaaacguaauuguacaagcaguuggucacccaccauagggcaugaucaacaccgcaaccuuuccuuuuucccccagugauucugaaaaaccccucuucccuucagcuugcuuagauguuccaaauuuaguaagcuuaaggcggccuacagaagaaaaagaaaaaaaaggccacaaaaguucccucucacuuucaguaaauaaaauaaaagcagcaacagaaauaaagaaauaaaugaaauucaaaaugaaauaaauauuguguugugcagcauuaaaaaaucaauaaaaauuaaaaaugagcaagaucuaaaaaaaaaaaaaaaaaaaaaaaaaaaaaaaaaaaaaaaaaaaaaaaaaaaaaaaaaaaaaaaaugcaucccccccccccccccccccccccccccccccaaaggcucuuuucagagccaccagaauu

SEQ ID NO: 10286 - RNA, 1845 nt, Artificial Sequence
  mRNA product Design d-3 comprising derived and/or modified sequence from HRSV(A2)__P03418.1__N (opt11)
gggagagggcgcuuggcuugcaaggacccugagcugcggcauugaagcacacccaacccaacucgacugaagucagccucacugaaccggaucugagaaucuucucucucugggcuugccagggcucuccgaaccuagcuagcauccucuucaauuccaacuagaaagcuuaccauggcacucucgaaaguaaaacucaacgacacccucaacaaagaccaacuccuuuccagcuccaaauacaccauccaacgauccaccggagacuccaucgacacgcccaacuacgacguccagaaacacaucaacaagcucugcggaaugcuacuaaucaccgaggacgccaaccacaaauucacaggacuuauagggaugcucuacgccaugucccgccucggacgcgaagacacaauaaaaauccuacgagacgccggcuaccacguaaaggcaaacggcgucgacgucaccacacacagacaagacaucaacggaaaggaaaugaaauucgaaguccucacccucgccagccuaaccaccgagauccaaaucaacaucgaaaucgaaucacgcaaauccuacaagaaaaugcucaaagaaaugggagaagucgcccccgaauaccgucacgacucgcccgacugcggcaugauaauccuaugcaucgccgcacucgucauaaccaaacucgccgccggugaccgaucaggacugacagcagucauccgccgagcaaacaacgugcucaaaaacgaaaugaaacgcuacaaaggccuacuccccaaagacaucgccaacuccuucuacgaagucuucgaaaaacacccacacuucaucgacgucuucguccacuucggcaucgcacaaucaucaaccagaggcggcagccgcguugaaggcaucuucgcaggacucuuuaugaacgccuacggcgccggccaagucaugcuccgcuggggcguccuggcaaaaagcgucaaaaacaucaugcuaggccacgcuagcguccaagccgaaauggaacaagucgucgaaguuuacgaguacgcacaaaaacucggcggcgaagcaggcuucuaccacauccuaaacaaccccaaagccucccugcuaucacucacccaauucccccacuucuccagcgucguccucggcaacgccgcaggacuaggcaucaugggagaauaccgcgggacaccgcgcaaccaagaccucuacgacgccgccaaagccuacgccgaacaacucaaagaaaacggcgucauaaacuacucaguccucgaccucaccgccgaagaacucgaagccaucaaacaccaacucaacccaaaagacaacgacgucgaauuauaaggacuagugaagggaacacccaaauuuaauucagccuuaagcacaauuaauuaagagugaaacguaauuguacaagcaguuggucacccaccauagggcaugaucaacaccgcaaccuuuccuuuuucccccagugauucugaaaaaccccucuucccuucagcuugcuuagauguuccaaauuuaguaagcuuaaggcggccuacagaagaaaaagaaaaaaaaggccacaaaaguucccucucacuuucaguaaauaaaauaaaagcagcaacagaaauaaagaaauaaaugaaauucaaaaugaaauaaauauuguguugugcagcauuaaaaaaucaauaaaaauuaaaaaugagcaagaucuaaaaaaaaaaaaaaaaaaaaaaaaaaaaaaaaaaaaaaaaaaaaaaaaaaaaaaaaaaaaaaaaugcaucccccccccccccccccccccccccccccccaaaggcucuuuucagagccaccagaauu

SEQ ID NO: 10287 - RNA, 1528 nt, Artificial Sequence
  mRNA product Design d-4 comprising derived and/or modified sequence from HRSV(A2)__P03418.1__N (wt)
gggagagucccgcagucggcguccagcggcucugcuuguucgugugugugucguugcaggccuuauucaagcuuaccauggcucuuagcaaagucaaguugaaugauacacucaacaaagaucaacuucugucauccagcaaauacaccauccaacggagcacaggagauaguauugauacuccuaauuaugaugugcagaaacacaucaauaaguuauguggcauguuauuaaucacagaagaugcuaaucauaaauucacuggguuaauagguauguuauaugcgaugucuagguuaggaagagaagacaccauaaaaauacucagagaugcgggauaucauguaaaagcaaauggaguagauguaacaacacaucgucaagacauuaauggaaaagaaaugaaauuugaaguguuaacauuggcaagcuuaacaacugaaauucaaaucaacauugagauagaaucuagaaaauccuacaaaaaaaugcuaaaagaaaugggagagguagcuccagaauacaggcaugacucuccugauugugggaugauaauauuauguauagcagcauuaguaauaacuaaauuagcagcaggggacagaucuggucuuacagccgugauuaggagagcuaauaauguccuaaaaaaugaaaugaaacguuacaaaggcuuacuacccaaggacauagccaacagcuucuaugaaguguuugaaaaacauccccacuuuauagauguuuuuguucauuuugguauagcacaaucuucuaccagagguggcaguagaguugaagggauuuuugcaggauuguuuaugaaugccuauggugcagggcaagugauguuacgguggggagucuuagcaaaaucaguuaaaaauauuauguuaggacaugcuagugugcaagcagaaauggaacaaguuguugagguuuaugaauaugcccaaaaauuggguggugaagcaggauucuaccauauauugaacaacccaaaagcaucauuauuaucuuugacucaauuuccucacuucuccaguguaguauuaggcaaugcugcuggccuaggcauaaugggagaguacagagguacaccgaggaaucaagaucuauaugaugcagcaaaggcauaugcugaacaacucaaagaaaauggugugauuaacuacaguguacuagacuugacagcagaagaacuagaggcuaucaaacaucagcuuaauccaaaagauaaugauguagagcuuugaggacuaguggaagcauuuuccuggcugauuaaaagaaauuacucagcuauggucaucuguuccuguuagaaggcuaugcagcauauuauauacuaugcgcauguuaugaaaugcauaauaaaaaauuuuaaaaaaucuaaaagaucuaaaaaaaaaaaaaaaaaaaaaaaaaaaaaaaaaaaaaaaaaaaaaaaaaaaaaaaaaaaaaaaaugcaucccccccccccccccccccccccccccccccaaaggcucuuuucagagccaccagaauu

SEQ ID NO: 10288 - RNA, 1528 nt, Artificial Sequence
  mRNA product Design d-4 comprising derived and/or modified sequence from HRSV(A2)__P03418.1__N (opt1)
gggagagucccgcagucggcguccagcggcucugcuuguucgugugugugucguugcaggccuuauucaagcuuaccauggcccugagcaaggugaagcucaacgacacccugaacaaggaccagcugcucuccagcuccaaguacaccauccagcgcagcaccggcgacuccaucgacacccccaacuacgacguccagaagcacaucaacaagcugugcgggaugcugcucaucaccgaggacgccaaccacaaguucaccggccugaucgggaugcuguacgcgaugagccggcucggccgcgaggacacgaucaagauccugcgggacgccggguaccacgugaaggccaacggcguggacgucaccacccaccgccaggacaucaacggcaaggagaugaaguucgaggugcugacccucgccucccugacgaccgagauccagaucaacaucgagaucgagagccggaaguccuacaagaagaugcugaaggagaugggggagguggccccggaguaccgccacgacagccccgacugcggcaugaucauccucugcaucgcggcccuggucaucaccaagcuggccgccggggaccgguccggccucaccgcggugauccgccgggccaacaacgugcugaagaacgagaugaagcgcuacaaggggcugcuccccaaggacaucgccaacagcuucuacgaggucuucgagaagcacccccacuucaucgacguguucgugcacuucggcaucgcccaguccagcacgcggggcgggucccgcgucgagggcaucuucgccgggcuguucaugaacgcguacggcgccggccaggugaugcugcgguggggcgugcucgccaagagcgucaagaacaucaugcuggggcacgccuccgugcaggccgagauggagcaggucguggagguguacgaguacgcgcagaagcucgggggcgaggccggguucuaccacauccugaacaacccgaaggccagccugcugucccucacccaguucccccacuucagcagcgugguccugggcaacgccgccggccuggggaucaugggcgaguaccgcgggacgccccggaaccaggaccucuacgacgcggccaaggccuacgccgagcagcugaaggagaacggcgugaucaacuacuccgugcuggaccucaccgccgaggagcuggaggcgaucaagcaccagcugaaccccaaggacaacgacgucgagcucugaggacuaguggaagcauuuuccuggcugauuaaaagaaauuacucagcuauggucaucuguuccuguuagaaggcuaugcagcauauuauauacuaugcgcauguuaugaaaugcauaauaaaaaauuuuaaaaaaucuaaaagaucuaaaaaaaaaaaaaaaaaaaaaaaaaaaaaaaaaaaaaaaaaaaaaaaaaaaaaaaaaaaaaaaaugcaucccccccccccccccccccccccccccccccaaaggcucuuuucagagccaccagaauu

SEQ ID NO: 10289 - RNA, 1528 nt, Artificial Sequence
  mRNA product Design d-4 comprising derived and/or modified sequence from HRSV(A2)__P03418.1__N (opt2)
gggagagucccgcagucggcguccagcggcucugcuuguucgugugugugucguugcaggccuuauucaagcuuaccauggcccucuccaaggucaagcucaacgacacccucaacaaggaccagcuccucuccuccuccaaguacaccauccagcgcuccaccggcgacuccaucgacacccccaacuacgacguccagaagcacaucaacaagcucugcggcaugcuccucaucaccgaggacgccaaccacaaguucaccggccucaucggcaugcucuacgccaugucccgccucggccgcgaggacaccaucaagauccuccgcgacgccggcuaccacgucaaggccaacggcgucgacgucaccacccaccgccaggacaucaacggcaaggagaugaaguucgagguccucacccucgccucccucaccaccgagauccagaucaacaucgagaucgagucccgcaaguccuacaagaagaugcucaaggagaugggcgaggucgcccccgaguaccgccacgacucccccgacugcggcaugaucauccucugcaucgccgcccucgucaucaccaagcucgccgccggcgaccgcuccggccucaccgccgucauccgccgcgccaacaacguccucaagaacgagaugaagcgcuacaagggccuccuccccaaggacaucgccaacuccuucuacgaggucuucgagaagcacccccacuucaucgacgucuucguccacuucggcaucgcccaguccuccacccgcggcggcucccgcgucgagggcaucuucgccggccucuucaugaacgccuacggcgccggccaggucaugcuccgcuggggcguccucgccaaguccgucaagaacaucaugcucggccacgccuccguccaggccgagauggagcaggucgucgaggucuacgaguacgcccagaagcucggcggcgaggccggcuucuaccacauccucaacaaccccaaggccucccuccucucccucacccaguucccccacuucuccuccgucguccucggcaacgccgccggccucggcaucaugggcgaguaccgcggcaccccccgcaaccaggaccucuacgacgccgccaaggccuacgccgagcagcucaaggagaacggcgucaucaacuacuccguccucgaccucaccgccgaggagcucgaggccaucaagcaccagcucaaccccaaggacaacgacgucgagcucugaggacuaguggaagcauuuuccuggcugauuaaaagaaauuacucagcuauggucaucuguuccuguuagaaggcuaugcagcauauuauauacuaugcgcauguuaugaaaugcauaauaaaaaauuuuaaaaaaucuaaaagaucuaaaaaaaaaaaaaaaaaaaaaaaaaaaaaaaaaaaaaaaaaaaaaaaaaaaaaaaaaaaaaaaaugcaucccccccccccccccccccccccccccccccaaaggcucuuuucagagccaccagaauu

SEQ ID NO: 10290 - RNA, 1528 nt, Artificial Sequence
  mRNA product Design d-4 comprising derived and/or modified sequence from HRSV(A2)__P03418.1__N (opt3)
gggagagucccgcagucggcguccagcggcucugcuuguucgugugugugucguugcaggccuuauucaagcuuaccauggcccugagcaaggugaaacucaacgacacccuuaauaaggaucagcuguuguccucuucaaaauacacaauccaaagaaguacuggcgacagcauugauacgcccaacuaugacguccagaagcacauaaauaaauuaugcgggaugcugcuaaucaccgaggaugcuaaccauaaguucacaggacucauugguaugcuguacgcaauguccaggcuuggccgggaagacacuaucaagauucugcgcgaugccggguaucacguuaaagcgaauggaguggacguaaccacacaucgacaggauaucaacggcaaggagaugaaauuugaaguguugacccucgcuucucugacuacagagauacagaucaauauugaaaucgagucgcguaagucauacaaaaagaugcugaaggagaugggugaagucgccccugaguauagacacgacagcccagauugugggaugauuauccucugcauagcagccuuagugauuaccaaacuggcugcaggagacaggaguggccuuacggccguuauccggcgcgcuaacaauguguugaagaacgaaaugaaaagauacaagggccugcuaccgaaagauauugccaauuccuucuaugaggucuuugagaagcauccccacuucaucgacguguuuguacacuucgggaucgcgcaaucuagcacuaggggagguucccggguugaaggcauuuuugcaggacucuucaugaacgccuacggggcuggccaggugaugcugcgcugggguguccuugccaaaucagugaagaauauaaugcuggggcaugcaagugugcaggcugagauggaacaggucguugagguguacgaauaugcccaaaaguugggaggcgaggcgggcuuuuaccacauccucaacaauccuaaagccagccuguuaucucugacccaguucccacauuuuuccucaguagugcucgggaacgcagcuggacuugguauuaugggcgaguaucgagggacacccagaaaccaggaccuguacgaugccgcuaaggccuaugcagaacaguugaaagagaauggagucaucaacuacagcgugcuagaccugacugccgaggaacucgaagcuauaaagcaccaacugaauccuaaagauaacgacguugagcuuugaggacuaguggaagcauuuuccuggcugauuaaaagaaauuacucagcuauggucaucuguuccuguuagaaggcuaugcagcauauuauauacuaugcgcauguuaugaaaugcauaauaaaaaauuuuaaaaaaucuaaaagaucuaaaaaaaaaaaaaaaaaaaaaaaaaaaaaaaaaaaaaaaaaaaaaaaaaaaaaaaaaaaaaaaaugcaucccccccccccccccccccccccccccccccaaaggcucuuuucagagccaccagaauu

SEQ ID NO: 10291 - RNA, 1528 nt, Artificial Sequence
  mRNA product Design d-4 comprising derived and/or modified sequence from HRSV(A2)__P03418.1__N (opt4)
gggagagucccgcagucggcguccagcggcucugcuuguucgugugugugucguugcaggccuuauucaagcuuaccauggcccugagcaaggugaagcugaacgacacccugaacaaggaccagcugcugagcagcagcaaguacaccauccagagaagcaccggcgacagcaucgacacccccaacuacgacgugcagaagcacaucaacaagcugugcggcaugcugcugaucaccgaggacgccaaccacaaguucaccggccugaucggcaugcuguacgccaugagcagacugggcagagaggacaccaucaagauccugagagacgccggcuaccacgugaaggccaacggcguggacgugaccacccacagacaggacaucaacggcaaggagaugaaguucgaggugcugacccuggccagccugaccaccgagauccagaucaacaucgagaucgagagcagaaagagcuacaagaagaugcugaaggagaugggcgagguggcccccgaguacagacacgacagccccgacugcggcaugaucauccugugcaucgccgcccuggugaucaccaagcuggccgccggcgacagaagcggccugaccgccgugaucagaagagccaacaacgugcugaagaacgagaugaagagauacaagggccugcugcccaaggacaucgccaacagcuucuacgagguguucgagaagcacccccacuucaucgacguguucgugcacuucggcaucgcccagagcagcaccagaggcggcagcagaguggagggcaucuucgccggccuguucaugaacgccuacggcgccggccaggugaugcugagauggggcgugcuggccaagagcgugaagaacaucaugcugggccacgccagcgugcaggccgagauggagcaggugguggagguguacgaguacgcccagaagcugggcggcgaggccggcuucuaccacauccugaacaaccccaaggccagccugcugagccugacccaguucccccacuucagcagcguggugcugggcaacgccgccggccugggcaucaugggcgaguacagaggcacccccagaaaccaggaccuguacgacgccgccaaggccuacgccgagcagcugaaggagaacggcgugaucaacuacagcgugcuggaccugaccgccgaggagcuggaggccaucaagcaccagcugaaccccaaggacaacgacguggagcugugaggacuaguggaagcauuuuccuggcugauuaaaagaaauuacucagcuauggucaucuguuccuguuagaaggcuaugcagcauauuauauacuaugcgcauguuaugaaaugcauaauaaaaaauuuuaaaaaaucuaaaagaucuaaaaaaaaaaaaaaaaaaaaaaaaaaaaaaaaaaaaaaaaaaaaaaaaaaaaaaaaaaaaaaaaugcaucccccccccccccccccccccccccccccccaaaggcucuuuucagagccaccagaauu

SEQ ID NO: 10292 - RNA, 1528 nt, Artificial Sequence
  mRNA product Design d-4 comprising derived and/or modified sequence from HRSV(A2)__P03418.1__N (opt5)
gggagagucccgcagucggcguccagcggcucugcuuguucgugugugugucguugcaggccuuauucaagcuuaccauggcccugagcaaggugaaacucaacgacacccugaauaaggaucagcuucuguccucuagcaaauacacaauccaaagauccacgggcgacucuauugauacccccaacuaugacguccagaagcacaucaauaaacucugcgggaugcugcuuauuacagaggaugcuaaccauaaguucaccggacugaucggcaugcucuacgccaugagccggcuggggcgcgaagacacaauuaagauccugagagaugcgggauaucacguuaaagcuaauggcguggacgugaccacacaucggcaggauaucaacgggaaggagaugaaauuugaaguccucacccuggccucccuuacgaccgagauucagaucaauauugaaaucgagucucgcaagagcuacaaaaagaugcugaaggagaugggagaaguggccccugaguauagacacgacuccccggauuguggcaugauuauccucugcauugcugcccugguuaucacaaaacuugcugccggcgaccggagcgggcugaccgcggugauccgcagagccaacaauguccucaagaacgaaaugaaacgguacaagggacugcugcccaaagauauugcuaauucuuucuaugagguguuugagaagcauccucacuucaucgacguuuuugugcacuucggcauugcccaauccagcacacgcgggggaucuagagucgaaggcaucuuugcuggacucuucaugaacgccuacggggcgggccaggugaugcugcgguggggcgugcuugccaaauccgucaagaauauuaugcuggggcaugcuagcguucaggccgagauggaacaggugguggaggucuacgaauaugcucaaaagcucggaggcgaggccggguuuuaccacauccugaacaaucccaaagccucucuucugucccucacccaguucccucauuuuagcuccgugguucugggaaacgcugcgggccuggggaucaugggagaguaucgcggcacgcccagaaaccaggaccucuacgaugccgcuaaggccuaugccgaacagcugaaagagaauggcgugauuaacuacucuguccuugaccugacagcugaggaacucgaagccaucaagcaccaacugaauccuaaagauaacgacguggagcuuugaggacuaguggaagcauuuuccuggcugauuaaaagaaauuacucagcuauggucaucuguuccuguuagaaggcuaugcagcauauuauauacuaugcgcauguuaugaaaugcauaauaaaaaauuuuaaaaaaucuaaaagaucuaaaaaaaaaaaaaaaaaaaaaaaaaaaaaaaaaaaaaaaaaaaaaaaaaaaaaaaaaaaaaaaaugcaucccccccccccccccccccccccccccccccaaaggcucuuuucagagccaccagaauu

SEQ ID NO: 10293 - RNA, 1528 nt, Artificial Sequence
  mRNA product Design d-4 comprising derived and/or modified sequence from HRSV(A2)__P03418.1__N (opt6)
gggagagucccgcagucggcguccagcggcucugcuuguucgugugugugucguugcaggccuuauucaagcuuaccauggcacuaagcaaagucaaauuaaacgacacauuaaacaaagaccaacucuuaucaucaucaaaauacacaauacaaagaagcaccggagacaguaucgacacaccaaacuaugacguccaaaaacauauaaauaaauuaugcggcaugcucuuaaucacagaagacgccaaccauaaauuuacaggauuaauaggaauguuauaugcaaugucacgacuagguagagaagacacaauaaaaauacuaagagacgcaggcuaucacguaaaagcaaauggaguagacguaaccacacacagacaagacauaaauggaaaagaaaugaaauuugaaguauuaacacuagcaucacuaacaacagaaauacaaaucaacauagaaauagaaucaagaaaaagcuacaaaaaaauguuaaaagaaaugggagaagucgcaccagaauauagacaugauucaccagacugcggaaugauaauacuaugcauagcagcccuaguaauuacaaaacuagcagcaggagacagaagcggauuaacagcaguaauaagaagagcaaacaacguacuaaaaaacgaaaugaaaagauauaaaggauuauuaccaaaagacauagcaaacucauucuaugaaguauucgaaaaacacccccacuuuauagacgucuucguacacuucggaauagcccaaucauccacaagaggaggaucaagagucgaaggaauauucgcaggauuauucaugaacgcauauggcgcaggacaaguaaugcuaagauggggaguacuagcaaaauccgucaaaaacauaaugcuaggacacgcaucaguucaagcagaaauggaacaaguaguagaaguauacgaauacgcccaaaaacuaggaggagaagcaggauucuaccacauacuaaauaauccaaaagcaucacuacuaagccuaacccaauuuccccacuucucaaguguaguauuaggaaaugcagcuggacuaggaauaaugggagaauacagaggaacaccaagaaaccaagacuuauacgacgcagcaaaagcauacgcagagcaacuuaaagaaaacggaguaauaaacuauagcguacuagacuuaacagcagaagaacuggaagcaauaaaacaucaauuaaacccgaaagacaaugacguagaauuauaaggacuaguggaagcauuuuccuggcugauuaaaagaaauuacucagcuauggucaucuguuccuguuagaaggcuaugcagcauauuauauacuaugcgcauguuaugaaaugcauaauaaaaaauuuuaaaaaaucuaaaagaucuaaaaaaaaaaaaaaaaaaaaaaaaaaaaaaaaaaaaaaaaaaaaaaaaaaaaaaaaaaaaaaaaugcaucccccccccccccccccccccccccccccccaaaggcucuuuucagagccaccagaauu

SEQ ID NO: 10294 - RNA, 1528 nt, Artificial Sequence
  mRNA product Design d-4 comprising derived and/or modified sequence from HRSV(A2)__P03418.1__N (opt11)
gggagagucccgcagucggcguccagcggcucugcuuguucgugugugugucguugcaggccuuauucaagcuuaccauggcacucucgaaaguaaaacucaacgacacccucaacaaagaccaacuccuuuccagcuccaaauacaccauccaacgauccaccggagacuccaucgacacgcccaacuacgacguccagaaacacaucaacaagcucugcggaaugcuacuaaucaccgaggacgccaaccacaaauucacaggacuuauagggaugcucuacgccaugucccgccucggacgcgaagacacaauaaaaauccuacgagacgccggcuaccacguaaaggcaaacggcgucgacgucaccacacacagacaagacaucaacggaaaggaaaugaaauucgaaguccucacccucgccagccuaaccaccgagauccaaaucaacaucgaaaucgaaucacgcaaauccuacaagaaaaugcucaaagaaaugggagaagucgcccccgaauaccgucacgacucgcccgacugcggcaugauaauccuaugcaucgccgcacucgucauaaccaaacucgccgccggugaccgaucaggacugacagcagucauccgccgagcaaacaacgugcucaaaaacgaaaugaaacgcuacaaaggccuacuccccaaagacaucgccaacuccuucuacgaagucuucgaaaaacacccacacuucaucgacgucuucguccacuucggcaucgcacaaucaucaaccagaggcggcagccgcguugaaggcaucuucgcaggacucuuuaugaacgccuacggcgccggccaagucaugcuccgcuggggcguccuggcaaaaagcgucaaaaacaucaugcuaggccacgcuagcguccaagccgaaauggaacaagucgucgaaguuuacgaguacgcacaaaaacucggcggcgaagcaggcuucuaccacauccuaaacaaccccaaagccucccugcuaucacucacccaauucccccacuucuccagcgucguccucggcaacgccgcaggacuaggcaucaugggagaauaccgcgggacaccgcgcaaccaagaccucuacgacgccgccaaagccuacgccgaacaacucaaagaaaacggcgucauaaacuacucaguccucgaccucaccgccgaagaacucgaagccaucaaacaccaacucaacccaaaagacaacgacgucgaauuauaaggacuaguggaagcauuuuccuggcugauuaaaagaaauuacucagcuauggucaucuguuccuguuagaaggcuaugcagcauauuauauacuaugcgcauguuaugaaaugcauaauaaaaaauuuuaaaaaaucuaaaagaucuaaaaaaaaaaaaaaaaaaaaaaaaaaaaaaaaaaaaaaaaaaaaaaaaaaaaaaaaaaaaaaaaugcaucccccccccccccccccccccccccccccccaaaggcucuuuucagagccaccagaauu

SEQ ID NO: 10295 - RNA, 1625 nt, Artificial Sequence
  mRNA product Design d-5 comprising derived and/or modified sequence from HRSV(A2)__P03418.1__N (wt)
gggagagggcgcuuggcuugcaaggacccugagcugcggcauugaagcacacccaacccaacucgacugaagucagccucacugaaccggaucugagaaucuucucucucugggcuugccagggcucuccgaaccuagcuagcauccucuucaauuccaacuagaaagcuuaccauggcucuuagcaaagucaaguugaaugauacacucaacaaagaucaacuucugucauccagcaaauacaccauccaacggagcacaggagauaguauugauacuccuaauuaugaugugcagaaacacaucaauaaguuauguggcauguuauuaaucacagaagaugcuaaucauaaauucacuggguuaauagguauguuauaugcgaugucuagguuaggaagagaagacaccauaaaaauacucagagaugcgggauaucauguaaaagcaaauggaguagauguaacaacacaucgucaagacauuaauggaaaagaaaugaaauuugaaguguuaacauuggcaagcuuaacaacugaaauucaaaucaacauugagauagaaucuagaaaauccuacaaaaaaaugcuaaaagaaaugggagagguagcuccagaauacaggcaugacucuccugauugugggaugauaauauuauguauagcagcauuaguaauaacuaaauuagcagcaggggacagaucuggucuuacagccgugauuaggagagcuaauaauguccuaaaaaaugaaaugaaacguuacaaaggcuuacuacccaaggacauagccaacagcuucuaugaaguguuugaaaaacauccccacuuuauagauguuuuuguucauuuugguauagcacaaucuucuaccagagguggcaguagaguugaagggauuuuugcaggauuguuuaugaaugccuauggugcagggcaagugauguuacgguggggagucuuagcaaaaucaguuaaaaauauuauguuaggacaugcuagugugcaagcagaaauggaacaaguuguugagguuuaugaauaugcccaaaaauuggguggugaagcaggauucuaccauauauugaacaacccaaaagcaucauuauuaucuuugacucaauuuccucacuucuccaguguaguauuaggcaaugcugcuggccuaggcauaaugggagaguacagagguacaccgaggaaucaagaucuauaugaugcagcaaaggcauaugcugaacaacucaaagaaaauggugugauuaacuacaguguacuagacuugacagcagaagaacuagaggcuaucaaacaucagcuuaauccaaaagauaaugauguagagcuuugaggacuaguggaagcauuuuccuggcugauuaaaagaaauuacucagcuauggucaucuguuccuguuagaaggcuaugcagcauauuauauacuaugcgcauguuaugaaaugcauaauaaaaaauuuuaaaaaaucuaaaagaucuaaaaaaaaaaaaaaaaaaaaaaaaaaaaaaaaaaaaaaaaaaaaaaaaaaaaaaaaaaaaaaaaugcaucccccccccccccccccccccccccccccccaaaggcucuuuucagagccaccagaauu

SEQ ID NO: 10296 - RNA, 1625 nt, Artificial Sequence
  mRNA product Design d-5 comprising derived and/or modified sequence from HRSV(A2)__P03418.1__N (opt1)
gggagagggcgcuuggcuugcaaggacccugagcugcggcauugaagcacacccaacccaacucgacugaagucagccucacugaaccggaucugagaaucuucucucucugggcuugccagggcucuccgaaccuagcuagcauccucuucaauuccaacuagaaagcuuaccauggcccugagcaaggugaagcucaacgacacccugaacaaggaccagcugcucuccagcuccaaguacaccauccagcgcagcaccggcgacuccaucgacacccccaacuacgacguccagaagcacaucaacaagcugugcgggaugcugcucaucaccgaggacgccaaccacaaguucaccggccugaucgggaugcuguacgcgaugagccggcucggccgcgaggacacgaucaagauccugcgggacgccggguaccacgugaaggccaacggcguggacgucaccacccaccgccaggacaucaacggcaaggagaugaaguucgaggugcugacccucgccucccugacgaccgagauccagaucaacaucgagaucgagagccggaaguccuacaagaagaugcugaaggagaugggggagguggccccggaguaccgccacgacagccccgacugcggcaugaucauccucugcaucgcggcccuggucaucaccaagcuggccgccggggaccgguccggccucaccgcggugauccgccgggccaacaacgugcugaagaacgagaugaagcgcuacaaggggcugcuccccaaggacaucgccaacagcuucuacgaggucuucgagaagcacccccacuucaucgacguguucgugcacuucggcaucgcccaguccagcacgcggggcgggucccgcgucgagggcaucuucgccgggcuguucaugaacgcguacggcgccggccaggugaugcugcgguggggcgugcucgccaagagcgucaagaacaucaugcuggggcacgccuccgugcaggccgagauggagcaggucguggagguguacgaguacgcgcagaagcucgggggcgaggccggguucuaccacauccugaacaacccgaaggccagccugcugucccucacccaguucccccacuucagcagcgugguccugggcaacgccgccggccuggggaucaugggcgaguaccgcgggacgccccggaaccaggaccucuacgacgcggccaaggccuacgccgagcagcugaaggagaacggcgugaucaacuacuccgugcuggaccucaccgccgaggagcuggaggcgaucaagcaccagcugaaccccaaggacaacgacgucgagcucugaggacuaguggaagcauuuuccuggcugauuaaaagaaauuacucagcuauggucaucuguuccuguuagaaggcuaugcagcauauuauauacuaugcgcauguuaugaaaugcauaauaaaaaauuuuaaaaaaucuaaaagaucuaaaaaaaaaaaaaaaaaaaaaaaaaaaaaaaaaaaaaaaaaaaaaaaaaaaaaaaaaaaaaaaaugcaucccccccccccccccccccccccccccccccaaaggcucuuuucagagccaccagaauu

SEQ ID NO: 10297 - RNA, 1625 nt, Artificial Sequence
  mRNA product Design d-5 comprising derived and/or modified sequence from HRSV(A2)__P03418.1__N (opt2)
gggagagggcgcuuggcuugcaaggacccugagcugcggcauugaagcacacccaacccaacucgacugaagucagccucacugaaccggaucugagaaucuucucucucugggcuugccagggcucuccgaaccuagcuagcauccucuucaauuccaacuagaaagcuuaccauggcccucuccaaggucaagcucaacgacacccucaacaaggaccagcuccucuccuccuccaaguacaccauccagcgcuccaccggcgacuccaucgacacccccaacuacgacguccagaagcacaucaacaagcucugcggcaugcuccucaucaccgaggacgccaaccacaaguucaccggccucaucggcaugcucuacgccaugucccgccucggccgcgaggacaccaucaagauccuccgcgacgccggcuaccacgucaaggccaacggcgucgacgucaccacccaccgccaggacaucaacggcaaggagaugaaguucgagguccucacccucgccucccucaccaccgagauccagaucaacaucgagaucgagucccgcaaguccuacaagaagaugcucaaggagaugggcgaggucgcccccgaguaccgccacgacucccccgacugcggcaugaucauccucugcaucgccgcccucgucaucaccaagcucgccgccggcgaccgcuccggccucaccgccgucauccgccgcgccaacaacguccucaagaacgagaugaagcgcuacaagggccuccuccccaaggacaucgccaacuccuucuacgaggucuucgagaagcacccccacuucaucgacgucuucguccacuucggcaucgcccaguccuccacccgcggcggcucccgcgucgagggcaucuucgccggccucuucaugaacgccuacggcgccggccaggucaugcuccgcuggggcguccucgccaaguccgucaagaacaucaugcucggccacgccuccguccaggccgagauggagcaggucgucgaggucuacgaguacgcccagaagcucggcggcgaggccggcuucuaccacauccucaacaaccccaaggccucccuccucucccucacccaguucccccacuucuccuccgucguccucggcaacgccgccggccucggcaucaugggcgaguaccgcggcaccccccgcaaccaggaccucuacgacgccgccaaggccuacgccgagcagcucaaggagaacggcgucaucaacuacuccguccucgaccucaccgccgaggagcucgaggccaucaagcaccagcucaaccccaaggacaacgacgucgagcucugaggacuaguggaagcauuuuccuggcugauuaaaagaaauuacucagcuauggucaucuguuccuguuagaaggcuaugcagcauauuauauacuaugcgcauguuaugaaaugcauaauaaaaaauuuuaaaaaaucuaaaagaucuaaaaaaaaaaaaaaaaaaaaaaaaaaaaaaaaaaaaaaaaaaaaaaaaaaaaaaaaaaaaaaaaugcaucccccccccccccccccccccccccccccccaaaggcucuuuucagagccaccagaauu

SEQ ID NO: 10298 - RNA, 1625 nt, Artificial Sequence
  mRNA product Design d-5 comprising derived and/or modified sequence from HRSV(A2)__P03418.1__N (opt3)
gggagagggcgcuuggcuugcaaggacccugagcugcggcauugaagcacacccaacccaacucgacugaagucagccucacugaaccggaucugagaaucuucucucucugggcuugccagggcucuccgaaccuagcuagcauccucuucaauuccaacuagaaagcuuaccauggcccugagcaaggugaaacucaacgacacccuuaauaaggaucagcuguuguccucuucaaaauacacaauccaaagaaguacuggcgacagcauugauacgcccaacuaugacguccagaagcacauaaauaaauuaugcgggaugcugcuaaucaccgaggaugcuaaccauaaguucacaggacucauugguaugcuguacgcaauguccaggcuuggccgggaagacacuaucaagauucugcgcgaugccggguaucacguuaaagcgaauggaguggacguaaccacacaucgacaggauaucaacggcaaggagaugaaauuugaaguguugacccucgcuucucugacuacagagauacagaucaauauugaaaucgagucgcguaagucauacaaaaagaugcugaaggagaugggugaagucgccccugaguauagacacgacagcccagauugugggaugauuauccucugcauagcagccuuagugauuaccaaacuggcugcaggagacaggaguggccuuacggccguuauccggcgcgcuaacaauguguugaagaacgaaaugaaaagauacaagggccugcuaccgaaagauauugccaauuccuucuaugaggucuuugagaagcauccccacuucaucgacguguuuguacacuucgggaucgcgcaaucuagcacuaggggagguucccggguugaaggcauuuuugcaggacucuucaugaacgccuacggggcuggccaggugaugcugcgcugggguguccuugccaaaucagugaagaauauaaugcuggggcaugcaagugugcaggcugagauggaacaggucguugagguguacgaauaugcccaaaaguugggaggcgaggcgggcuuuuaccacauccucaacaauccuaaagccagccuguuaucucugacccaguucccacauuuuuccucaguagugcucgggaacgcagcuggacuugguauuaugggcgaguaucgagggacacccagaaaccaggaccuguacgaugccgcuaaggccuaugcagaacaguugaaagagaauggagucaucaacuacagcgugcuagaccugacugccgaggaacucgaagcuauaaagcaccaacugaauccuaaagauaacgacguugagcuuugaggacuaguggaagcauuuuccuggcugauuaaaagaaauuacucagcuauggucaucuguuccuguuagaaggcuaugcagcauauuauauacuaugcgcauguuaugaaaugcauaauaaaaaauuuuaaaaaaucuaaaagaucuaaaaaaaaaaaaaaaaaaaaaaaaaaaaaaaaaaaaaaaaaaaaaaaaaaaaaaaaaaaaaaaaugcaucccccccccccccccccccccccccccccccaaaggcucuuuucagagccaccagaauu

SEQ ID NO: 10299 - RNA, 1625 nt, Artificial Sequence
  mRNA product Design d-5 comprising derived and/or modified sequence from HRSV(A2)__P03418.1__N (opt4)
gggagagggcgcuuggcuugcaaggacccugagcugcggcauugaagcacacccaacccaacucgacugaagucagccucacugaaccggaucugagaaucuucucucucugggcuugccagggcucuccgaaccuagcuagcauccucuucaauuccaacuagaaagcuuaccauggcccugagcaaggugaagcugaacgacacccugaacaaggaccagcugcugagcagcagcaaguacaccauccagagaagcaccggcgacagcaucgacacccccaacuacgacgugcagaagcacaucaacaagcugugcggcaugcugcugaucaccgaggacgccaaccacaaguucaccggccugaucggcaugcuguacgccaugagcagacugggcagagaggacaccaucaagauccugagagacgccggcuaccacgugaaggccaacggcguggacgugaccacccacagacaggacaucaacggcaaggagaugaaguucgaggugcugacccuggccagccugaccaccgagauccagaucaacaucgagaucgagagcagaaagagcuacaagaagaugcugaaggagaugggcgagguggcccccgaguacagacacgacagccccgacugcggcaugaucauccugugcaucgccgcccuggugaucaccaagcuggccgccggcgacagaagcggccugaccgccgugaucagaagagccaacaacgugcugaagaacgagaugaagagauacaagggccugcugcccaaggacaucgccaacagcuucuacgagguguucgagaagcacccccacuucaucgacguguucgugcacuucggcaucgcccagagcagcaccagaggcggcagcagaguggagggcaucuucgccggccuguucaugaacgccuacggcgccggccaggugaugcugagauggggcgugcuggccaagagcgugaagaacaucaugcugggccacgccagcgugcaggccgagauggagcaggugguggagguguacgaguacgcccagaagcugggcggcgaggccggcuucuaccacauccugaacaaccccaaggccagccugcugagccugacccaguucccccacuucagcagcguggugcugggcaacgccgccggccugggcaucaugggcgaguacagaggcacccccagaaaccaggaccuguacgacgccgccaaggccuacgccgagcagcugaaggagaacggcgugaucaacuacagcgugcuggaccugaccgccgaggagcuggaggccaucaagcaccagcugaaccccaaggacaacgacguggagcugugaggacuaguggaagcauuuuccuggcugauuaaaagaaauuacucagcuauggucaucuguuccuguuagaaggcuaugcagcauauuauauacuaugcgcauguuaugaaaugcauaauaaaaaauuuuaaaaaaucuaaaagaucuaaaaaaaaaaaaaaaaaaaaaaaaaaaaaaaaaaaaaaaaaaaaaaaaaaaaaaaaaaaaaaaaugcaucccccccccccccccccccccccccccccccaaaggcucuuuucagagccaccagaauu

SEQ ID NO: 10300 - RNA, 1625 nt, Artificial Sequence
  mRNA product Design d-5 comprising derived and/or modified sequence from HRSV(A2)__P03418.1__N (opt5)
gggagagggcgcuuggcuugcaaggacccugagcugcggcauugaagcacacccaacccaacucgacugaagucagccucacugaaccggaucugagaaucuucucucucugggcuugccagggcucuccgaaccuagcuagcauccucuucaauuccaacuagaaagcuuaccauggcccugagcaaggugaaacucaacgacacccugaauaaggaucagcuucuguccucuagcaaauacacaauccaaagauccacgggcgacucuauugauacccccaacuaugacguccagaagcacaucaauaaacucugcgggaugcugcuuauuacagaggaugcuaaccauaaguucaccggacugaucggcaugcucuacgccaugagccggcuggggcgcgaagacacaauuaagauccugagagaugcgggauaucacguuaaagcuaauggcguggacgugaccacacaucggcaggauaucaacgggaaggagaugaaauuugaaguccucacccuggccucccuuacgaccgagauucagaucaauauugaaaucgagucucgcaagagcuacaaaaagaugcugaaggagaugggagaaguggccccugaguauagacacgacuccccggauuguggcaugauuauccucugcauugcugcccugguuaucacaaaacuugcugccggcgaccggagcgggcugaccgcggugauccgcagagccaacaauguccucaagaacgaaaugaaacgguacaagggacugcugcccaaagauauugcuaauucuuucuaugagguguuugagaagcauccucacuucaucgacguuuuugugcacuucggcauugcccaauccagcacacgcgggggaucuagagucgaaggcaucuuugcuggacucuucaugaacgccuacggggcgggccaggugaugcugcgguggggcgugcuugccaaauccgucaagaauauuaugcuggggcaugcuagcguucaggccgagauggaacaggugguggaggucuacgaauaugcucaaaagcucggaggcgaggccggguuuuaccacauccugaacaaucccaaagccucucuucugucccucacccaguucccucauuuuagcuccgugguucugggaaacgcugcgggccuggggaucaugggagaguaucgcggcacgcccagaaaccaggaccucuacgaugccgcuaaggccuaugccgaacagcugaaagagaauggcgugauuaacuacucuguccuugaccugacagcugaggaacucgaagccaucaagcaccaacugaauccuaaagauaacgacguggagcuuugaggacuaguggaagcauuuuccuggcugauuaaaagaaauuacucagcuauggucaucuguuccuguuagaaggcuaugcagcauauuauauacuaugcgcauguuaugaaaugcauaauaaaaaauuuuaaaaaaucuaaaagaucuaaaaaaaaaaaaaaaaaaaaaaaaaaaaaaaaaaaaaaaaaaaaaaaaaaaaaaaaaaaaaaaaugcaucccccccccccccccccccccccccccccccaaaggcucuuuucagagccaccagaauu

SEQ ID NO: 10301 - RNA, 1625 nt, Artificial Sequence
  mRNA product Design d-5 comprising derived and/or modified sequence from HRSV(A2)__P03418.1__N (opt6)
gggagagggcgcuuggcuugcaaggacccugagcugcggcauugaagcacacccaacccaacucgacugaagucagccucacugaaccggaucugagaaucuucucucucugggcuugccagggcucuccgaaccuagcuagcauccucuucaauuccaacuagaaagcuuaccauggcacuaagcaaagucaaauuaaacgacacauuaaacaaagaccaacucuuaucaucaucaaaauacacaauacaaagaagcaccggagacaguaucgacacaccaaacuaugacguccaaaaacauauaaauaaauuaugcggcaugcucuuaaucacagaagacgccaaccauaaauuuacaggauuaauaggaauguuauaugcaaugucacgacuagguagagaagacacaauaaaaauacuaagagacgcaggcuaucacguaaaagcaaauggaguagacguaaccacacacagacaagacauaaauggaaaagaaaugaaauuugaaguauuaacacuagcaucacuaacaacagaaauacaaaucaacauagaaauagaaucaagaaaaagcuacaaaaaaauguuaaaagaaaugggagaagucgcaccagaauauagacaugauucaccagacugcggaaugauaauacuaugcauagcagcccuaguaauuacaaaacuagcagcaggagacagaagcggauuaacagcaguaauaagaagagcaaacaacguacuaaaaaacgaaaugaaaagauauaaaggauuauuaccaaaagacauagcaaacucauucuaugaaguauucgaaaaacacccccacuuuauagacgucuucguacacuucggaauagcccaaucauccacaagaggaggaucaagagucgaaggaauauucgcaggauuauucaugaacgcauauggcgcaggacaaguaaugcuaagauggggaguacuagcaaaauccgucaaaaacauaaugcuaggacacgcaucaguucaagcagaaauggaacaaguaguagaaguauacgaauacgcccaaaaacuaggaggagaagcaggauucuaccacauacuaaauaauccaaaagcaucacuacuaagccuaacccaauuuccccacuucucaaguguaguauuaggaaaugcagcuggacuaggaauaaugggagaauacagaggaacaccaagaaaccaagacuuauacgacgcagcaaaagcauacgcagagcaacuuaaagaaaacggaguaauaaacuauagcguacuagacuuaacagcagaagaacuggaagcaauaaaacaucaauuaaacccgaaagacaaugacguagaauuauaaggacuaguggaagcauuuuccuggcugauuaaaagaaauuacucagcuauggucaucuguuccuguuagaaggcuaugcagcauauuauauacuaugcgcauguuaugaaaugcauaauaaaaaauuuuaaaaaaucuaaaagaucuaaaaaaaaaaaaaaaaaaaaaaaaaaaaaaaaaaaaaaaaaaaaaaaaaaaaaaaaaaaaaaaaugcaucccccccccccccccccccccccccccccccaaaggcucuuuucagagccaccagaauu

SEQ ID NO: 10302 - RNA, 1625 nt, Artificial Sequence
  mRNA product Design d-5 comprising derived and/or modified sequence from HRSV(A2)__P03418.1__N (opt11)
gggagagggcgcuuggcuugcaaggacccugagcugcggcauugaagcacacccaacccaacucgacugaagucagccucacugaaccggaucugagaaucuucucucucugggcuugccagggcucuccgaaccuagcuagcauccucuucaauuccaacuagaaagcuuaccauggcacucucgaaaguaaaacucaacgacacccucaacaaagaccaacuccuuuccagcuccaaauacaccauccaacgauccaccggagacuccaucgacacgcccaacuacgacguccagaaacacaucaacaagcucugcggaaugcuacuaaucaccgaggacgccaaccacaaauucacaggacuuauagggaugcucuacgccaugucccgccucggacgcgaagacacaauaaaaauccuacgagacgccggcuaccacguaaaggcaaacggcgucgacgucaccacacacagacaagacaucaacggaaaggaaaugaaauucgaaguccucacccucgccagccuaaccaccgagauccaaaucaacaucgaaaucgaaucacgcaaauccuacaagaaaaugcucaaagaaaugggagaagucgcccccgaauaccgucacgacucgcccgacugcggcaugauaauccuaugcaucgccgcacucgucauaaccaaacucgccgccggugaccgaucaggacugacagcagucauccgccgagcaaacaacgugcucaaaaacgaaaugaaacgcuacaaaggccuacuccccaaagacaucgccaacuccuucuacgaagucuucgaaaaacacccacacuucaucgacgucuucguccacuucggcaucgcacaaucaucaaccagaggcggcagccgcguugaaggcaucuucgcaggacucuuuaugaacgccuacggcgccggccaagucaugcuccgcuggggcguccuggcaaaaagcgucaaaaacaucaugcuaggccacgcuagcguccaagccgaaauggaacaagucgucgaaguuuacgaguacgcacaaaaacucggcggcgaagcaggcuucuaccacauccuaaacaaccccaaagccucccugcuaucacucacccaauucccccacuucuccagcgucguccucggcaacgccgcaggacuaggcaucaugggagaauaccgcgggacaccgcgcaaccaagaccucuacgacgccgccaaagccuacgccgaacaacucaaagaaaacggcgucauaaacuacucaguccucgaccucaccgccgaagaacucgaagccaucaaacaccaacucaacccaaaagacaacgacgucgaauuauaaggacuaguggaagcauuuuccuggcugauuaaaagaaauuacucagcuauggucaucuguuccuguuagaaggcuaugcagcauauuauauacuaugcgcauguuaugaaaugcauaauaaaaaauuuuaaaaaaucuaaaagaucuaaaaaaaaaaaaaaaaaaaaaaaaaaaaaaaaaaaaaaaaaaaaaaaaaaaaaaaaaaaaaaaaugcaucccccccccccccccccccccccccccccccaaaggcucuuuucagagccaccagaauu

SEQ ID NO: 10303 - RNA, 1505 nt, Artificial Sequence
  mRNA product Design e-1 comprising derived and/or modified sequence from HRSV(A2)__P03418.1__N (wt)
gggagaauauaagcguuggcggagcgucgguuguagcacucugcgcgcccgcucuucugcugcuguuugucuacuuccuccugcuuccccgccgccgccgccgccaucaagcuuaccauggcucuuagcaaagucaaguugaaugauacacucaacaaagaucaacuucugucauccagcaaauacaccauccaacggagcacaggagauaguauugauacuccuaauuaugaugugcagaaacacaucaauaaguuauguggcauguuauuaaucacagaagaugcuaaucauaaauucacuggguuaauagguauguuauaugcgaugucuagguuaggaagagaagacaccauaaaaauacucagagaugcgggauaucauguaaaagcaaauggaguagauguaacaacacaucgucaagacauuaauggaaaagaaaugaaauuugaaguguuaacauuggcaagcuuaacaacugaaauucaaaucaacauugagauagaaucuagaaaauccuacaaaaaaaugcuaaaagaaaugggagagguagcuccagaauacaggcaugacucuccugauugugggaugauaauauuauguauagcagcauuaguaauaacuaaauuagcagcaggggacagaucuggucuuacagccgugauuaggagagcuaauaauguccuaaaaaaugaaaugaaacguuacaaaggcuuacuacccaaggacauagccaacagcuucuaugaaguguuugaaaaacauccccacuuuauagauguuuuuguucauuuugguauagcacaaucuucuaccagagguggcaguagaguugaagggauuuuugcaggauuguuuaugaaugccuauggugcagggcaagugauguuacgguggggagucuuagcaaaaucaguuaaaaauauuauguuaggacaugcuagugugcaagcagaaauggaacaaguuguugagguuuaugaauaugcccaaaaauuggguggugaagcaggauucuaccauauauugaacaacccaaaagcaucauuauuaucuuugacucaauuuccucacuucuccaguguaguauuaggcaaugcugcuggccuaggcauaaugggagaguacagagguacaccgaggaaucaagaucuauaugaugcagcaaaggcauaugcugaacaacucaaagaaaauggugugauuaacuacaguguacuagacuugacagcagaagaacuagaggcuaucaaacaucagcuuaauccaaaagauaaugauguagagcuuugaggacuaguguccaccugucccuccugggcugcuggauugucucguuuuccugccaaauaaacaggaucagcgcuuuacagaucuaaaaaaaaaaaaaaaaaaaaaaaaaaaaaaaaaaaaaaaaaaaaaaaaaaaaaaaaaaaaaaaaugcaucccccccccccccccccccccccccccccccaaaggcucuuuucagagccaccagaauu

SEQ ID NO: 10304 - RNA, 1505 nt, Artificial Sequence
  mRNA product Design e-1 comprising derived and/or modified sequence from HRSV(A2)__P03418.1__N (opt1)
gggagaauauaagcguuggcggagcgucgguuguagcacucugcgcgcccgcucuucugcugcuguuugucuacuuccuccugcuuccccgccgccgccgccgccaucaagcuuaccauggcccugagcaaggugaagcucaacgacacccugaacaaggaccagcugcucuccagcuccaaguacaccauccagcgcagcaccggcgacuccaucgacacccccaacuacgacguccagaagcacaucaacaagcugugcgggaugcugcucaucaccgaggacgccaaccacaaguucaccggccugaucgggaugcuguacgcgaugagccggcucggccgcgaggacacgaucaagauccugcgggacgccggguaccacgugaaggccaacggcguggacgucaccacccaccgccaggacaucaacggcaaggagaugaaguucgaggugcugacccucgccucccugacgaccgagauccagaucaacaucgagaucgagagccggaaguccuacaagaagaugcugaaggagaugggggagguggccccggaguaccgccacgacagccccgacugcggcaugaucauccucugcaucgcggcccuggucaucaccaagcuggccgccggggaccgguccggccucaccgcggugauccgccgggccaacaacgugcugaagaacgagaugaagcgcuacaaggggcugcuccccaaggacaucgccaacagcuucuacgaggucuucgagaagcacccccacuucaucgacguguucgugcacuucggcaucgcccaguccagcacgcggggcgggucccgcgucgagggcaucuucgccgggcuguucaugaacgcguacggcgccggccaggugaugcugcgguggggcgugcucgccaagagcgucaagaacaucaugcuggggcacgccuccgugcaggccgagauggagcaggucguggagguguacgaguacgcgcagaagcucgggggcgaggccggguucuaccacauccugaacaacccgaaggccagccugcugucccucacccaguucccccacuucagcagcgugguccugggcaacgccgccggccuggggaucaugggcgaguaccgcgggacgccccggaaccaggaccucuacgacgcggccaaggccuacgccgagcagcugaaggagaacggcgugaucaacuacuccgugcuggaccucaccgccgaggagcuggaggcgaucaagcaccagcugaaccccaaggacaacgacgucgagcucugaggacuaguguccaccugucccuccugggcugcuggauugucucguuuuccugccaaauaaacaggaucagcgcuuuacagaucuaaaaaaaaaaaaaaaaaaaaaaaaaaaaaaaaaaaaaaaaaaaaaaaaaaaaaaaaaaaaaaaaugcaucccccccccccccccccccccccccccccccaaaggcucuuuucagagccaccagaauu

SEQ ID NO: 10305 - RNA, 1505 nt, Artificial Sequence
  mRNA product Design e-1 comprising derived and/or modified sequence from HRSV(A2)__P03418.1__N (opt2)
gggagaauauaagcguuggcggagcgucgguuguagcacucugcgcgcccgcucuucugcugcuguuugucuacuuccuccugcuuccccgccgccgccgccgccaucaagcuuaccauggcccucuccaaggucaagcucaacgacacccucaacaaggaccagcuccucuccuccuccaaguacaccauccagcgcuccaccggcgacuccaucgacacccccaacuacgacguccagaagcacaucaacaagcucugcggcaugcuccucaucaccgaggacgccaaccacaaguucaccggccucaucggcaugcucuacgccaugucccgccucggccgcgaggacaccaucaagauccuccgcgacgccggcuaccacgucaaggccaacggcgucgacgucaccacccaccgccaggacaucaacggcaaggagaugaaguucgagguccucacccucgccucccucaccaccgagauccagaucaacaucgagaucgagucccgcaaguccuacaagaagaugcucaaggagaugggcgaggucgcccccgaguaccgccacgacucccccgacugcggcaugaucauccucugcaucgccgcccucgucaucaccaagcucgccgccggcgaccgcuccggccucaccgccgucauccgccgcgccaacaacguccucaagaacgagaugaagcgcuacaagggccuccuccccaaggacaucgccaacuccuucuacgaggucuucgagaagcacccccacuucaucgacgucuucguccacuucggcaucgcccaguccuccacccgcggcggcucccgcgucgagggcaucuucgccggccucuucaugaacgccuacggcgccggccaggucaugcuccgcuggggcguccucgccaaguccgucaagaacaucaugcucggccacgccuccguccaggccgagauggagcaggucgucgaggucuacgaguacgcccagaagcucggcggcgaggccggcuucuaccacauccucaacaaccccaaggccucccuccucucccucacccaguucccccacuucuccuccgucguccucggcaacgccgccggccucggcaucaugggcgaguaccgcggcaccccccgcaaccaggaccucuacgacgccgccaaggccuacgccgagcagcucaaggagaacggcgucaucaacuacuccguccucgaccucaccgccgaggagcucgaggccaucaagcaccagcucaaccccaaggacaacgacgucgagcucugaggacuaguguccaccugucccuccugggcugcuggauugucucguuuuccugccaaauaaacaggaucagcgcuuuacagaucuaaaaaaaaaaaaaaaaaaaaaaaaaaaaaaaaaaaaaaaaaaaaaaaaaaaaaaaaaaaaaaaaugcaucccccccccccccccccccccccccccccccaaaggcucuuuucagagccaccagaauu

SEQ ID NO: 10306 - RNA, 1505 nt, Artificial Sequence
  mRNA product Design e-1 comprising derived and/or modified sequence from HRSV(A2)__P03418.1__N (opt3)
gggagaauauaagcguuggcggagcgucgguuguagcacucugcgcgcccgcucuucugcugcuguuugucuacuuccuccugcuuccccgccgccgccgccgccaucaagcuuaccauggcccugagcaaggugaaacucaacgacacccuuaauaaggaucagcuguuguccucuucaaaauacacaauccaaagaaguacuggcgacagcauugauacgcccaacuaugacguccagaagcacauaaauaaauuaugcgggaugcugcuaaucaccgaggaugcuaaccauaaguucacaggacucauugguaugcuguacgcaauguccaggcuuggccgggaagacacuaucaagauucugcgcgaugccggguaucacguuaaagcgaauggaguggacguaaccacacaucgacaggauaucaacggcaaggagaugaaauuugaaguguugacccucgcuucucugacuacagagauacagaucaauauugaaaucgagucgcguaagucauacaaaaagaugcugaaggagaugggugaagucgccccugaguauagacacgacagcccagauugugggaugauuauccucugcauagcagccuuagugauuaccaaacuggcugcaggagacaggaguggccuuacggccguuauccggcgcgcuaacaauguguugaagaacgaaaugaaaagauacaagggccugcuaccgaaagauauugccaauuccuucuaugaggucuuugagaagcauccccacuucaucgacguguuuguacacuucgggaucgcgcaaucuagcacuaggggagguucccggguugaaggcauuuuugcaggacucuucaugaacgccuacggggcuggccaggugaugcugcgcugggguguccuugccaaaucagugaagaauauaaugcuggggcaugcaagugugcaggcugagauggaacaggucguugagguguacgaauaugcccaaaaguugggaggcgaggcgggcuuuuaccacauccucaacaauccuaaagccagccuguuaucucugacccaguucccacauuuuuccucaguagugcucgggaacgcagcuggacuugguauuaugggcgaguaucgagggacacccagaaaccaggaccuguacgaugccgcuaaggccuaugcagaacaguugaaagagaauggagucaucaacuacagcgugcuagaccugacugccgaggaacucgaagcuauaaagcaccaacugaauccuaaagauaacgacguugagcuuugaggacuaguguccaccugucccuccugggcugcuggauugucucguuuuccugccaaauaaacaggaucagcgcuuuacagaucuaaaaaaaaaaaaaaaaaaaaaaaaaaaaaaaaaaaaaaaaaaaaaaaaaaaaaaaaaaaaaaaaugcaucccccccccccccccccccccccccccccccaaaggcucuuuucagagccaccagaauu

SEQ ID NO: 10307 - RNA, 1505 nt, Artificial Sequence
  mRNA product Design e-1 comprising derived and/or modified sequence from HRSV(A2)__P03418.1__N (opt4)
gggagaauauaagcguuggcggagcgucgguuguagcacucugcgcgcccgcucuucugcugcuguuugucuacuuccuccugcuuccccgccgccgccgccgccaucaagcuuaccauggcccugagcaaggugaagcugaacgacacccugaacaaggaccagcugcugagcagcagcaaguacaccauccagagaagcaccggcgacagcaucgacacccccaacuacgacgugcagaagcacaucaacaagcugugcggcaugcugcugaucaccgaggacgccaaccacaaguucaccggccugaucggcaugcuguacgccaugagcagacugggcagagaggacaccaucaagauccugagagacgccggcuaccacgugaaggccaacggcguggacgugaccacccacagacaggacaucaacggcaaggagaugaaguucgaggugcugacccuggccagccugaccaccgagauccagaucaacaucgagaucgagagcagaaagagcuacaagaagaugcugaaggagaugggcgagguggcccccgaguacagacacgacagccccgacugcggcaugaucauccugugcaucgccgcccuggugaucaccaagcuggccgccggcgacagaagcggccugaccgccgugaucagaagagccaacaacgugcugaagaacgagaugaagagauacaagggccugcugcccaaggacaucgccaacagcuucuacgagguguucgagaagcacccccacuucaucgacguguucgugcacuucggcaucgcccagagcagcaccagaggcggcagcagaguggagggcaucuucgccggccuguucaugaacgccuacggcgccggccaggugaugcugagauggggcgugcuggccaagagcgugaagaacaucaugcugggccacgccagcgugcaggccgagauggagcaggugguggagguguacgaguacgcccagaagcugggcggcgaggccggcuucuaccacauccugaacaaccccaaggccagccugcugagccugacccaguucccccacuucagcagcguggugcugggcaacgccgccggccugggcaucaugggcgaguacagaggcacccccagaaaccaggaccuguacgacgccgccaaggccuacgccgagcagcugaaggagaacggcgugaucaacuacagcgugcuggaccugaccgccgaggagcuggaggccaucaagcaccagcugaaccccaaggacaacgacguggagcugugaggacuaguguccaccugucccuccugggcugcuggauugucucguuuuccugccaaauaaacaggaucagcgcuuuacagaucuaaaaaaaaaaaaaaaaaaaaaaaaaaaaaaaaaaaaaaaaaaaaaaaaaaaaaaaaaaaaaaaaugcaucccccccccccccccccccccccccccccccaaaggcucuuuucagagccaccagaauu

SEQ ID NO: 10308 - RNA, 1505 nt, Artificial Sequence
  mRNA product Design e-1 comprising derived and/or modified sequence from HRSV(A2)__P03418.1__N (opt5)
gggagaauauaagcguuggcggagcgucgguuguagcacucugcgcgcccgcucuucugcugcuguuugucuacuuccuccugcuuccccgccgccgccgccgccaucaagcuuaccauggcccugagcaaggugaaacucaacgacacccugaauaaggaucagcuucuguccucuagcaaauacacaauccaaagauccacgggcgacucuauugauacccccaacuaugacguccagaagcacaucaauaaacucugcgggaugcugcuuauuacagaggaugcuaaccauaaguucaccggacugaucggcaugcucuacgccaugagccggcuggggcgcgaagacacaauuaagauccugagagaugcgggauaucacguuaaagcuaauggcguggacgugaccacacaucggcaggauaucaacgggaaggagaugaaauuugaaguccucacccuggccucccuuacgaccgagauucagaucaauauugaaaucgagucucgcaagagcuacaaaaagaugcugaaggagaugggagaaguggccccugaguauagacacgacuccccggauuguggcaugauuauccucugcauugcugcccugguuaucacaaaacuugcugccggcgaccggagcgggcugaccgcggugauccgcagagccaacaauguccucaagaacgaaaugaaacgguacaagggacugcugcccaaagauauugcuaauucuuucuaugagguguuugagaagcauccucacuucaucgacguuuuugugcacuucggcauugcccaauccagcacacgcgggggaucuagagucgaaggcaucuuugcuggacucuucaugaacgccuacggggcgggccaggugaugcugcgguggggcgugcuugccaaauccgucaagaauauuaugcuggggcaugcuagcguucaggccgagauggaacaggugguggaggucuacgaauaugcucaaaagcucggaggcgaggccggguuuuaccacauccugaacaaucccaaagccucucuucugucccucacccaguucccucauuuuagcuccgugguucugggaaacgcugcgggccuggggaucaugggagaguaucgcggcacgcccagaaaccaggaccucuacgaugccgcuaaggccuaugccgaacagcugaaagagaauggcgugauuaacuacucuguccuugaccugacagcugaggaacucgaagccaucaagcaccaacugaauccuaaagauaacgacguggagcuuugaggacuaguguccaccugucccuccugggcugcuggauugucucguuuuccugccaaauaaacaggaucagcgcuuuacagaucuaaaaaaaaaaaaaaaaaaaaaaaaaaaaaaaaaaaaaaaaaaaaaaaaaaaaaaaaaaaaaaaaugcaucccccccccccccccccccccccccccccccaaaggcucuuuucagagccaccagaauu

SEQ ID NO: 10309 - RNA, 1505 nt, Artificial Sequence
  mRNA product Design e-1 comprising derived and/or modified sequence from HRSV(A2)__P03418.1__N (opt6)
gggagaauauaagcguuggcggagcgucgguuguagcacucugcgcgcccgcucuucugcugcuguuugucuacuuccuccugcuuccccgccgccgccgccgccaucaagcuuaccauggcacuaagcaaagucaaauuaaacgacacauuaaacaaagaccaacucuuaucaucaucaaaauacacaauacaaagaagcaccggagacaguaucgacacaccaaacuaugacguccaaaaacauauaaauaaauuaugcggcaugcucuuaaucacagaagacgccaaccauaaauuuacaggauuaauaggaauguuauaugcaaugucacgacuagguagagaagacacaauaaaaauacuaagagacgcaggcuaucacguaaaagcaaauggaguagacguaaccacacacagacaagacauaaauggaaaagaaaugaaauuugaaguauuaacacuagcaucacuaacaacagaaauacaaaucaacauagaaauagaaucaagaaaaagcuacaaaaaaauguuaaaagaaaugggagaagucgcaccagaauauagacaugauucaccagacugcggaaugauaauacuaugcauagcagcccuaguaauuacaaaacuagcagcaggagacagaagcggauuaacagcaguaauaagaagagcaaacaacguacuaaaaaacgaaaugaaaagauauaaaggauuauuaccaaaagacauagcaaacucauucuaugaaguauucgaaaaacacccccacuuuauagacgucuucguacacuucggaauagcccaaucauccacaagaggaggaucaagagucgaaggaauauucgcaggauuauucaugaacgcauauggcgcaggacaaguaaugcuaagauggggaguacuagcaaaauccgucaaaaacauaaugcuaggacacgcaucaguucaagcagaaauggaacaaguaguagaaguauacgaauacgcccaaaaacuaggaggagaagcaggauucuaccacauacuaaauaauccaaaagcaucacuacuaagccuaacccaauuuccccacuucucaaguguaguauuaggaaaugcagcuggacuaggaauaaugggagaauacagaggaacaccaagaaaccaagacuuauacgacgcagcaaaagcauacgcagagcaacuuaaagaaaacggaguaauaaacuauagcguacuagacuuaacagcagaagaacuggaagcaauaaaacaucaauuaaacccgaaagacaaugacguagaauuauaaggacuaguguccaccugucccuccugggcugcuggauugucucguuuuccugccaaauaaacaggaucagcgcuuuacagaucuaaaaaaaaaaaaaaaaaaaaaaaaaaaaaaaaaaaaaaaaaaaaaaaaaaaaaaaaaaaaaaaaugcaucccccccccccccccccccccccccccccccaaaggcucuuuucagagccaccagaauu

SEQ ID NO: 10310 - RNA, 1505 nt, Artificial Sequence
  mRNA product Design e-1 comprising derived and/or modified sequence from HRSV(A2)__P03418.1__N (opt11)
gggagaauauaagcguuggcggagcgucgguuguagcacucugcgcgcccgcucuucugcugcuguuugucuacuuccuccugcuuccccgccgccgccgccgccaucaagcuuaccauggcacucucgaaaguaaaacucaacgacacccucaacaaagaccaacuccuuuccagcuccaaauacaccauccaacgauccaccggagacuccaucgacacgcccaacuacgacguccagaaacacaucaacaagcucugcggaaugcuacuaaucaccgaggacgccaaccacaaauucacaggacuuauagggaugcucuacgccaugucccgccucggacgcgaagacacaauaaaaauccuacgagacgccggcuaccacguaaaggcaaacggcgucgacgucaccacacacagacaagacaucaacggaaaggaaaugaaauucgaaguccucacccucgccagccuaaccaccgagauccaaaucaacaucgaaaucgaaucacgcaaauccuacaagaaaaugcucaaagaaaugggagaagucgcccccgaauaccgucacgacucgcccgacugcggcaugauaauccuaugcaucgccgcacucgucauaaccaaacucgccgccggugaccgaucaggacugacagcagucauccgccgagcaaacaacgugcucaaaaacgaaaugaaacgcuacaaaggccuacuccccaaagacaucgccaacuccuucuacgaagucuucgaaaaacacccacacuucaucgacgucuucguccacuucggcaucgcacaaucaucaaccagaggcggcagccgcguugaaggcaucuucgcaggacucuuuaugaacgccuacggcgccggccaagucaugcuccgcuggggcguccuggcaaaaagcgucaaaaacaucaugcuaggccacgcuagcguccaagccgaaauggaacaagucgucgaaguuuacgaguacgcacaaaaacucggcggcgaagcaggcuucuaccacauccuaaacaaccccaaagccucccugcuaucacucacccaauucccccacuucuccagcgucguccucggcaacgccgcaggacuaggcaucaugggagaauaccgcgggacaccgcgcaaccaagaccucuacgacgccgccaaagccuacgccgaacaacucaaagaaaacggcgucauaaacuacucaguccucgaccucaccgccgaagaacucgaagccaucaaacaccaacucaacccaaaagacaacgacgucgaauuauaaggacuaguguccaccugucccuccugggcugcuggauugucucguuuuccugccaaauaaacaggaucagcgcuuuacagaucuaaaaaaaaaaaaaaaaaaaaaaaaaaaaaaaaaaaaaaaaaaaaaaaaaaaaaaaaaaaaaaaaugcaucccccccccccccccccccccccccccccccaaaggcucuuuucagagccaccagaauu

SEQ ID NO: 10311 - RNA, 1487 nt, Artificial Sequence
  mRNA product Design e-2 comprising derived and/or modified sequence from HRSV(A2)__P03418.1__N (wt)
gggagacccgugacccggaaguuguacggcuacgcgacuuucccucccacaaacccucgcgcccuuccuuuccuacuugggcccggcagaaagcuuaccauggcucuuagcaaagucaaguugaaugauacacucaacaaagaucaacuucugucauccagcaaauacaccauccaacggagcacaggagauaguauugauacuccuaauuaugaugugcagaaacacaucaauaaguuauguggcauguuauuaaucacagaagaugcuaaucauaaauucacuggguuaauagguauguuauaugcgaugucuagguuaggaagagaagacaccauaaaaauacucagagaugcgggauaucauguaaaagcaaauggaguagauguaacaacacaucgucaagacauuaauggaaaagaaaugaaauuugaaguguuaacauuggcaagcuuaacaacugaaauucaaaucaacauugagauagaaucuagaaaauccuacaaaaaaaugcuaaaagaaaugggagagguagcuccagaauacaggcaugacucuccugauugugggaugauaauauuauguauagcagcauuaguaauaacuaaauuagcagcaggggacagaucuggucuuacagccgugauuaggagagcuaauaauguccuaaaaaaugaaaugaaacguuacaaaggcuuacuacccaaggacauagccaacagcuucuaugaaguguuugaaaaacauccccacuuuauagauguuuuuguucauuuugguauagcacaaucuucuaccagagguggcaguagaguugaagggauuuuugcaggauuguuuaugaaugccuauggugcagggcaagugauguuacgguggggagucuuagcaaaaucaguuaaaaauauuauguuaggacaugcuagugugcaagcagaaauggaacaaguuguugagguuuaugaauaugcccaaaaauuggguggugaagcaggauucuaccauauauugaacaacccaaaagcaucauuauuaucuuugacucaauuuccucacuucuccaguguaguauuaggcaaugcugcuggccuaggcauaaugggagaguacagagguacaccgaggaaucaagaucuauaugaugcagcaaaggcauaugcugaacaacucaaagaaaauggugugauuaacuacaguguacuagacuugacagcagaagaacuagaggcuaucaaacaucagcuuaauccaaaagauaaugauguagagcuuugaggacuaguguccaccugucccuccugggcugcuggauugucucguuuuccugccaaauaaacaggaucagcgcuuuacagaucuaaaaaaaaaaaaaaaaaaaaaaaaaaaaaaaaaaaaaaaaaaaaaaaaaaaaaaaaaaaaaaaaugcaucccccccccccccccccccccccccccccccaaaggcucuuuucagagccaccagaauu

SEQ ID NO: 10312 - RNA, 1487 nt, Artificial Sequence
  mRNA product Design e-2 comprising derived and/or modified sequence from HRSV(A2)__P03418.1__N (opt1)
gggagacccgugacccggaaguuguacggcuacgcgacuuucccucccacaaacccucgcgcccuuccuuuccuacuugggcccggcagaaagcuuaccauggcccugagcaaggugaagcucaacgacacccugaacaaggaccagcugcucuccagcuccaaguacaccauccagcgcagcaccggcgacuccaucgacacccccaacuacgacguccagaagcacaucaacaagcugugcgggaugcugcucaucaccgaggacgccaaccacaaguucaccggccugaucgggaugcuguacgcgaugagccggcucggccgcgaggacacgaucaagauccugcgggacgccggguaccacgugaaggccaacggcguggacgucaccacccaccgccaggacaucaacggcaaggagaugaaguucgaggugcugacccucgccucccugacgaccgagauccagaucaacaucgagaucgagagccggaaguccuacaagaagaugcugaaggagaugggggagguggccccggaguaccgccacgacagccccgacugcggcaugaucauccucugcaucgcggcccuggucaucaccaagcuggccgccggggaccgguccggccucaccgcggugauccgccgggccaacaacgugcugaagaacgagaugaagcgcuacaaggggcugcuccccaaggacaucgccaacagcuucuacgaggucuucgagaagcacccccacuucaucgacguguucgugcacuucggcaucgcccaguccagcacgcggggcgggucccgcgucgagggcaucuucgccgggcuguucaugaacgcguacggcgccggccaggugaugcugcgguggggcgugcucgccaagagcgucaagaacaucaugcuggggcacgccuccgugcaggccgagauggagcaggucguggagguguacgaguacgcgcagaagcucgggggcgaggccggguucuaccacauccugaacaacccgaaggccagccugcugucccucacccaguucccccacuucagcagcgugguccugggcaacgccgccggccuggggaucaugggcgaguaccgcgggacgccccggaaccaggaccucuacgacgcggccaaggccuacgccgagcagcugaaggagaacggcgugaucaacuacuccgugcuggaccucaccgccgaggagcuggaggcgaucaagcaccagcugaaccccaaggacaacgacgucgagcucugaggacuaguguccaccugucccuccugggcugcuggauugucucguuuuccugccaaauaaacaggaucagcgcuuuacagaucuaaaaaaaaaaaaaaaaaaaaaaaaaaaaaaaaaaaaaaaaaaaaaaaaaaaaaaaaaaaaaaaaugcaucccccccccccccccccccccccccccccccaaaggcucuuuucagagccaccagaauu

SEQ ID NO: 10313 - RNA, 1487 nt, Artificial Sequence
  mRNA product Design e-2 comprising derived and/or modified sequence from HRSV(A2)__P03418.1__N (opt2)
gggagacccgugacccggaaguuguacggcuacgcgacuuucccucccacaaacccucgcgcccuuccuuuccuacuugggcccggcagaaagcuuaccauggcccucuccaaggucaagcucaacgacacccucaacaaggaccagcuccucuccuccuccaaguacaccauccagcgcuccaccggcgacuccaucgacacccccaacuacgacguccagaagcacaucaacaagcucugcggcaugcuccucaucaccgaggacgccaaccacaaguucaccggccucaucggcaugcucuacgccaugucccgccucggccgcgaggacaccaucaagauccuccgcgacgccggcuaccacgucaaggccaacggcgucgacgucaccacccaccgccaggacaucaacggcaaggagaugaaguucgagguccucacccucgccucccucaccaccgagauccagaucaacaucgagaucgagucccgcaaguccuacaagaagaugcucaaggagaugggcgaggucgcccccgaguaccgccacgacucccccgacugcggcaugaucauccucugcaucgccgcccucgucaucaccaagcucgccgccggcgaccgcuccggccucaccgccgucauccgccgcgccaacaacguccucaagaacgagaugaagcgcuacaagggccuccuccccaaggacaucgccaacuccuucuacgaggucuucgagaagcacccccacuucaucgacgucuucguccacuucggcaucgcccaguccuccacccgcggcggcucccgcgucgagggcaucuucgccggccucuucaugaacgccuacggcgccggccaggucaugcuccgcuggggcguccucgccaaguccgucaagaacaucaugcucggccacgccuccguccaggccgagauggagcaggucgucgaggucuacgaguacgcccagaagcucggcggcgaggccggcuucuaccacauccucaacaaccccaaggccucccuccucucccucacccaguucccccacuucuccuccgucguccucggcaacgccgccggccucggcaucaugggcgaguaccgcggcaccccccgcaaccaggaccucuacgacgccgccaaggccuacgccgagcagcucaaggagaacggcgucaucaacuacuccguccucgaccucaccgccgaggagcucgaggccaucaagcaccagcucaaccccaaggacaacgacgucgagcucugaggacuaguguccaccugucccuccugggcugcuggauugucucguuuuccugccaaauaaacaggaucagcgcuuuacagaucuaaaaaaaaaaaaaaaaaaaaaaaaaaaaaaaaaaaaaaaaaaaaaaaaaaaaaaaaaaaaaaaaugcaucccccccccccccccccccccccccccccccaaaggcucuuuucagagccaccagaauu

SEQ ID NO: 10314 - RNA, 1487 nt, Artificial Sequence
  mRNA product Design e-2 comprising derived and/or modified sequence from HRSV(A2)__P03418.1__N (opt3)
gggagacccgugacccggaaguuguacggcuacgcgacuuucccucccacaaacccucgcgcccuuccuuuccuacuugggcccggcagaaagcuuaccauggcccugagcaaggugaaacucaacgacacccuuaauaaggaucagcuguuguccucuucaaaauacacaauccaaagaaguacuggcgacagcauugauacgcccaacuaugacguccagaagcacauaaauaaauuaugcgggaugcugcuaaucaccgaggaugcuaaccauaaguucacaggacucauugguaugcuguacgcaauguccaggcuuggccgggaagacacuaucaagauucugcgcgaugccggguaucacguuaaagcgaauggaguggacguaaccacacaucgacaggauaucaacggcaaggagaugaaauuugaaguguugacccucgcuucucugacuacagagauacagaucaauauugaaaucgagucgcguaagucauacaaaaagaugcugaaggagaugggugaagucgccccugaguauagacacgacagcccagauugugggaugauuauccucugcauagcagccuuagugauuaccaaacuggcugcaggagacaggaguggccuuacggccguuauccggcgcgcuaacaauguguugaagaacgaaaugaaaagauacaagggccugcuaccgaaagauauugccaauuccuucuaugaggucuuugagaagcauccccacuucaucgacguguuuguacacuucgggaucgcgcaaucuagcacuaggggagguucccggguugaaggcauuuuugcaggacucuucaugaacgccuacggggcuggccaggugaugcugcgcugggguguccuugccaaaucagugaagaauauaaugcuggggcaugcaagugugcaggcugagauggaacaggucguugagguguacgaauaugcccaaaaguugggaggcgaggcgggcuuuuaccacauccucaacaauccuaaagccagccuguuaucucugacccaguucccacauuuuuccucaguagugcucgggaacgcagcuggacuugguauuaugggcgaguaucgagggacacccagaaaccaggaccuguacgaugccgcuaaggccuaugcagaacaguugaaagagaauggagucaucaacuacagcgugcuagaccugacugccgaggaacucgaagcuauaaagcaccaacugaauccuaaagauaacgacguugagcuuugaggacuaguguccaccugucccuccugggcugcuggauugucucguuuuccugccaaauaaacaggaucagcgcuuuacagaucuaaaaaaaaaaaaaaaaaaaaaaaaaaaaaaaaaaaaaaaaaaaaaaaaaaaaaaaaaaaaaaaaugcaucccccccccccccccccccccccccccccccaaaggcucuuuucagagccaccagaauu

SEQ ID NO: 10315 - RNA, 1487 nt, Artificial Sequence
  mRNA product Design e-2 comprising derived and/or modified sequence from HRSV(A2)__P03418.1__N (opt4)
gggagacccgugacccggaaguuguacggcuacgcgacuuucccucccacaaacccucgcgcccuuccuuuccuacuugggcccggcagaaagcuuaccauggcccugagcaaggugaagcugaacgacacccugaacaaggaccagcugcugagcagcagcaaguacaccauccagagaagcaccggcgacagcaucgacacccccaacuacgacgugcagaagcacaucaacaagcugugcggcaugcugcugaucaccgaggacgccaaccacaaguucaccggccugaucggcaugcuguacgccaugagcagacugggcagagaggacaccaucaagauccugagagacgccggcuaccacgugaaggccaacggcguggacgugaccacccacagacaggacaucaacggcaaggagaugaaguucgaggugcugacccuggccagccugaccaccgagauccagaucaacaucgagaucgagagcagaaagagcuacaagaagaugcugaaggagaugggcgagguggcccccgaguacagacacgacagccccgacugcggcaugaucauccugugcaucgccgcccuggugaucaccaagcuggccgccggcgacagaagcggccugaccgccgugaucagaagagccaacaacgugcugaagaacgagaugaagagauacaagggccugcugcccaaggacaucgccaacagcuucuacgagguguucgagaagcacccccacuucaucgacguguucgugcacuucggcaucgcccagagcagcaccagaggcggcagcagaguggagggcaucuucgccggccuguucaugaacgccuacggcgccggccaggugaugcugagauggggcgugcuggccaagagcgugaagaacaucaugcugggccacgccagcgugcaggccgagauggagcaggugguggagguguacgaguacgcccagaagcugggcggcgaggccggcuucuaccacauccugaacaaccccaaggccagccugcugagccugacccaguucccccacuucagcagcguggugcugggcaacgccgccggccugggcaucaugggcgaguacagaggcacccccagaaaccaggaccuguacgacgccgccaaggccuacgccgagcagcugaaggagaacggcgugaucaacuacagcgugcuggaccugaccgccgaggagcuggaggccaucaagcaccagcugaaccccaaggacaacgacguggagcugugaggacuaguguccaccugucccuccugggcugcuggauugucucguuuuccugccaaauaaacaggaucagcgcuuuacagaucuaaaaaaaaaaaaaaaaaaaaaaaaaaaaaaaaaaaaaaaaaaaaaaaaaaaaaaaaaaaaaaaaugcaucccccccccccccccccccccccccccccccaaaggcucuuuucagagccaccagaauu

SEQ ID NO: 10316 - RNA, 1487 nt, Artificial Sequence
  mRNA product Design e-2 comprising derived and/or modified sequence from HRSV(A2)__P03418.1__N (opt5)
gggagacccgugacccggaaguuguacggcuacgcgacuuucccucccacaaacccucgcgcccuuccuuuccuacuugggcccggcagaaagcuuaccauggcccugagcaaggugaaacucaacgacacccugaauaaggaucagcuucuguccucuagcaaauacacaauccaaagauccacgggcgacucuauugauacccccaacuaugacguccagaagcacaucaauaaacucugcgggaugcugcuuauuacagaggaugcuaaccauaaguucaccggacugaucggcaugcucuacgccaugagccggcuggggcgcgaagacacaauuaagauccugagagaugcgggauaucacguuaaagcuaauggcguggacgugaccacacaucggcaggauaucaacgggaaggagaugaaauuugaaguccucacccuggccucccuuacgaccgagauucagaucaauauugaaaucgagucucgcaagagcuacaaaaagaugcugaaggagaugggagaaguggccccugaguauagacacgacuccccggauuguggcaugauuauccucugcauugcugcccugguuaucacaaaacuugcugccggcgaccggagcgggcugaccgcggugauccgcagagccaacaauguccucaagaacgaaaugaaacgguacaagggacugcugcccaaagauauugcuaauucuuucuaugagguguuugagaagcauccucacuucaucgacguuuuugugcacuucggcauugcccaauccagcacacgcgggggaucuagagucgaaggcaucuuugcuggacucuucaugaacgccuacggggcgggccaggugaugcugcgguggggcgugcuugccaaauccgucaagaauauuaugcuggggcaugcuagcguucaggccgagauggaacaggugguggaggucuacgaauaugcucaaaagcucggaggcgaggccggguuuuaccacauccugaacaaucccaaagccucucuucugucccucacccaguucccucauuuuagcuccgugguucugggaaacgcugcgggccuggggaucaugggagaguaucgcggcacgcccagaaaccaggaccucuacgaugccgcuaaggccuaugccgaacagcugaaagagaauggcgugauuaacuacucuguccuugaccugacagcugaggaacucgaagccaucaagcaccaacugaauccuaaagauaacgacguggagcuuugaggacuaguguccaccugucccuccugggcugcuggauugucucguuuuccugccaaauaaacaggaucagcgcuuuacagaucuaaaaaaaaaaaaaaaaaaaaaaaaaaaaaaaaaaaaaaaaaaaaaaaaaaaaaaaaaaaaaaaaugcaucccccccccccccccccccccccccccccccaaaggcucuuuucagagccaccagaauu

SEQ ID NO: 10317 - RNA, 1487 nt, Artificial Sequence
  mRNA product Design e-2 comprising derived and/or modified sequence from HRSV(A2)__P03418.1__N (opt6)
gggagacccgugacccggaaguuguacggcuacgcgacuuucccucccacaaacccucgcgcccuuccuuuccuacuugggcccggcagaaagcuuaccauggcacuaagcaaagucaaauuaaacgacacauuaaacaaagaccaacucuuaucaucaucaaaauacacaauacaaagaagcaccggagacaguaucgacacaccaaacuaugacguccaaaaacauauaaauaaauuaugcggcaugcucuuaaucacagaagacgccaaccauaaauuuacaggauuaauaggaauguuauaugcaaugucacgacuagguagagaagacacaauaaaaauacuaagagacgcaggcuaucacguaaaagcaaauggaguagacguaaccacacacagacaagacauaaauggaaaagaaaugaaauuugaaguauuaacacuagcaucacuaacaacagaaauacaaaucaacauagaaauagaaucaagaaaaagcuacaaaaaaauguuaaaagaaaugggagaagucgcaccagaauauagacaugauucaccagacugcggaaugauaauacuaugcauagcagcccuaguaauuacaaaacuagcagcaggagacagaagcggauuaacagcaguaauaagaagagcaaacaacguacuaaaaaacgaaaugaaaagauauaaaggauuauuaccaaaagacauagcaaacucauucuaugaaguauucgaaaaacacccccacuuuauagacgucuucguacacuucggaauagcccaaucauccacaagaggaggaucaagagucgaaggaauauucgcaggauuauucaugaacgcauauggcgcaggacaaguaaugcuaagauggggaguacuagcaaaauccgucaaaaacauaaugcuaggacacgcaucaguucaagcagaaauggaacaaguaguagaaguauacgaauacgcccaaaaacuaggaggagaagcaggauucuaccacauacuaaauaauccaaaagcaucacuacuaagccuaacccaauuuccccacuucucaaguguaguauuaggaaaugcagcuggacuaggaauaaugggagaauacagaggaacaccaagaaaccaagacuuauacgacgcagcaaaagcauacgcagagcaacuuaaagaaaacggaguaauaaacuauagcguacuagacuuaacagcagaagaacuggaagcaauaaaacaucaauuaaacccgaaagacaaugacguagaauuauaaggacuaguguccaccugucccuccugggcugcuggauugucucguuuuccugccaaauaaacaggaucagcgcuuuacagaucuaaaaaaaaaaaaaaaaaaaaaaaaaaaaaaaaaaaaaaaaaaaaaaaaaaaaaaaaaaaaaaaaugcaucccccccccccccccccccccccccccccccaaaggcucuuuucagagccaccagaauu

SEQ ID NO: 10318 - RNA, 1487 nt, Artificial Sequence
  mRNA product Design e-2 comprising derived and/or modified sequence from HRSV(A2)__P03418.1__N (opt11)
gggagacccgugacccggaaguuguacggcuacgcgacuuucccucccacaaacccucgcgcccuuccuuuccuacuugggcccggcagaaagcuuaccauggcacucucgaaaguaaaacucaacgacacccucaacaaagaccaacuccuuuccagcuccaaauacaccauccaacgauccaccggagacuccaucgacacgcccaacuacgacguccagaaacacaucaacaagcucugcggaaugcuacuaaucaccgaggacgccaaccacaaauucacaggacuuauagggaugcucuacgccaugucccgccucggacgcgaagacacaauaaaaauccuacgagacgccggcuaccacguaaaggcaaacggcgucgacgucaccacacacagacaagacaucaacggaaaggaaaugaaauucgaaguccucacccucgccagccuaaccaccgagauccaaaucaacaucgaaaucgaaucacgcaaauccuacaagaaaaugcucaaagaaaugggagaagucgcccccgaauaccgucacgacucgcccgacugcggcaugauaauccuaugcaucgccgcacucgucauaaccaaacucgccgccggugaccgaucaggacugacagcagucauccgccgagcaaacaacgugcucaaaaacgaaaugaaacgcuacaaaggccuacuccccaaagacaucgccaacuccuucuacgaagucuucgaaaaacacccacacuucaucgacgucuucguccacuucggcaucgcacaaucaucaaccagaggcggcagccgcguugaaggcaucuucgcaggacucuuuaugaacgccuacggcgccggccaagucaugcuccgcuggggcguccuggcaaaaagcgucaaaaacaucaugcuaggccacgcuagcguccaagccgaaauggaacaagucgucgaaguuuacgaguacgcacaaaaacucggcggcgaagcaggcuucuaccacauccuaaacaaccccaaagccucccugcuaucacucacccaauucccccacuucuccagcgucguccucggcaacgccgcaggacuaggcaucaugggagaauaccgcgggacaccgcgcaaccaagaccucuacgacgccgccaaagccuacgccgaacaacucaaagaaaacggcgucauaaacuacucaguccucgaccucaccgccgaagaacucgaagccaucaaacaccaacucaacccaaaagacaacgacgucgaauuauaaggacuaguguccaccugucccuccugggcugcuggauugucucguuuuccugccaaauaaacaggaucagcgcuuuacagaucuaaaaaaaaaaaaaaaaaaaaaaaaaaaaaaaaaaaaaaaaaaaaaaaaaaaaaaaaaaaaaaaaugcaucccccccccccccccccccccccccccccccaaaggcucuuuucagagccaccagaauu

SEQ ID NO: 10319 - RNA, 1457 nt, Artificial Sequence
  mRNA product Design e-3 comprising derived and/or modified sequence from HRSV(A2)__P03418.1__N (wt)
gggagacuuucccauucuguagcagaauuugguguugccuguggucuuggucccgcggagaagcuuaccauggcucuuagcaaagucaaguugaaugauacacucaacaaagaucaacuucugucauccagcaaauacaccauccaacggagcacaggagauaguauugauacuccuaauuaugaugugcagaaacacaucaauaaguuauguggcauguuauuaaucacagaagaugcuaaucauaaauucacuggguuaauagguauguuauaugcgaugucuagguuaggaagagaagacaccauaaaaauacucagagaugcgggauaucauguaaaagcaaauggaguagauguaacaacacaucgucaagacauuaauggaaaagaaaugaaauuugaaguguuaacauuggcaagcuuaacaacugaaauucaaaucaacauugagauagaaucuagaaaauccuacaaaaaaaugcuaaaagaaaugggagagguagcuccagaauacaggcaugacucuccugauugugggaugauaauauuauguauagcagcauuaguaauaacuaaauuagcagcaggggacagaucuggucuuacagccgugauuaggagagcuaauaauguccuaaaaaaugaaaugaaacguuacaaaggcuuacuacccaaggacauagccaacagcuucuaugaaguguuugaaaaacauccccacuuuauagauguuuuuguucauuuugguauagcacaaucuucuaccagagguggcaguagaguugaagggauuuuugcaggauuguuuaugaaugccuauggugcagggcaagugauguuacgguggggagucuuagcaaaaucaguuaaaaauauuauguuaggacaugcuagugugcaagcagaaauggaacaaguuguugagguuuaugaauaugcccaaaaauuggguggugaagcaggauucuaccauauauugaacaacccaaaagcaucauuauuaucuuugacucaauuuccucacuucuccaguguaguauuaggcaaugcugcuggccuaggcauaaugggagaguacagagguacaccgaggaaucaagaucuauaugaugcagcaaaggcauaugcugaacaacucaaagaaaauggugugauuaacuacaguguacuagacuugacagcagaagaacuagaggcuaucaaacaucagcuuaauccaaaagauaaugauguagagcuuugaggacuaguguccaccugucccuccugggcugcuggauugucucguuuuccugccaaauaaacaggaucagcgcuuuacagaucuaaaaaaaaaaaaaaaaaaaaaaaaaaaaaaaaaaaaaaaaaaaaaaaaaaaaaaaaaaaaaaaaugcaucccccccccccccccccccccccccccccccaaaggcucuuuucagagccaccagaauu

SEQ ID NO: 10320 - RNA, 1457 nt, Artificial Sequence
  mRNA product Design e-3 comprising derived and/or modified sequence from HRSV(A2)__P03418.1__N (opt1)
gggagacuuucccauucuguagcagaauuugguguugccuguggucuuggucccgcggagaagcuuaccauggcccugagcaaggugaagcucaacgacacccugaacaaggaccagcugcucuccagcuccaaguacaccauccagcgcagcaccggcgacuccaucgacacccccaacuacgacguccagaagcacaucaacaagcugugcgggaugcugcucaucaccgaggacgccaaccacaaguucaccggccugaucgggaugcuguacgcgaugagccggcucggccgcgaggacacgaucaagauccugcgggacgccggguaccacgugaaggccaacggcguggacgucaccacccaccgccaggacaucaacggcaaggagaugaaguucgaggugcugacccucgccucccugacgaccgagauccagaucaacaucgagaucgagagccggaaguccuacaagaagaugcugaaggagaugggggagguggccccggaguaccgccacgacagccccgacugcggcaugaucauccucugcaucgcggcccuggucaucaccaagcuggccgccggggaccgguccggccucaccgcggugauccgccgggccaacaacgugcugaagaacgagaugaagcgcuacaaggggcugcuccccaaggacaucgccaacagcuucuacgaggucuucgagaagcacccccacuucaucgacguguucgugcacuucggcaucgcccaguccagcacgcggggcgggucccgcgucgagggcaucuucgccgggcuguucaugaacgcguacggcgccggccaggugaugcugcgguggggcgugcucgccaagagcgucaagaacaucaugcuggggcacgccuccgugcaggccgagauggagcaggucguggagguguacgaguacgcgcagaagcucgggggcgaggccggguucuaccacauccugaacaacccgaaggccagccugcugucccucacccaguucccccacuucagcagcgugguccugggcaacgccgccggccuggggaucaugggcgaguaccgcgggacgccccggaaccaggaccucuacgacgcggccaaggccuacgccgagcagcugaaggagaacggcgugaucaacuacuccgugcuggaccucaccgccgaggagcuggaggcgaucaagcaccagcugaaccccaaggacaacgacgucgagcucugaggacuaguguccaccugucccuccugggcugcuggauugucucguuuuccugccaaauaaacaggaucagcgcuuuacagaucuaaaaaaaaaaaaaaaaaaaaaaaaaaaaaaaaaaaaaaaaaaaaaaaaaaaaaaaaaaaaaaaaugcaucccccccccccccccccccccccccccccccaaaggcucuuuucagagccaccagaauu

SEQ ID NO: 10321 - RNA, 1457 nt, Artificial Sequence
  mRNA product Design e-3 comprising derived and/or modified sequence from HRSV(A2)__P03418.1__N (opt2)
gggagacuuucccauucuguagcagaauuugguguugccuguggucuuggucccgcggagaagcuuaccauggcccucuccaaggucaagcucaacgacacccucaacaaggaccagcuccucuccuccuccaaguacaccauccagcgcuccaccggcgacuccaucgacacccccaacuacgacguccagaagcacaucaacaagcucugcggcaugcuccucaucaccgaggacgccaaccacaaguucaccggccucaucggcaugcucuacgccaugucccgccucggccgcgaggacaccaucaagauccuccgcgacgccggcuaccacgucaaggccaacggcgucgacgucaccacccaccgccaggacaucaacggcaaggagaugaaguucgagguccucacccucgccucccucaccaccgagauccagaucaacaucgagaucgagucccgcaaguccuacaagaagaugcucaaggagaugggcgaggucgcccccgaguaccgccacgacucccccgacugcggcaugaucauccucugcaucgccgcccucgucaucaccaagcucgccgccggcgaccgcuccggccucaccgccgucauccgccgcgccaacaacguccucaagaacgagaugaagcgcuacaagggccuccuccccaaggacaucgccaacuccuucuacgaggucuucgagaagcacccccacuucaucgacgucuucguccacuucggcaucgcccaguccuccacccgcggcggcucccgcgucgagggcaucuucgccggccucuucaugaacgccuacggcgccggccaggucaugcuccgcuggggcguccucgccaaguccgucaagaacaucaugcucggccacgccuccguccaggccgagauggagcaggucgucgaggucuacgaguacgcccagaagcucggcggcgaggccggcuucuaccacauccucaacaaccccaaggccucccuccucucccucacccaguucccccacuucuccuccgucguccucggcaacgccgccggccucggcaucaugggcgaguaccgcggcaccccccgcaaccaggaccucuacgacgccgccaaggccuacgccgagcagcucaaggagaacggcgucaucaacuacuccguccucgaccucaccgccgaggagcucgaggccaucaagcaccagcucaaccccaaggacaacgacgucgagcucugaggacuaguguccaccugucccuccugggcugcuggauugucucguuuuccugccaaauaaacaggaucagcgcuuuacagaucuaaaaaaaaaaaaaaaaaaaaaaaaaaaaaaaaaaaaaaaaaaaaaaaaaaaaaaaaaaaaaaaaugcaucccccccccccccccccccccccccccccccaaaggcucuuuucagagccaccagaauu

SEQ ID NO: 10322 - RNA, 1457 nt, Artificial Sequence
  mRNA product Design e-3 comprising derived and/or modified sequence from HRSV(A2)__P03418.1__N (opt3)
gggagacuuucccauucuguagcagaauuugguguugccuguggucuuggucccgcggagaagcuuaccauggcccugagcaaggugaaacucaacgacacccuuaauaaggaucagcuguuguccucuucaaaauacacaauccaaagaaguacuggcgacagcauugauacgcccaacuaugacguccagaagcacauaaauaaauuaugcgggaugcugcuaaucaccgaggaugcuaaccauaaguucacaggacucauugguaugcuguacgcaauguccaggcuuggccgggaagacacuaucaagauucugcgcgaugccggguaucacguuaaagcgaauggaguggacguaaccacacaucgacaggauaucaacggcaaggagaugaaauuugaaguguugacccucgcuucucugacuacagagauacagaucaauauugaaaucgagucgcguaagucauacaaaaagaugcugaaggagaugggugaagucgccccugaguauagacacgacagcccagauugugggaugauuauccucugcauagcagccuuagugauuaccaaacuggcugcaggagacaggaguggccuuacggccguuauccggcgcgcuaacaauguguugaagaacgaaaugaaaagauacaagggccugcuaccgaaagauauugccaauuccuucuaugaggucuuugagaagcauccccacuucaucgacguguuuguacacuucgggaucgcgcaaucuagcacuaggggagguucccggguugaaggcauuuuugcaggacucuucaugaacgccuacggggcuggccaggugaugcugcgcugggguguccuugccaaaucagugaagaauauaaugcuggggcaugcaagugugcaggcugagauggaacaggucguugagguguacgaauaugcccaaaaguugggaggcgaggcgggcuuuuaccacauccucaacaauccuaaagccagccuguuaucucugacccaguucccacauuuuuccucaguagugcucgggaacgcagcuggacuugguauuaugggcgaguaucgagggacacccagaaaccaggaccuguacgaugccgcuaaggccuaugcagaacaguugaaagagaauggagucaucaacuacagcgugcuagaccugacugccgaggaacucgaagcuauaaagcaccaacugaauccuaaagauaacgacguugagcuuugaggacuaguguccaccugucccuccugggcugcuggauugucucguuuuccugccaaauaaacaggaucagcgcuuuacagaucuaaaaaaaaaaaaaaaaaaaaaaaaaaaaaaaaaaaaaaaaaaaaaaaaaaaaaaaaaaaaaaaaugcaucccccccccccccccccccccccccccccccaaaggcucuuuucagagccaccagaauu

SEQ ID NO: 10323 - RNA, 1457 nt, Artificial Sequence
  mRNA product Design e-3 comprising derived and/or modified sequence from HRSV(A2)__P03418.1__N (opt4)
gggagacuuucccauucuguagcagaauuugguguugccuguggucuuggucccgcggagaagcuuaccauggcccugagcaaggugaagcugaacgacacccugaacaaggaccagcugcugagcagcagcaaguacaccauccagagaagcaccggcgacagcaucgacacccccaacuacgacgugcagaagcacaucaacaagcugugcggcaugcugcugaucaccgaggacgccaaccacaaguucaccggccugaucggcaugcuguacgccaugagcagacugggcagagaggacaccaucaagauccugagagacgccggcuaccacgugaaggccaacggcguggacgugaccacccacagacaggacaucaacggcaaggagaugaaguucgaggugcugacccuggccagccugaccaccgagauccagaucaacaucgagaucgagagcagaaagagcuacaagaagaugcugaaggagaugggcgagguggcccccgaguacagacacgacagccccgacugcggcaugaucauccugugcaucgccgcccuggugaucaccaagcuggccgccggcgacagaagcggccugaccgccgugaucagaagagccaacaacgugcugaagaacgagaugaagagauacaagggccugcugcccaaggacaucgccaacagcuucuacgagguguucgagaagcacccccacuucaucgacguguucgugcacuucggcaucgcccagagcagcaccagaggcggcagcagaguggagggcaucuucgccggccuguucaugaacgccuacggcgccggccaggugaugcugagauggggcgugcuggccaagagcgugaagaacaucaugcugggccacgccagcgugcaggccgagauggagcaggugguggagguguacgaguacgcccagaagcugggcggcgaggccggcuucuaccacauccugaacaaccccaaggccagccugcugagccugacccaguucccccacuucagcagcguggugcugggcaacgccgccggccugggcaucaugggcgaguacagaggcacccccagaaaccaggaccuguacgacgccgccaaggccuacgccgagcagcugaaggagaacggcgugaucaacuacagcgugcuggaccugaccgccgaggagcuggaggccaucaagcaccagcugaaccccaaggacaacgacguggagcugugaggacuaguguccaccugucccuccugggcugcuggauugucucguuuuccugccaaauaaacaggaucagcgcuuuacagaucuaaaaaaaaaaaaaaaaaaaaaaaaaaaaaaaaaaaaaaaaaaaaaaaaaaaaaaaaaaaaaaaaugcaucccccccccccccccccccccccccccccccaaaggcucuuuucagagccaccagaauu

SEQ ID NO: 10324 - RNA, 1457 nt, Artificial Sequence
  mRNA product Design e-3 comprising derived and/or modified sequence from HRSV(A2)__P03418.1__N (opt5)
gggagacuuucccauucuguagcagaauuugguguugccuguggucuuggucccgcggagaagcuuaccauggcccugagcaaggugaaacucaacgacacccugaauaaggaucagcuucuguccucuagcaaauacacaauccaaagauccacgggcgacucuauugauacccccaacuaugacguccagaagcacaucaauaaacucugcgggaugcugcuuauuacagaggaugcuaaccauaaguucaccggacugaucggcaugcucuacgccaugagccggcuggggcgcgaagacacaauuaagauccugagagaugcgggauaucacguuaaagcuaauggcguggacgugaccacacaucggcaggauaucaacgggaaggagaugaaauuugaaguccucacccuggccucccuuacgaccgagauucagaucaauauugaaaucgagucucgcaagagcuacaaaaagaugcugaaggagaugggagaaguggccccugaguauagacacgacuccccggauuguggcaugauuauccucugcauugcugcccugguuaucacaaaacuugcugccggcgaccggagcgggcugaccgcggugauccgcagagccaacaauguccucaagaacgaaaugaaacgguacaagggacugcugcccaaagauauugcuaauucuuucuaugagguguuugagaagcauccucacuucaucgacguuuuugugcacuucggcauugcccaauccagcacacgcgggggaucuagagucgaaggcaucuuugcuggacucuucaugaacgccuacggggcgggccaggugaugcugcgguggggcgugcuugccaaauccgucaagaauauuaugcuggggcaugcuagcguucaggccgagauggaacaggugguggaggucuacgaauaugcucaaaagcucggaggcgaggccggguuuuaccacauccugaacaaucccaaagccucucuucugucccucacccaguucccucauuuuagcuccgugguucugggaaacgcugcgggccuggggaucaugggagaguaucgcggcacgcccagaaaccaggaccucuacgaugccgcuaaggccuaugccgaacagcugaaagagaauggcgugauuaacuacucuguccuugaccugacagcugaggaacucgaagccaucaagcaccaacugaauccuaaagauaacgacguggagcuuugaggacuaguguccaccugucccuccugggcugcuggauugucucguuuuccugccaaauaaacaggaucagcgcuuuacagaucuaaaaaaaaaaaaaaaaaaaaaaaaaaaaaaaaaaaaaaaaaaaaaaaaaaaaaaaaaaaaaaaaugcaucccccccccccccccccccccccccccccccaaaggcucuuuucagagccaccagaauu

SEQ ID NO: 10325 - RNA, 1457 nt, Artificial Sequence
  mRNA product Design e-3 comprising derived and/or modified sequence from HRSV(A2)__P03418.1__N (opt6)
gggagacuuucccauucuguagcagaauuugguguugccuguggucuuggucccgcggagaagcuuaccauggcacuaagcaaagucaaauuaaacgacacauuaaacaaagaccaacucuuaucaucaucaaaauacacaauacaaagaagcaccggagacaguaucgacacaccaaacuaugacguccaaaaacauauaaauaaauuaugcggcaugcucuuaaucacagaagacgccaaccauaaauuuacaggauuaauaggaauguuauaugcaaugucacgacuagguagagaagacacaauaaaaauacuaagagacgcaggcuaucacguaaaagcaaauggaguagacguaaccacacacagacaagacauaaauggaaaagaaaugaaauuugaaguauuaacacuagcaucacuaacaacagaaauacaaaucaacauagaaauagaaucaagaaaaagcuacaaaaaaauguuaaaagaaaugggagaagucgcaccagaauauagacaugauucaccagacugcggaaugauaauacuaugcauagcagcccuaguaauuacaaaacuagcagcaggagacagaagcggauuaacagcaguaauaagaagagcaaacaacguacuaaaaaacgaaaugaaaagauauaaaggauuauuaccaaaagacauagcaaacucauucuaugaaguauucgaaaaacacccccacuuuauagacgucuucguacacuucggaauagcccaaucauccacaagaggaggaucaagagucgaaggaauauucgcaggauuauucaugaacgcauauggcgcaggacaaguaaugcuaagauggggaguacuagcaaaauccgucaaaaacauaaugcuaggacacgcaucaguucaagcagaaauggaacaaguaguagaaguauacgaauacgcccaaaaacuaggaggagaagcaggauucuaccacauacuaaauaauccaaaagcaucacuacuaagccuaacccaauuuccccacuucucaaguguaguauuaggaaaugcagcuggacuaggaauaaugggagaauacagaggaacaccaagaaaccaagacuuauacgacgcagcaaaagcauacgcagagcaacuuaaagaaaacggaguaauaaacuauagcguacuagacuuaacagcagaagaacuggaagcaauaaaacaucaauuaaacccgaaagacaaugacguagaauuauaaggacuaguguccaccugucccuccugggcugcuggauugucucguuuuccugccaaauaaacaggaucagcgcuuuacagaucuaaaaaaaaaaaaaaaaaaaaaaaaaaaaaaaaaaaaaaaaaaaaaaaaaaaaaaaaaaaaaaaaugcaucccccccccccccccccccccccccccccccaaaggcucuuuucagagccaccagaauu

SEQ ID NO: 10326 - RNA, 1457 nt, Artificial Sequence
  mRNA product Design e-3 comprising derived and/or modified sequence from HRSV(A2)__P03418.1__N (opt11)
gggagacuuucccauucuguagcagaauuugguguugccuguggucuuggucccgcggagaagcuuaccauggcacucucgaaaguaaaacucaacgacacccucaacaaagaccaacuccuuuccagcuccaaauacaccauccaacgauccaccggagacuccaucgacacgcccaacuacgacguccagaaacacaucaacaagcucugcggaaugcuacuaaucaccgaggacgccaaccacaaauucacaggacuuauagggaugcucuacgccaugucccgccucggacgcgaagacacaauaaaaauccuacgagacgccggcuaccacguaaaggcaaacggcgucgacgucaccacacacagacaagacaucaacggaaaggaaaugaaauucgaaguccucacccucgccagccuaaccaccgagauccaaaucaacaucgaaaucgaaucacgcaaauccuacaagaaaaugcucaaagaaaugggagaagucgcccccgaauaccgucacgacucgcccgacugcggcaugauaauccuaugcaucgccgcacucgucauaaccaaacucgccgccggugaccgaucaggacugacagcagucauccgccgagcaaacaacgugcucaaaaacgaaaugaaacgcuacaaaggccuacuccccaaagacaucgccaacuccuucuacgaagucuucgaaaaacacccacacuucaucgacgucuucguccacuucggcaucgcacaaucaucaaccagaggcggcagccgcguugaaggcaucuucgcaggacucuuuaugaacgccuacggcgccggccaagucaugcuccgcuggggcguccuggcaaaaagcgucaaaaacaucaugcuaggccacgcuagcguccaagccgaaauggaacaagucgucgaaguuuacgaguacgcacaaaaacucggcggcgaagcaggcuucuaccacauccuaaacaaccccaaagccucccugcuaucacucacccaauucccccacuucuccagcgucguccucggcaacgccgcaggacuaggcaucaugggagaauaccgcgggacaccgcgcaaccaagaccucuacgacgccgccaaagccuacgccgaacaacucaaagaaaacggcgucauaaacuacucaguccucgaccucaccgccgaagaacucgaagccaucaaacaccaacucaacccaaaagacaacgacgucgaauuauaaggacuaguguccaccugucccuccugggcugcuggauugucucguuuuccugccaaauaaacaggaucagcgcuuuacagaucuaaaaaaaaaaaaaaaaaaaaaaaaaaaaaaaaaaaaaaaaaaaaaaaaaaaaaaaaaaaaaaaaugcaucccccccccccccccccccccccccccccccaaaggcucuuuucagagccaccagaauu

SEQ ID NO: 10327 - RNA, 1511 nt, Artificial Sequence
  mRNA product Design e-4 comprising derived and/or modified sequence from HRSV(A2)__P03418.1__N (wt)
gggagacuccugucgggcggaaguaggaggaguagaguuuaaaaacaguacucuuuuuccgguucgggacguaguugaagcaacgacaagccggauaaccgcucuugagacaggaagcuuaccauggcucuuagcaaagucaaguugaaugauacacucaacaaagaucaacuucugucauccagcaaauacaccauccaacggagcacaggagauaguauugauacuccuaauuaugaugugcagaaacacaucaauaaguuauguggcauguuauuaaucacagaagaugcuaaucauaaauucacuggguuaauagguauguuauaugcgaugucuagguuaggaagagaagacaccauaaaaauacucagagaugcgggauaucauguaaaagcaaauggaguagauguaacaacacaucgucaagacauuaauggaaaagaaaugaaauuugaaguguuaacauuggcaagcuuaacaacugaaauucaaaucaacauugagauagaaucuagaaaauccuacaaaaaaaugcuaaaagaaaugggagagguagcuccagaauacaggcaugacucuccugauugugggaugauaauauuauguauagcagcauuaguaauaacuaaauuagcagcaggggacagaucuggucuuacagccgugauuaggagagcuaauaauguccuaaaaaaugaaaugaaacguuacaaaggcuuacuacccaaggacauagccaacagcuucuaugaaguguuugaaaaacauccccacuuuauagauguuuuuguucauuuugguauagcacaaucuucuaccagagguggcaguagaguugaagggauuuuugcaggauuguuuaugaaugccuauggugcagggcaagugauguuacgguggggagucuuagcaaaaucaguuaaaaauauuauguuaggacaugcuagugugcaagcagaaauggaacaaguuguugagguuuaugaauaugcccaaaaauuggguggugaagcaggauucuaccauauauugaacaacccaaaagcaucauuauuaucuuugacucaauuuccucacuucuccaguguaguauuaggcaaugcugcuggccuaggcauaaugggagaguacagagguacaccgaggaaucaagaucuauaugaugcagcaaaggcauaugcugaacaacucaaagaaaauggugugauuaacuacaguguacuagacuugacagcagaagaacuagaggcuaucaaacaucagcuuaauccaaaagauaaugauguagagcuuugaggacuaguguccaccugucccuccugggcugcuggauugucucguuuuccugccaaauaaacaggaucagcgcuuuacagaucuaaaaaaaaaaaaaaaaaaaaaaaaaaaaaaaaaaaaaaaaaaaaaaaaaaaaaaaaaaaaaaaaugcaucccccccccccccccccccccccccccccccaaaggcucuuuucagagccaccagaauu

SEQ ID NO: 10328 - RNA, 1511 nt, Artificial Sequence
  mRNA product Design e-4 comprising derived and/or modified sequence from HRSV(A2)__P03418.1__N (opt1)
gggagacuccugucgggcggaaguaggaggaguagaguuuaaaaacaguacucuuuuuccgguucgggacguaguugaagcaacgacaagccggauaaccgcucuugagacaggaagcuuaccauggcccugagcaaggugaagcucaacgacacccugaacaaggaccagcugcucuccagcuccaaguacaccauccagcgcagcaccggcgacuccaucgacacccccaacuacgacguccagaagcacaucaacaagcugugcgggaugcugcucaucaccgaggacgccaaccacaaguucaccggccugaucgggaugcuguacgcgaugagccggcucggccgcgaggacacgaucaagauccugcgggacgccggguaccacgugaaggccaacggcguggacgucaccacccaccgccaggacaucaacggcaaggagaugaaguucgaggugcugacccucgccucccugacgaccgagauccagaucaacaucgagaucgagagccggaaguccuacaagaagaugcugaaggagaugggggagguggccccggaguaccgccacgacagccccgacugcggcaugaucauccucugcaucgcggcccuggucaucaccaagcuggccgccggggaccgguccggccucaccgcggugauccgccgggccaacaacgugcugaagaacgagaugaagcgcuacaaggggcugcuccccaaggacaucgccaacagcuucuacgaggucuucgagaagcacccccacuucaucgacguguucgugcacuucggcaucgcccaguccagcacgcggggcgggucccgcgucgagggcaucuucgccgggcuguucaugaacgcguacggcgccggccaggugaugcugcgguggggcgugcucgccaagagcgucaagaacaucaugcuggggcacgccuccgugcaggccgagauggagcaggucguggagguguacgaguacgcgcagaagcucgggggcgaggccggguucuaccacauccugaacaacccgaaggccagccugcugucccucacccaguucccccacuucagcagcgugguccugggcaacgccgccggccuggggaucaugggcgaguaccgcgggacgccccggaaccaggaccucuacgacgcggccaaggccuacgccgagcagcugaaggagaacggcgugaucaacuacuccgugcuggaccucaccgccgaggagcuggaggcgaucaagcaccagcugaaccccaaggacaacgacgucgagcucugaggacuaguguccaccugucccuccugggcugcuggauugucucguuuuccugccaaauaaacaggaucagcgcuuuacagaucuaaaaaaaaaaaaaaaaaaaaaaaaaaaaaaaaaaaaaaaaaaaaaaaaaaaaaaaaaaaaaaaaugcaucccccccccccccccccccccccccccccccaaaggcucuuuucagagccaccagaauu

SEQ ID NO: 10329 - RNA, 1511 nt, Artificial Sequence
  mRNA product Design e-4 comprising derived and/or modified sequence from HRSV(A2)__P03418.1__N (opt2)
gggagacuccugucgggcggaaguaggaggaguagaguuuaaaaacaguacucuuuuuccgguucgggacguaguugaagcaacgacaagccggauaaccgcucuugagacaggaagcuuaccauggcccucuccaaggucaagcucaacgacacccucaacaaggaccagcuccucuccuccuccaaguacaccauccagcgcuccaccggcgacuccaucgacacccccaacuacgacguccagaagcacaucaacaagcucugcggcaugcuccucaucaccgaggacgccaaccacaaguucaccggccucaucggcaugcucuacgccaugucccgccucggccgcgaggacaccaucaagauccuccgcgacgccggcuaccacgucaaggccaacggcgucgacgucaccacccaccgccaggacaucaacggcaaggagaugaaguucgagguccucacccucgccucccucaccaccgagauccagaucaacaucgagaucgagucccgcaaguccuacaagaagaugcucaaggagaugggcgaggucgcccccgaguaccgccacgacucccccgacugcggcaugaucauccucugcaucgccgcccucgucaucaccaagcucgccgccggcgaccgcuccggccucaccgccgucauccgccgcgccaacaacguccucaagaacgagaugaagcgcuacaagggccuccuccccaaggacaucgccaacuccuucuacgaggucuucgagaagcacccccacuucaucgacgucuucguccacuucggcaucgcccaguccuccacccgcggcggcucccgcgucgagggcaucuucgccggccucuucaugaacgccuacggcgccggccaggucaugcuccgcuggggcguccucgccaaguccgucaagaacaucaugcucggccacgccuccguccaggccgagauggagcaggucgucgaggucuacgaguacgcccagaagcucggcggcgaggccggcuucuaccacauccucaacaaccccaaggccucccuccucucccucacccaguucccccacuucuccuccgucguccucggcaacgccgccggccucggcaucaugggcgaguaccgcggcaccccccgcaaccaggaccucuacgacgccgccaaggccuacgccgagcagcucaaggagaacggcgucaucaacuacuccguccucgaccucaccgccgaggagcucgaggccaucaagcaccagcucaaccccaaggacaacgacgucgagcucugaggacuaguguccaccugucccuccugggcugcuggauugucucguuuuccugccaaauaaacaggaucagcgcuuuacagaucuaaaaaaaaaaaaaaaaaaaaaaaaaaaaaaaaaaaaaaaaaaaaaaaaaaaaaaaaaaaaaaaaugcaucccccccccccccccccccccccccccccccaaaggcucuuuucagagccaccagaauu

SEQ ID NO: 10330 - RNA, 1511 nt, Artificial Sequence
  mRNA product Design e-4 comprising derived and/or modified sequence from HRSV(A2)__P03418.1__N (opt3)
gggagacuccugucgggcggaaguaggaggaguagaguuuaaaaacaguacucuuuuuccgguucgggacguaguugaagcaacgacaagccggauaaccgcucuugagacaggaagcuuaccauggcccugagcaaggugaaacucaacgacacccuuaauaaggaucagcuguuguccucuucaaaauacacaauccaaagaaguacuggcgacagcauugauacgcccaacuaugacguccagaagcacauaaauaaauuaugcgggaugcugcuaaucaccgaggaugcuaaccauaaguucacaggacucauugguaugcuguacgcaauguccaggcuuggccgggaagacacuaucaagauucugcgcgaugccggguaucacguuaaagcgaauggaguggacguaaccacacaucgacaggauaucaacggcaaggagaugaaauuugaaguguugacccucgcuucucugacuacagagauacagaucaauauugaaaucgagucgcguaagucauacaaaaagaugcugaaggagaugggugaagucgccccugaguauagacacgacagcccagauugugggaugauuauccucugcauagcagccuuagugauuaccaaacuggcugcaggagacaggaguggccuuacggccguuauccggcgcgcuaacaauguguugaagaacgaaaugaaaagauacaagggccugcuaccgaaagauauugccaauuccuucuaugaggucuuugagaagcauccccacuucaucgacguguuuguacacuucgggaucgcgcaaucuagcacuaggggagguucccggguugaaggcauuuuugcaggacucuucaugaacgccuacggggcuggccaggugaugcugcgcugggguguccuugccaaaucagugaagaauauaaugcuggggcaugcaagugugcaggcugagauggaacaggucguugagguguacgaauaugcccaaaaguugggaggcgaggcgggcuuuuaccacauccucaacaauccuaaagccagccuguuaucucugacccaguucccacauuuuuccucaguagugcucgggaacgcagcuggacuugguauuaugggcgaguaucgagggacacccagaaaccaggaccuguacgaugccgcuaaggccuaugcagaacaguugaaagagaauggagucaucaacuacagcgugcuagaccugacugccgaggaacucgaagcuauaaagcaccaacugaauccuaaagauaacgacguugagcuuugaggacuaguguccaccugucccuccugggcugcuggauugucucguuuuccugccaaauaaacaggaucagcgcuuuacagaucuaaaaaaaaaaaaaaaaaaaaaaaaaaaaaaaaaaaaaaaaaaaaaaaaaaaaaaaaaaaaaaaaugcaucccccccccccccccccccccccccccccccaaaggcucuuuucagagccaccagaauu

SEQ ID NO: 10331 - RNA, 1511 nt, Artificial Sequence
  mRNA product Design e-4 comprising derived and/or modified sequence from HRSV(A2)__P03418.1__N (opt4)
gggagacuccugucgggcggaaguaggaggaguagaguuuaaaaacaguacucuuuuuccgguucgggacguaguugaagcaacgacaagccggauaaccgcucuugagacaggaagcuuaccauggcccugagcaaggugaagcugaacgacacccugaacaaggaccagcugcugagcagcagcaaguacaccauccagagaagcaccggcgacagcaucgacacccccaacuacgacgugcagaagcacaucaacaagcugugcggcaugcugcugaucaccgaggacgccaaccacaaguucaccggccugaucggcaugcuguacgccaugagcagacugggcagagaggacaccaucaagauccugagagacgccggcuaccacgugaaggccaacggcguggacgugaccacccacagacaggacaucaacggcaaggagaugaaguucgaggugcugacccuggccagccugaccaccgagauccagaucaacaucgagaucgagagcagaaagagcuacaagaagaugcugaaggagaugggcgagguggcccccgaguacagacacgacagccccgacugcggcaugaucauccugugcaucgccgcccuggugaucaccaagcuggccgccggcgacagaagcggccugaccgccgugaucagaagagccaacaacgugcugaagaacgagaugaagagauacaagggccugcugcccaaggacaucgccaacagcuucuacgagguguucgagaagcacccccacuucaucgacguguucgugcacuucggcaucgcccagagcagcaccagaggcggcagcagaguggagggcaucuucgccggccuguucaugaacgccuacggcgccggccaggugaugcugagauggggcgugcuggccaagagcgugaagaacaucaugcugggccacgccagcgugcaggccgagauggagcaggugguggagguguacgaguacgcccagaagcugggcggcgaggccggcuucuaccacauccugaacaaccccaaggccagccugcugagccugacccaguucccccacuucagcagcguggugcugggcaacgccgccggccugggcaucaugggcgaguacagaggcacccccagaaaccaggaccuguacgacgccgccaaggccuacgccgagcagcugaaggagaacggcgugaucaacuacagcgugcuggaccugaccgccgaggagcuggaggccaucaagcaccagcugaaccccaaggacaacgacguggagcugugaggacuaguguccaccugucccuccugggcugcuggauugucucguuuuccugccaaauaaacaggaucagcgcuuuacagaucuaaaaaaaaaaaaaaaaaaaaaaaaaaaaaaaaaaaaaaaaaaaaaaaaaaaaaaaaaaaaaaaaugcaucccccccccccccccccccccccccccccccaaaggcucuuuucagagccaccagaauu

SEQ ID NO: 10332 - RNA, 1511 nt, Artificial Sequence
  mRNA product Design e-4 comprising derived and/or modified sequence from HRSV(A2)__P03418.1__N (opt5)
gggagacuccugucgggcggaaguaggaggaguagaguuuaaaaacaguacucuuuuuccgguucgggacguaguugaagcaacgacaagccggauaaccgcucuugagacaggaagcuuaccauggcccugagcaaggugaaacucaacgacacccugaauaaggaucagcuucuguccucuagcaaauacacaauccaaagauccacgggcgacucuauugauacccccaacuaugacguccagaagcacaucaauaaacucugcgggaugcugcuuauuacagaggaugcuaaccauaaguucaccggacugaucggcaugcucuacgccaugagccggcuggggcgcgaagacacaauuaagauccugagagaugcgggauaucacguuaaagcuaauggcguggacgugaccacacaucggcaggauaucaacgggaaggagaugaaauuugaaguccucacccuggccucccuuacgaccgagauucagaucaauauugaaaucgagucucgcaagagcuacaaaaagaugcugaaggagaugggagaaguggccccugaguauagacacgacuccccggauuguggcaugauuauccucugcauugcugcccugguuaucacaaaacuugcugccggcgaccggagcgggcugaccgcggugauccgcagagccaacaauguccucaagaacgaaaugaaacgguacaagggacugcugcccaaagauauugcuaauucuuucuaugagguguuugagaagcauccucacuucaucgacguuuuugugcacuucggcauugcccaauccagcacacgcgggggaucuagagucgaaggcaucuuugcuggacucuucaugaacgccuacggggcgggccaggugaugcugcgguggggcgugcuugccaaauccgucaagaauauuaugcuggggcaugcuagcguucaggccgagauggaacaggugguggaggucuacgaauaugcucaaaagcucggaggcgaggccggguuuuaccacauccugaacaaucccaaagccucucuucugucccucacccaguucccucauuuuagcuccgugguucugggaaacgcugcgggccuggggaucaugggagaguaucgcggcacgcccagaaaccaggaccucuacgaugccgcuaaggccuaugccgaacagcugaaagagaauggcgugauuaacuacucuguccuugaccugacagcugaggaacucgaagccaucaagcaccaacugaauccuaaagauaacgacguggagcuuugaggacuaguguccaccugucccuccugggcugcuggauugucucguuuuccugccaaauaaacaggaucagcgcuuuacagaucuaaaaaaaaaaaaaaaaaaaaaaaaaaaaaaaaaaaaaaaaaaaaaaaaaaaaaaaaaaaaaaaaugcaucccccccccccccccccccccccccccccccaaaggcucuuuucagagccaccagaauu

SEQ ID NO: 10333 - RNA, 1511 nt, Artificial Sequence
  mRNA product Design e-4 comprising derived and/or modified sequence from HRSV(A2)__P03418.1__N (opt6)
gggagacuccugucgggcggaaguaggaggaguagaguuuaaaaacaguacucuuuuuccgguucgggacguaguugaagcaacgacaagccggauaaccgcucuugagacaggaagcuuaccauggcacuaagcaaagucaaauuaaacgacacauuaaacaaagaccaacucuuaucaucaucaaaauacacaauacaaagaagcaccggagacaguaucgacacaccaaacuaugacguccaaaaacauauaaauaaauuaugcggcaugcucuuaaucacagaagacgccaaccauaaauuuacaggauuaauaggaauguuauaugcaaugucacgacuagguagagaagacacaauaaaaauacuaagagacgcaggcuaucacguaaaagcaaauggaguagacguaaccacacacagacaagacauaaauggaaaagaaaugaaauuugaaguauuaacacuagcaucacuaacaacagaaauacaaaucaacauagaaauagaaucaagaaaaagcuacaaaaaaauguuaaaagaaaugggagaagucgcaccagaauauagacaugauucaccagacugcggaaugauaauacuaugcauagcagcccuaguaauuacaaaacuagcagcaggagacagaagcggauuaacagcaguaauaagaagagcaaacaacguacuaaaaaacgaaaugaaaagauauaaaggauuauuaccaaaagacauagcaaacucauucuaugaaguauucgaaaaacacccccacuuuauagacgucuucguacacuucggaauagcccaaucauccacaagaggaggaucaagagucgaaggaauauucgcaggauuauucaugaacgcauauggcgcaggacaaguaaugcuaagauggggaguacuagcaaaauccgucaaaaacauaaugcuaggacacgcaucaguucaagcagaaauggaacaaguaguagaaguauacgaauacgcccaaaaacuaggaggagaagcaggauucuaccacauacuaaauaauccaaaagcaucacuacuaagccuaacccaauuuccccacuucucaaguguaguauuaggaaaugcagcuggacuaggaauaaugggagaauacagaggaacaccaagaaaccaagacuuauacgacgcagcaaaagcauacgcagagcaacuuaaagaaaacggaguaauaaacuauagcguacuagacuuaacagcagaagaacuggaagcaauaaaacaucaauuaaacccgaaagacaaugacguagaauuauaaggacuaguguccaccugucccuccugggcugcuggauugucucguuuuccugccaaauaaacaggaucagcgcuuuacagaucuaaaaaaaaaaaaaaaaaaaaaaaaaaaaaaaaaaaaaaaaaaaaaaaaaaaaaaaaaaaaaaaaugcaucccccccccccccccccccccccccccccccaaaggcucuuuucagagccaccagaauu

SEQ ID NO: 10334 - RNA, 1511 nt, Artificial Sequence
  mRNA product Design e-4 comprising derived and/or modified sequence from HRSV(A2)__P03418.1__N (opt11)
gggagacuccugucgggcggaaguaggaggaguagaguuuaaaaacaguacucuuuuuccgguucgggacguaguugaagcaacgacaagccggauaaccgcucuugagacaggaagcuuaccauggcacucucgaaaguaaaacucaacgacacccucaacaaagaccaacuccuuuccagcuccaaauacaccauccaacgauccaccggagacuccaucgacacgcccaacuacgacguccagaaacacaucaacaagcucugcggaaugcuacuaaucaccgaggacgccaaccacaaauucacaggacuuauagggaugcucuacgccaugucccgccucggacgcgaagacacaauaaaaauccuacgagacgccggcuaccacguaaaggcaaacggcgucgacgucaccacacacagacaagacaucaacggaaaggaaaugaaauucgaaguccucacccucgccagccuaaccaccgagauccaaaucaacaucgaaaucgaaucacgcaaauccuacaagaaaaugcucaaagaaaugggagaagucgcccccgaauaccgucacgacucgcccgacugcggcaugauaauccuaugcaucgccgcacucgucauaaccaaacucgccgccggugaccgaucaggacugacagcagucauccgccgagcaaacaacgugcucaaaaacgaaaugaaacgcuacaaaggccuacuccccaaagacaucgccaacuccuucuacgaagucuucgaaaaacacccacacuucaucgacgucuucguccacuucggcaucgcacaaucaucaaccagaggcggcagccgcguugaaggcaucuucgcaggacucuuuaugaacgccuacggcgccggccaagucaugcuccgcuggggcguccuggcaaaaagcgucaaaaacaucaugcuaggccacgcuagcguccaagccgaaauggaacaagucgucgaaguuuacgaguacgcacaaaaacucggcggcgaagcaggcuucuaccacauccuaaacaaccccaaagccucccugcuaucacucacccaauucccccacuucuccagcgucguccucggcaacgccgcaggacuaggcaucaugggagaauaccgcgggacaccgcgcaaccaagaccucuacgacgccgccaaagccuacgccgaacaacucaaagaaaacggcgucauaaacuacucaguccucgaccucaccgccgaagaacucgaagccaucaaacaccaacucaacccaaaagacaacgacgucgaauuauaaggacuaguguccaccugucccuccugggcugcuggauugucucguuuuccugccaaauaaacaggaucagcgcuuuacagaucuaaaaaaaaaaaaaaaaaaaaaaaaaaaaaaaaaaaaaaaaaaaaaaaaaaaaaaaaaaaaaaaaugcaucccccccccccccccccccccccccccccccaaaggcucuuuucagagccaccagaauu

SEQ ID NO: 10335 - RNA, 1478 nt, Artificial Sequence
  mRNA product Design e-5 comprising derived and/or modified sequence from HRSV(A2)__P03418.1__N (wt)
gggagagcggcucggccauuuugucccagucaguccggaggcugcggcugcagaaguaccgccugcggaguaacugcaaagaagcuuaccauggcucuuagcaaagucaaguugaaugauacacucaacaaagaucaacuucugucauccagcaaauacaccauccaacggagcacaggagauaguauugauacuccuaauuaugaugugcagaaacacaucaauaaguuauguggcauguuauuaaucacagaagaugcuaaucauaaauucacuggguuaauagguauguuauaugcgaugucuagguuaggaagagaagacaccauaaaaauacucagagaugcgggauaucauguaaaagcaaauggaguagauguaacaacacaucgucaagacauuaauggaaaagaaaugaaauuugaaguguuaacauuggcaagcuuaacaacugaaauucaaaucaacauugagauagaaucuagaaaauccuacaaaaaaaugcuaaaagaaaugggagagguagcuccagaauacaggcaugacucuccugauugugggaugauaauauuauguauagcagcauuaguaauaacuaaauuagcagcaggggacagaucuggucuuacagccgugauuaggagagcuaauaauguccuaaaaaaugaaaugaaacguuacaaaggcuuacuacccaaggacauagccaacagcuucuaugaaguguuugaaaaacauccccacuuuauagauguuuuuguucauuuugguauagcacaaucuucuaccagagguggcaguagaguugaagggauuuuugcaggauuguuuaugaaugccuauggugcagggcaagugauguuacgguggggagucuuagcaaaaucaguuaaaaauauuauguuaggacaugcuagugugcaagcagaaauggaacaaguuguugagguuuaugaauaugcccaaaaauuggguggugaagcaggauucuaccauauauugaacaacccaaaagcaucauuauuaucuuugacucaauuuccucacuucuccaguguaguauuaggcaaugcugcuggccuaggcauaaugggagaguacagagguacaccgaggaaucaagaucuauaugaugcagcaaaggcauaugcugaacaacucaaagaaaauggugugauuaacuacaguguacuagacuugacagcagaagaacuagaggcuaucaaacaucagcuuaauccaaaagauaaugauguagagcuuugaggacuaguguccaccugucccuccugggcugcuggauugucucguuuuccugccaaauaaacaggaucagcgcuuuacagaucuaaaaaaaaaaaaaaaaaaaaaaaaaaaaaaaaaaaaaaaaaaaaaaaaaaaaaaaaaaaaaaaaugcaucccccccccccccccccccccccccccccccaaaggcucuuuucagagccaccagaauu

SEQ ID NO: 10336 - RNA, 1478 nt, Artificial Sequence
  mRNA product Design e-5 comprising derived and/or modified sequence from HRSV(A2)__P03418.1__N (opt1)
gggagagcggcucggccauuuugucccagucaguccggaggcugcggcugcagaaguaccgccugcggaguaacugcaaagaagcuuaccauggcccugagcaaggugaagcucaacgacacccugaacaaggaccagcugcucuccagcuccaaguacaccauccagcgcagcaccggcgacuccaucgacacccccaacuacgacguccagaagcacaucaacaagcugugcgggaugcugcucaucaccgaggacgccaaccacaaguucaccggccugaucgggaugcuguacgcgaugagccggcucggccgcgaggacacgaucaagauccugcgggacgccggguaccacgugaaggccaacggcguggacgucaccacccaccgccaggacaucaacggcaaggagaugaaguucgaggugcugacccucgccucccugacgaccgagauccagaucaacaucgagaucgagagccggaaguccuacaagaagaugcugaaggagaugggggagguggccccggaguaccgccacgacagccccgacugcggcaugaucauccucugcaucgcggcccuggucaucaccaagcuggccgccggggaccgguccggccucaccgcggugauccgccgggccaacaacgugcugaagaacgagaugaagcgcuacaaggggcugcuccccaaggacaucgccaacagcuucuacgaggucuucgagaagcacccccacuucaucgacguguucgugcacuucggcaucgcccaguccagcacgcggggcgggucccgcgucgagggcaucuucgccgggcuguucaugaacgcguacggcgccggccaggugaugcugcgguggggcgugcucgccaagagcgucaagaacaucaugcuggggcacgccuccgugcaggccgagauggagcaggucguggagguguacgaguacgcgcagaagcucgggggcgaggccggguucuaccacauccugaacaacccgaaggccagccugcugucccucacccaguucccccacuucagcagcgugguccugggcaacgccgccggccuggggaucaugggcgaguaccgcgggacgccccggaaccaggaccucuacgacgcggccaaggccuacgccgagcagcugaaggagaacggcgugaucaacuacuccgugcuggaccucaccgccgaggagcuggaggcgaucaagcaccagcugaaccccaaggacaacgacgucgagcucugaggacuaguguccaccugucccuccugggcugcuggauugucucguuuuccugccaaauaaacaggaucagcgcuuuacagaucuaaaaaaaaaaaaaaaaaaaaaaaaaaaaaaaaaaaaaaaaaaaaaaaaaaaaaaaaaaaaaaaaugcaucccccccccccccccccccccccccccccccaaaggcucuuuucagagccaccagaauu

SEQ ID NO: 10337 - RNA, 1478 nt, Artificial Sequence
  mRNA product Design e-5 comprising derived and/or modified sequence from HRSV(A2)__P03418.1__N (opt2)
gggagagcggcucggccauuuugucccagucaguccggaggcugcggcugcagaaguaccgccugcggaguaacugcaaagaagcuuaccauggcccucuccaaggucaagcucaacgacacccucaacaaggaccagcuccucuccuccuccaaguacaccauccagcgcuccaccggcgacuccaucgacacccccaacuacgacguccagaagcacaucaacaagcucugcggcaugcuccucaucaccgaggacgccaaccacaaguucaccggccucaucggcaugcucuacgccaugucccgccucggccgcgaggacaccaucaagauccuccgcgacgccggcuaccacgucaaggccaacggcgucgacgucaccacccaccgccaggacaucaacggcaaggagaugaaguucgagguccucacccucgccucccucaccaccgagauccagaucaacaucgagaucgagucccgcaaguccuacaagaagaugcucaaggagaugggcgaggucgcccccgaguaccgccacgacucccccgacugcggcaugaucauccucugcaucgccgcccucgucaucaccaagcucgccgccggcgaccgcuccggccucaccgccgucauccgccgcgccaacaacguccucaagaacgagaugaagcgcuacaagggccuccuccccaaggacaucgccaacuccuucuacgaggucuucgagaagcacccccacuucaucgacgucuucguccacuucggcaucgcccaguccuccacccgcggcggcucccgcgucgagggcaucuucgccggccucuucaugaacgccuacggcgccggccaggucaugcuccgcuggggcguccucgccaaguccgucaagaacaucaugcucggccacgccuccguccaggccgagauggagcaggucgucgaggucuacgaguacgcccagaagcucggcggcgaggccggcuucuaccacauccucaacaaccccaaggccucccuccucucccucacccaguucccccacuucuccuccgucguccucggcaacgccgccggccucggcaucaugggcgaguaccgcggcaccccccgcaaccaggaccucuacgacgccgccaaggccuacgccgagcagcucaaggagaacggcgucaucaacuacuccguccucgaccucaccgccgaggagcucgaggccaucaagcaccagcucaaccccaaggacaacgacgucgagcucugaggacuaguguccaccugucccuccugggcugcuggauugucucguuuuccugccaaauaaacaggaucagcgcuuuacagaucuaaaaaaaaaaaaaaaaaaaaaaaaaaaaaaaaaaaaaaaaaaaaaaaaaaaaaaaaaaaaaaaaugcaucccccccccccccccccccccccccccccccaaaggcucuuuucagagccaccagaauu

SEQ ID NO: 10338 - RNA, 1478 nt, Artificial Sequence
  mRNA product Design e-5 comprising derived and/or modified sequence from HRSV(A2)__P03418.1__N (opt3)
gggagagcggcucggccauuuugucccagucaguccggaggcugcggcugcagaaguaccgccugcggaguaacugcaaagaagcuuaccauggcccugagcaaggugaaacucaacgacacccuuaauaaggaucagcuguuguccucuucaaaauacacaauccaaagaaguacuggcgacagcauugauacgcccaacuaugacguccagaagcacauaaauaaauuaugcgggaugcugcuaaucaccgaggaugcuaaccauaaguucacaggacucauugguaugcuguacgcaauguccaggcuuggccgggaagacacuaucaagauucugcgcgaugccggguaucacguuaaagcgaauggaguggacguaaccacacaucgacaggauaucaacggcaaggagaugaaauuugaaguguugacccucgcuucucugacuacagagauacagaucaauauugaaaucgagucgcguaagucauacaaaaagaugcugaaggagaugggugaagucgccccugaguauagacacgacagcccagauugugggaugauuauccucugcauagcagccuuagugauuaccaaacuggcugcaggagacaggaguggccuuacggccguuauccggcgcgcuaacaauguguugaagaacgaaaugaaaagauacaagggccugcuaccgaaagauauugccaauuccuucuaugaggucuuugagaagcauccccacuucaucgacguguuuguacacuucgggaucgcgcaaucuagcacuaggggagguucccggguugaaggcauuuuugcaggacucuucaugaacgccuacggggcuggccaggugaugcugcgcugggguguccuugccaaaucagugaagaauauaaugcuggggcaugcaagugugcaggcugagauggaacaggucguugagguguacgaauaugcccaaaaguugggaggcgaggcgggcuuuuaccacauccucaacaauccuaaagccagccuguuaucucugacccaguucccacauuuuuccucaguagugcucgggaacgcagcuggacuugguauuaugggcgaguaucgagggacacccagaaaccaggaccuguacgaugccgcuaaggccuaugcagaacaguugaaagagaauggagucaucaacuacagcgugcuagaccugacugccgaggaacucgaagcuauaaagcaccaacugaauccuaaagauaacgacguugagcuuugaggacuaguguccaccugucccuccugggcugcuggauugucucguuuuccugccaaauaaacaggaucagcgcuuuacagaucuaaaaaaaaaaaaaaaaaaaaaaaaaaaaaaaaaaaaaaaaaaaaaaaaaaaaaaaaaaaaaaaaugcaucccccccccccccccccccccccccccccccaaaggcucuuuucagagccaccagaauu

SEQ ID NO: 10339 - RNA, 1478 nt, Artificial Sequence
  mRNA product Design e-5 comprising derived and/or modified sequence from HRSV(A2)__P03418.1__N (opt4)
gggagagcggcucggccauuuugucccagucaguccggaggcugcggcugcagaaguaccgccugcggaguaacugcaaagaagcuuaccauggcccugagcaaggugaagcugaacgacacccugaacaaggaccagcugcugagcagcagcaaguacaccauccagagaagcaccggcgacagcaucgacacccccaacuacgacgugcagaagcacaucaacaagcugugcggcaugcugcugaucaccgaggacgccaaccacaaguucaccggccugaucggcaugcuguacgccaugagcagacugggcagagaggacaccaucaagauccugagagacgccggcuaccacgugaaggccaacggcguggacgugaccacccacagacaggacaucaacggcaaggagaugaaguucgaggugcugacccuggccagccugaccaccgagauccagaucaacaucgagaucgagagcagaaagagcuacaagaagaugcugaaggagaugggcgagguggcccccgaguacagacacgacagccccgacugcggcaugaucauccugugcaucgccgcccuggugaucaccaagcuggccgccggcgacagaagcggccugaccgccgugaucagaagagccaacaacgugcugaagaacgagaugaagagauacaagggccugcugcccaaggacaucgccaacagcuucuacgagguguucgagaagcacccccacuucaucgacguguucgugcacuucggcaucgcccagagcagcaccagaggcggcagcagaguggagggcaucuucgccggccuguucaugaacgccuacggcgccggccaggugaugcugagauggggcgugcuggccaagagcgugaagaacaucaugcugggccacgccagcgugcaggccgagauggagcaggugguggagguguacgaguacgcccagaagcugggcggcgaggccggcuucuaccacauccugaacaaccccaaggccagccugcugagccugacccaguucccccacuucagcagcguggugcugggcaacgccgccggccugggcaucaugggcgaguacagaggcacccccagaaaccaggaccuguacgacgccgccaaggccuacgccgagcagcugaaggagaacggcgugaucaacuacagcgugcuggaccugaccgccgaggagcuggaggccaucaagcaccagcugaaccccaaggacaacgacguggagcugugaggacuaguguccaccugucccuccugggcugcuggauugucucguuuuccugccaaauaaacaggaucagcgcuuuacagaucuaaaaaaaaaaaaaaaaaaaaaaaaaaaaaaaaaaaaaaaaaaaaaaaaaaaaaaaaaaaaaaaaugcaucccccccccccccccccccccccccccccccaaaggcucuuuucagagccaccagaauu

SEQ ID NO: 10340 - RNA, 1478 nt, Artificial Sequence
  mRNA product Design e-5 comprising derived and/or modified sequence from HRSV(A2)__P03418.1__N (opt5)
gggagagcggcucggccauuuugucccagucaguccggaggcugcggcugcagaaguaccgccugcggaguaacugcaaagaagcuuaccauggcccugagcaaggugaaacucaacgacacccugaauaaggaucagcuucuguccucuagcaaauacacaauccaaagauccacgggcgacucuauugauacccccaacuaugacguccagaagcacaucaauaaacucugcgggaugcugcuuauuacagaggaugcuaaccauaaguucaccggacugaucggcaugcucuacgccaugagccggcuggggcgcgaagacacaauuaagauccugagagaugcgggauaucacguuaaagcuaauggcguggacgugaccacacaucggcaggauaucaacgggaaggagaugaaauuugaaguccucacccuggccucccuuacgaccgagauucagaucaauauugaaaucgagucucgcaagagcuacaaaaagaugcugaaggagaugggagaaguggccccugaguauagacacgacuccccggauuguggcaugauuauccucugcauugcugcccugguuaucacaaaacuugcugccggcgaccggagcgggcugaccgcggugauccgcagagccaacaauguccucaagaacgaaaugaaacgguacaagggacugcugcccaaagauauugcuaauucuuucuaugagguguuugagaagcauccucacuucaucgacguuuuugugcacuucggcauugcccaauccagcacacgcgggggaucuagagucgaaggcaucuuugcuggacucuucaugaacgccuacggggcgggccaggugaugcugcgguggggcgugcuugccaaauccgucaagaauauuaugcuggggcaugcuagcguucaggccgagauggaacaggugguggaggucuacgaauaugcucaaaagcucggaggcgaggccggguuuuaccacauccugaacaaucccaaagccucucuucugucccucacccaguucccucauuuuagcuccgugguucugggaaacgcugcgggccuggggaucaugggagaguaucgcggcacgcccagaaaccaggaccucuacgaugccgcuaaggccuaugccgaacagcugaaagagaauggcgugauuaacuacucuguccuugaccugacagcugaggaacucgaagccaucaagcaccaacugaauccuaaagauaacgacguggagcuuugaggacuaguguccaccugucccuccugggcugcuggauugucucguuuuccugccaaauaaacaggaucagcgcuuuacagaucuaaaaaaaaaaaaaaaaaaaaaaaaaaaaaaaaaaaaaaaaaaaaaaaaaaaaaaaaaaaaaaaaugcaucccccccccccccccccccccccccccccccaaaggcucuuuucagagccaccagaauu

SEQ ID NO: 10341 - RNA, 1478 nt, Artificial Sequence
  mRNA product Design e-5 comprising derived and/or modified sequence from HRSV(A2)__P03418.1__N (opt6)
gggagagcggcucggccauuuugucccagucaguccggaggcugcggcugcagaaguaccgccugcggaguaacugcaaagaagcuuaccauggcacuaagcaaagucaaauuaaacgacacauuaaacaaagaccaacucuuaucaucaucaaaauacacaauacaaagaagcaccggagacaguaucgacacaccaaacuaugacguccaaaaacauauaaauaaauuaugcggcaugcucuuaaucacagaagacgccaaccauaaauuuacaggauuaauaggaauguuauaugcaaugucacgacuagguagagaagacacaauaaaaauacuaagagacgcaggcuaucacguaaaagcaaauggaguagacguaaccacacacagacaagacauaaauggaaaagaaaugaaauuugaaguauuaacacuagcaucacuaacaacagaaauacaaaucaacauagaaauagaaucaagaaaaagcuacaaaaaaauguuaaaagaaaugggagaagucgcaccagaauauagacaugauucaccagacugcggaaugauaauacuaugcauagcagcccuaguaauuacaaaacuagcagcaggagacagaagcggauuaacagcaguaauaagaagagcaaacaacguacuaaaaaacgaaaugaaaagauauaaaggauuauuaccaaaagacauagcaaacucauucuaugaaguauucgaaaaacacccccacuuuauagacgucuucguacacuucggaauagcccaaucauccacaagaggaggaucaagagucgaaggaauauucgcaggauuauucaugaacgcauauggcgcaggacaaguaaugcuaagauggggaguacuagcaaaauccgucaaaaacauaaugcuaggacacgcaucaguucaagcagaaauggaacaaguaguagaaguauacgaauacgcccaaaaacuaggaggagaagcaggauucuaccacauacuaaauaauccaaaagcaucacuacuaagccuaacccaauuuccccacuucucaaguguaguauuaggaaaugcagcuggacuaggaauaaugggagaauacagaggaacaccaagaaaccaagacuuauacgacgcagcaaaagcauacgcagagcaacuuaaagaaaacggaguaauaaacuauagcguacuagacuuaacagcagaagaacuggaagcaauaaaacaucaauuaaacccgaaagacaaugacguagaauuauaaggacuaguguccaccugucccuccugggcugcuggauugucucguuuuccugccaaauaaacaggaucagcgcuuuacagaucuaaaaaaaaaaaaaaaaaaaaaaaaaaaaaaaaaaaaaaaaaaaaaaaaaaaaaaaaaaaaaaaaugcaucccccccccccccccccccccccccccccccaaaggcucuuuucagagccaccagaauu

SEQ ID NO: 10342 - RNA, 1478 nt, Artificial Sequence
  mRNA product Design e-5 comprising derived and/or modified sequence from HRSV(A2)__P03418.1__N (opt11)
gggagagcggcucggccauuuugucccagucaguccggaggcugcggcugcagaaguaccgccugcggaguaacugcaaagaagcuuaccauggcacucucgaaaguaaaacucaacgacacccucaacaaagaccaacuccuuuccagcuccaaauacaccauccaacgauccaccggagacuccaucgacacgcccaacuacgacguccagaaacacaucaacaagcucugcggaaugcuacuaaucaccgaggacgccaaccacaaauucacaggacuuauagggaugcucuacgccaugucccgccucggacgcgaagacacaauaaaaauccuacgagacgccggcuaccacguaaaggcaaacggcgucgacgucaccacacacagacaagacaucaacggaaaggaaaugaaauucgaaguccucacccucgccagccuaaccaccgagauccaaaucaacaucgaaaucgaaucacgcaaauccuacaagaaaaugcucaaagaaaugggagaagucgcccccgaauaccgucacgacucgcccgacugcggcaugauaauccuaugcaucgccgcacucgucauaaccaaacucgccgccggugaccgaucaggacugacagcagucauccgccgagcaaacaacgugcucaaaaacgaaaugaaacgcuacaaaggccuacuccccaaagacaucgccaacuccuucuacgaagucuucgaaaaacacccacacuucaucgacgucuucguccacuucggcaucgcacaaucaucaaccagaggcggcagccgcguugaaggcaucuucgcaggacucuuuaugaacgccuacggcgccggccaagucaugcuccgcuggggcguccuggcaaaaagcgucaaaaacaucaugcuaggccacgcuagcguccaagccgaaauggaacaagucgucgaaguuuacgaguacgcacaaaaacucggcggcgaagcaggcuucuaccacauccuaaacaaccccaaagccucccugcuaucacucacccaauucccccacuucuccagcgucguccucggcaacgccgcaggacuaggcaucaugggagaauaccgcgggacaccgcgcaaccaagaccucuacgacgccgccaaagccuacgccgaacaacucaaagaaaacggcgucauaaacuacucaguccucgaccucaccgccgaagaacucgaagccaucaaacaccaacucaacccaaaagacaacgacgucgaauuauaaggacuaguguccaccugucccuccugggcugcuggauugucucguuuuccugccaaauaaacaggaucagcgcuuuacagaucuaaaaaaaaaaaaaaaaaaaaaaaaaaaaaaaaaaaaaaaaaaaaaaaaaaaaaaaaaaaaaaaaugcaucccccccccccccccccccccccccccccccaaaggcucuuuucagagccaccagaauu

SEQ ID NO: 10343 - RNA, 1545 nt, Artificial Sequence
  mRNA product Design e-6 comprising derived and/or modified sequence from HRSV(A2)__P03418.1__N (wt)
gggagagcggcucggccauuuugucccagucaguccggaggcugcggcugcagaaguaccgccugcggaguaacugcaaagaagcuuaccauggcucuuagcaaagucaaguugaaugauacacucaacaaagaucaacuucugucauccagcaaauacaccauccaacggagcacaggagauaguauugauacuccuaauuaugaugugcagaaacacaucaauaaguuauguggcauguuauuaaucacagaagaugcuaaucauaaauucacuggguuaauagguauguuauaugcgaugucuagguuaggaagagaagacaccauaaaaauacucagagaugcgggauaucauguaaaagcaaauggaguagauguaacaacacaucgucaagacauuaauggaaaagaaaugaaauuugaaguguuaacauuggcaagcuuaacaacugaaauucaaaucaacauugagauagaaucuagaaaauccuacaaaaaaaugcuaaaagaaaugggagagguagcuccagaauacaggcaugacucuccugauugugggaugauaauauuauguauagcagcauuaguaauaacuaaauuagcagcaggggacagaucuggucuuacagccgugauuaggagagcuaauaauguccuaaaaaaugaaaugaaacguuacaaaggcuuacuacccaaggacauagccaacagcuucuaugaaguguuugaaaaacauccccacuuuauagauguuuuuguucauuuugguauagcacaaucuucuaccagagguggcaguagaguugaagggauuuuugcaggauuguuuaugaaugccuauggugcagggcaagugauguuacgguggggagucuuagcaaaaucaguuaaaaauauuauguuaggacaugcuagugugcaagcagaaauggaacaaguuguugagguuuaugaauaugcccaaaaauuggguggugaagcaggauucuaccauauauugaacaacccaaaagcaucauuauuaucuuugacucaauuuccucacuucuccaguguaguauuaggcaaugcugcuggccuaggcauaaugggagaguacagagguacaccgaggaaucaagaucuauaugaugcagcaaaggcauaugcugaacaacucaaagaaaauggugugauuaacuacaguguacuagacuugacagcagaagaacuagaggcuaucaaacaucagcuuaauccaaaagauaaugauguagagcuuugaggacuaguacuggcugcaucucccuuuccucuguccuccauccuucucccaggauggugaagggggaccugguacccagugauccccaccccaggauccuaaaucaugacuuaccugcuaauaaaaacucauuggaaaagugagaagaucuaaaaaaaaaaaaaaaaaaaaaaaaaaaaaaaaaaaaaaaaaaaaaaaaaaaaaaaaaaaaaaaaugcaucccccccccccccccccccccccccccccccaaaggcucuuuucagagccaccagaauu

SEQ ID NO: 10344 - RNA, 1545 nt, Artificial Sequence
  mRNA product Design e-6 comprising derived and/or modified sequence from HRSV(A2)__P03418.1__N (opt1)
gggagagcggcucggccauuuugucccagucaguccggaggcugcggcugcagaaguaccgccugcggaguaacugcaaagaagcuuaccauggcccugagcaaggugaagcucaacgacacccugaacaaggaccagcugcucuccagcuccaaguacaccauccagcgcagcaccggcgacuccaucgacacccccaacuacgacguccagaagcacaucaacaagcugugcgggaugcugcucaucaccgaggacgccaaccacaaguucaccggccugaucgggaugcuguacgcgaugagccggcucggccgcgaggacacgaucaagauccugcgggacgccggguaccacgugaaggccaacggcguggacgucaccacccaccgccaggacaucaacggcaaggagaugaaguucgaggugcugacccucgccucccugacgaccgagauccagaucaacaucgagaucgagagccggaaguccuacaagaagaugcugaaggagaugggggagguggccccggaguaccgccacgacagccccgacugcggcaugaucauccucugcaucgcggcccuggucaucaccaagcuggccgccggggaccgguccggccucaccgcggugauccgccgggccaacaacgugcugaagaacgagaugaagcgcuacaaggggcugcuccccaaggacaucgccaacagcuucuacgaggucuucgagaagcacccccacuucaucgacguguucgugcacuucggcaucgcccaguccagcacgcggggcgggucccgcgucgagggcaucuucgccgggcuguucaugaacgcguacggcgccggccaggugaugcugcgguggggcgugcucgccaagagcgucaagaacaucaugcuggggcacgccuccgugcaggccgagauggagcaggucguggagguguacgaguacgcgcagaagcucgggggcgaggccggguucuaccacauccugaacaacccgaaggccagccugcugucccucacccaguucccccacuucagcagcgugguccugggcaacgccgccggccuggggaucaugggcgaguaccgcgggacgccccggaaccaggaccucuacgacgcggccaaggccuacgccgagcagcugaaggagaacggcgugaucaacuacuccgugcuggaccucaccgccgaggagcuggaggcgaucaagcaccagcugaaccccaaggacaacgacgucgagcucugaggacuaguacuggcugcaucucccuuuccucuguccuccauccuucucccaggauggugaagggggaccugguacccagugauccccaccccaggauccuaaaucaugacuuaccugcuaauaaaaacucauuggaaaagugagaagaucuaaaaaaaaaaaaaaaaaaaaaaaaaaaaaaaaaaaaaaaaaaaaaaaaaaaaaaaaaaaaaaaaugcaucccccccccccccccccccccccccccccccaaaggcucuuuucagagccaccagaauu

SEQ ID NO: 10345 - RNA, 1545 nt, Artificial Sequence
  mRNA product Design e-6 comprising derived and/or modified sequence from HRSV(A2)__P03418.1__N (opt2)
gggagagcggcucggccauuuugucccagucaguccggaggcugcggcugcagaaguaccgccugcggaguaacugcaaagaagcuuaccauggcccucuccaaggucaagcucaacgacacccucaacaaggaccagcuccucuccuccuccaaguacaccauccagcgcuccaccggcgacuccaucgacacccccaacuacgacguccagaagcacaucaacaagcucugcggcaugcuccucaucaccgaggacgccaaccacaaguucaccggccucaucggcaugcucuacgccaugucccgccucggccgcgaggacaccaucaagauccuccgcgacgccggcuaccacgucaaggccaacggcgucgacgucaccacccaccgccaggacaucaacggcaaggagaugaaguucgagguccucacccucgccucccucaccaccgagauccagaucaacaucgagaucgagucccgcaaguccuacaagaagaugcucaaggagaugggcgaggucgcccccgaguaccgccacgacucccccgacugcggcaugaucauccucugcaucgccgcccucgucaucaccaagcucgccgccggcgaccgcuccggccucaccgccgucauccgccgcgccaacaacguccucaagaacgagaugaagcgcuacaagggccuccuccccaaggacaucgccaacuccuucuacgaggucuucgagaagcacccccacuucaucgacgucuucguccacuucggcaucgcccaguccuccacccgcggcggcucccgcgucgagggcaucuucgccggccucuucaugaacgccuacggcgccggccaggucaugcuccgcuggggcguccucgccaaguccgucaagaacaucaugcucggccacgccuccguccaggccgagauggagcaggucgucgaggucuacgaguacgcccagaagcucggcggcgaggccggcuucuaccacauccucaacaaccccaaggccucccuccucucccucacccaguucccccacuucuccuccgucguccucggcaacgccgccggccucggcaucaugggcgaguaccgcggcaccccccgcaaccaggaccucuacgacgccgccaaggccuacgccgagcagcucaaggagaacggcgucaucaacuacuccguccucgaccucaccgccgaggagcucgaggccaucaagcaccagcucaaccccaaggacaacgacgucgagcucugaggacuaguacuggcugcaucucccuuuccucuguccuccauccuucucccaggauggugaagggggaccugguacccagugauccccaccccaggauccuaaaucaugacuuaccugcuaauaaaaacucauuggaaaagugagaagaucuaaaaaaaaaaaaaaaaaaaaaaaaaaaaaaaaaaaaaaaaaaaaaaaaaaaaaaaaaaaaaaaaugcaucccccccccccccccccccccccccccccccaaaggcucuuuucagagccaccagaauu

SEQ ID NO: 10346 - RNA, 1545 nt, Artificial Sequence
  mRNA product Design e-6 comprising derived and/or modified sequence from HRSV(A2)__P03418.1__N (opt3)
gggagagcggcucggccauuuugucccagucaguccggaggcugcggcugcagaaguaccgccugcggaguaacugcaaagaagcuuaccauggcccugagcaaggugaaacucaacgacacccuuaauaaggaucagcuguuguccucuucaaaauacacaauccaaagaaguacuggcgacagcauugauacgcccaacuaugacguccagaagcacauaaauaaauuaugcgggaugcugcuaaucaccgaggaugcuaaccauaaguucacaggacucauugguaugcuguacgcaauguccaggcuuggccgggaagacacuaucaagauucugcgcgaugccggguaucacguuaaagcgaauggaguggacguaaccacacaucgacaggauaucaacggcaaggagaugaaauuugaaguguugacccucgcuucucugacuacagagauacagaucaauauugaaaucgagucgcguaagucauacaaaaagaugcugaaggagaugggugaagucgccccugaguauagacacgacagcccagauugugggaugauuauccucugcauagcagccuuagugauuaccaaacuggcugcaggagacaggaguggccuuacggccguuauccggcgcgcuaacaauguguugaagaacgaaaugaaaagauacaagggccugcuaccgaaagauauugccaauuccuucuaugaggucuuugagaagcauccccacuucaucgacguguuuguacacuucgggaucgcgcaaucuagcacuaggggagguucccggguugaaggcauuuuugcaggacucuucaugaacgccuacggggcuggccaggugaugcugcgcugggguguccuugccaaaucagugaagaauauaaugcuggggcaugcaagugugcaggcugagauggaacaggucguugagguguacgaauaugcccaaaaguugggaggcgaggcgggcuuuuaccacauccucaacaauccuaaagccagccuguuaucucugacccaguucccacauuuuuccucaguagugcucgggaacgcagcuggacuugguauuaugggcgaguaucgagggacacccagaaaccaggaccuguacgaugccgcuaaggccuaugcagaacaguugaaagagaauggagucaucaacuacagcgugcuagaccugacugccgaggaacucgaagcuauaaagcaccaacugaauccuaaagauaacgacguugagcuuugaggacuaguacuggcugcaucucccuuuccucuguccuccauccuucucccaggauggugaagggggaccugguacccagugauccccaccccaggauccuaaaucaugacuuaccugcuaauaaaaacucauuggaaaagugagaagaucuaaaaaaaaaaaaaaaaaaaaaaaaaaaaaaaaaaaaaaaaaaaaaaaaaaaaaaaaaaaaaaaaugcaucccccccccccccccccccccccccccccccaaaggcucuuuucagagccaccagaauu

SEQ ID NO: 10347 - RNA, 1545 nt, Artificial Sequence
  mRNA product Design e-6 comprising derived and/or modified sequence from HRSV(A2)__P03418.1__N (opt4)
gggagagcggcucggccauuuugucccagucaguccggaggcugcggcugcagaaguaccgccugcggaguaacugcaaagaagcuuaccauggcccugagcaaggugaagcugaacgacacccugaacaaggaccagcugcugagcagcagcaaguacaccauccagagaagcaccggcgacagcaucgacacccccaacuacgacgugcagaagcacaucaacaagcugugcggcaugcugcugaucaccgaggacgccaaccacaaguucaccggccugaucggcaugcuguacgccaugagcagacugggcagagaggacaccaucaagauccugagagacgccggcuaccacgugaaggccaacggcguggacgugaccacccacagacaggacaucaacggcaaggagaugaaguucgaggugcugacccuggccagccugaccaccgagauccagaucaacaucgagaucgagagcagaaagagcuacaagaagaugcugaaggagaugggcgagguggcccccgaguacagacacgacagccccgacugcggcaugaucauccugugcaucgccgcccuggugaucaccaagcuggccgccggcgacagaagcggccugaccgccgugaucagaagagccaacaacgugcugaagaacgagaugaagagauacaagggccugcugcccaaggacaucgccaacagcuucuacgagguguucgagaagcacccccacuucaucgacguguucgugcacuucggcaucgcccagagcagcaccagaggcggcagcagaguggagggcaucuucgccggccuguucaugaacgccuacggcgccggccaggugaugcugagauggggcgugcuggccaagagcgugaagaacaucaugcugggccacgccagcgugcaggccgagauggagcaggugguggagguguacgaguacgcccagaagcugggcggcgaggccggcuucuaccacauccugaacaaccccaaggccagccugcugagccugacccaguucccccacuucagcagcguggugcugggcaacgccgccggccugggcaucaugggcgaguacagaggcacccccagaaaccaggaccuguacgacgccgccaaggccuacgccgagcagcugaaggagaacggcgugaucaacuacagcgugcuggaccugaccgccgaggagcuggaggccaucaagcaccagcugaaccccaaggacaacgacguggagcugugaggacuaguacuggcugcaucucccuuuccucuguccuccauccuucucccaggauggugaagggggaccugguacccagugauccccaccccaggauccuaaaucaugacuuaccugcuaauaaaaacucauuggaaaagugagaagaucuaaaaaaaaaaaaaaaaaaaaaaaaaaaaaaaaaaaaaaaaaaaaaaaaaaaaaaaaaaaaaaaaugcaucccccccccccccccccccccccccccccccaaaggcucuuuucagagccaccagaauu

SEQ ID NO: 10348 - RNA, 1545 nt, Artificial Sequence
  mRNA product Design e-6 comprising derived and/or modified sequence from HRSV(A2)__P03418.1__N (opt5)
gggagagcggcucggccauuuugucccagucaguccggaggcugcggcugcagaaguaccgccugcggaguaacugcaaagaagcuuaccauggcccugagcaaggugaaacucaacgacacccugaauaaggaucagcuucuguccucuagcaaauacacaauccaaagauccacgggcgacucuauugauacccccaacuaugacguccagaagcacaucaauaaacucugcgggaugcugcuuauuacagaggaugcuaaccauaaguucaccggacugaucggcaugcucuacgccaugagccggcuggggcgcgaagacacaauuaagauccugagagaugcgggauaucacguuaaagcuaauggcguggacgugaccacacaucggcaggauaucaacgggaaggagaugaaauuugaaguccucacccuggccucccuuacgaccgagauucagaucaauauugaaaucgagucucgcaagagcuacaaaaagaugcugaaggagaugggagaaguggccccugaguauagacacgacuccccggauuguggcaugauuauccucugcauugcugcccugguuaucacaaaacuugcugccggcgaccggagcgggcugaccgcggugauccgcagagccaacaauguccucaagaacgaaaugaaacgguacaagggacugcugcccaaagauauugcuaauucuuucuaugagguguuugagaagcauccucacuucaucgacguuuuugugcacuucggcauugcccaauccagcacacgcgggggaucuagagucgaaggcaucuuugcuggacucuucaugaacgccuacggggcgggccaggugaugcugcgguggggcgugcuugccaaauccgucaagaauauuaugcuggggcaugcuagcguucaggccgagauggaacaggugguggaggucuacgaauaugcucaaaagcucggaggcgaggccggguuuuaccacauccugaacaaucccaaagccucucuucugucccucacccaguucccucauuuuagcuccgugguucugggaaacgcugcgggccuggggaucaugggagaguaucgcggcacgcccagaaaccaggaccucuacgaugccgcuaaggccuaugccgaacagcugaaagagaauggcgugauuaacuacucuguccuugaccugacagcugaggaacucgaagccaucaagcaccaacugaauccuaaagauaacgacguggagcuuugaggacuaguacuggcugcaucucccuuuccucuguccuccauccuucucccaggauggugaagggggaccugguacccagugauccccaccccaggauccuaaaucaugacuuaccugcuaauaaaaacucauuggaaaagugagaagaucuaaaaaaaaaaaaaaaaaaaaaaaaaaaaaaaaaaaaaaaaaaaaaaaaaaaaaaaaaaaaaaaaugcaucccccccccccccccccccccccccccccccaaaggcucuuuucagagccaccagaauu

SEQ ID NO: 10349 - RNA, 1545 nt, Artificial Sequence
  mRNA product Design e-6 comprising derived and/or modified sequence from HRSV(A2)__P03418.1__N (opt6)
gggagagcggcucggccauuuugucccagucaguccggaggcugcggcugcagaaguaccgccugcggaguaacugcaaagaagcuuaccauggcacuaagcaaagucaaauuaaacgacacauuaaacaaagaccaacucuuaucaucaucaaaauacacaauacaaagaagcaccggagacaguaucgacacaccaaacuaugacguccaaaaacauauaaauaaauuaugcggcaugcucuuaaucacagaagacgccaaccauaaauuuacaggauuaauaggaauguuauaugcaaugucacgacuagguagagaagacacaauaaaaauacuaagagacgcaggcuaucacguaaaagcaaauggaguagacguaaccacacacagacaagacauaaauggaaaagaaaugaaauuugaaguauuaacacuagcaucacuaacaacagaaauacaaaucaacauagaaauagaaucaagaaaaagcuacaaaaaaauguuaaaagaaaugggagaagucgcaccagaauauagacaugauucaccagacugcggaaugauaauacuaugcauagcagcccuaguaauuacaaaacuagcagcaggagacagaagcggauuaacagcaguaauaagaagagcaaacaacguacuaaaaaacgaaaugaaaagauauaaaggauuauuaccaaaagacauagcaaacucauucuaugaaguauucgaaaaacacccccacuuuauagacgucuucguacacuucggaauagcccaaucauccacaagaggaggaucaagagucgaaggaauauucgcaggauuauucaugaacgcauauggcgcaggacaaguaaugcuaagauggggaguacuagcaaaauccgucaaaaacauaaugcuaggacacgcaucaguucaagcagaaauggaacaaguaguagaaguauacgaauacgcccaaaaacuaggaggagaagcaggauucuaccacauacuaaauaauccaaaagcaucacuacuaagccuaacccaauuuccccacuucucaaguguaguauuaggaaaugcagcuggacuaggaauaaugggagaauacagaggaacaccaagaaaccaagacuuauacgacgcagcaaaagcauacgcagagcaacuuaaagaaaacggaguaauaaacuauagcguacuagacuuaacagcagaagaacuggaagcaauaaaacaucaauuaaacccgaaagacaaugacguagaauuauaaggacuaguacuggcugcaucucccuuuccucuguccuccauccuucucccaggauggugaagggggaccugguacccagugauccccaccccaggauccuaaaucaugacuuaccugcuaauaaaaacucauuggaaaagugagaagaucuaaaaaaaaaaaaaaaaaaaaaaaaaaaaaaaaaaaaaaaaaaaaaaaaaaaaaaaaaaaaaaaaugcaucccccccccccccccccccccccccccccccaaaggcucuuuucagagccaccagaauu

SEQ ID NO: 10350 - RNA, 1545 nt, Artificial Sequence
  mRNA product Design e-6 comprising derived and/or modified sequence from HRSV(A2)__P03418.1__N (opt11)
gggagagcggcucggccauuuugucccagucaguccggaggcugcggcugcagaaguaccgccugcggaguaacugcaaagaagcuuaccauggcacucucgaaaguaaaacucaacgacacccucaacaaagaccaacuccuuuccagcuccaaauacaccauccaacgauccaccggagacuccaucgacacgcccaacuacgacguccagaaacacaucaacaagcucugcggaaugcuacuaaucaccgaggacgccaaccacaaauucacaggacuuauagggaugcucuacgccaugucccgccucggacgcgaagacacaauaaaaauccuacgagacgccggcuaccacguaaaggcaaacggcgucgacgucaccacacacagacaagacaucaacggaaaggaaaugaaauucgaaguccucacccucgccagccuaaccaccgagauccaaaucaacaucgaaaucgaaucacgcaaauccuacaagaaaaugcucaaagaaaugggagaagucgcccccgaauaccgucacgacucgcccgacugcggcaugauaauccuaugcaucgccgcacucgucauaaccaaacucgccgccggugaccgaucaggacugacagcagucauccgccgagcaaacaacgugcucaaaaacgaaaugaaacgcuacaaaggccuacuccccaaagacaucgccaacuccuucuacgaagucuucgaaaaacacccacacuucaucgacgucuucguccacuucggcaucgcacaaucaucaaccagaggcggcagccgcguugaaggcaucuucgcaggacucuuuaugaacgccuacggcgccggccaagucaugcuccgcuggggcguccuggcaaaaagcgucaaaaacaucaugcuaggccacgcuagcguccaagccgaaauggaacaagucgucgaaguuuacgaguacgcacaaaaacucggcggcgaagcaggcuucuaccacauccuaaacaaccccaaagccucccugcuaucacucacccaauucccccacuucuccagcgucguccucggcaacgccgcaggacuaggcaucaugggagaauaccgcgggacaccgcgcaaccaagaccucuacgacgccgccaaagccuacgccgaacaacucaaagaaaacggcgucauaaacuacucaguccucgaccucaccgccgaagaacucgaagccaucaaacaccaacucaacccaaaagacaacgacgucgaauuauaaggacuaguacuggcugcaucucccuuuccucuguccuccauccuucucccaggauggugaagggggaccugguacccagugauccccaccccaggauccuaaaucaugacuuaccugcuaauaaaaacucauuggaaaagugagaagaucuaaaaaaaaaaaaaaaaaaaaaaaaaaaaaaaaaaaaaaaaaaaaaaaaaaaaaaaaaaaaaaaaugcaucccccccccccccccccccccccccccccccaaaggcucuuuucagagccaccagaauu

SEQ ID NO: 10351 - RNA, 1761 nt, Artificial Sequence
  mRNA product Design f-1 comprising derived and/or modified sequence from HRSV(A2)__P03418.1__N (wt)
gggagagcggcucggccauuuugucccagucaguccggaggcugcggcugcagaaguaccgccugcggaguaacugcaaagaagcuuaccauggcucuuagcaaagucaaguugaaugauacacucaacaaagaucaacuucugucauccagcaaauacaccauccaacggagcacaggagauaguauugauacuccuaauuaugaugugcagaaacacaucaauaaguuauguggcauguuauuaaucacagaagaugcuaaucauaaauucacuggguuaauagguauguuauaugcgaugucuagguuaggaagagaagacaccauaaaaauacucagagaugcgggauaucauguaaaagcaaauggaguagauguaacaacacaucgucaagacauuaauggaaaagaaaugaaauuugaaguguuaacauuggcaagcuuaacaacugaaauucaaaucaacauugagauagaaucuagaaaauccuacaaaaaaaugcuaaaagaaaugggagagguagcuccagaauacaggcaugacucuccugauugugggaugauaauauuauguauagcagcauuaguaauaacuaaauuagcagcaggggacagaucuggucuuacagccgugauuaggagagcuaauaauguccuaaaaaaugaaaugaaacguuacaaaggcuuacuacccaaggacauagccaacagcuucuaugaaguguuugaaaaacauccccacuuuauagauguuuuuguucauuuugguauagcacaaucuucuaccagagguggcaguagaguugaagggauuuuugcaggauuguuuaugaaugccuauggugcagggcaagugauguuacgguggggagucuuagcaaaaucaguuaaaaauauuauguuaggacaugcuagugugcaagcagaaauggaacaaguuguugagguuuaugaauaugcccaaaaauuggguggugaagcaggauucuaccauauauugaacaacccaaaagcaucauuauuaucuuugacucaauuuccucacuucuccaguguaguauuaggcaaugcugcuggccuaggcauaaugggagaguacagagguacaccgaggaaucaagaucuauaugaugcagcaaaggcauaugcugaacaacucaaagaaaauggugugauuaacuacaguguacuagacuugacagcagaagaacuagaggcuaucaaacaucagcuuaauccaaaagauaaugauguagagcuuugaggacuagugaagggaacacccaaauuuaauucagccuuaagcacaauuaauuaagagugaaacguaauuguacaagcaguuggucacccaccauagggcaugaucaacaccgcaaccuuuccuuuuucccccagugauucugaaaaaccccucuucccuucagcuugcuuagauguuccaaauuuaguaagcuuaaggcggccuacagaagaaaaagaaaaaaaaggccacaaaaguucccucucacuuucaguaaauaaaauaaaagcagcaacagaaauaaagaaauaaaugaaauucaaaaugaaauaaauauuguguugugcagcauuaaaaaaucaauaaaaauuaaaaaugagcaagaucuaaaaaaaaaaaaaaaaaaaaaaaaaaaaaaaaaaaaaaaaaaaaaaaaaaaaaaaaaaaaaaaaugcaucccccccccccccccccccccccccccccccaaaggcucuuuucagagccaccagaauu

SEQ ID NO: 10352 - RNA, 1761 nt, Artificial Sequence
  mRNA product Design f-1 comprising derived and/or modified sequence from HRSV(A2)__P03418.1__N (opt1)
gggagagcggcucggccauuuugucccagucaguccggaggcugcggcugcagaaguaccgccugcggaguaacugcaaagaagcuuaccauggcccugagcaaggugaagcucaacgacacccugaacaaggaccagcugcucuccagcuccaaguacaccauccagcgcagcaccggcgacuccaucgacacccccaacuacgacguccagaagcacaucaacaagcugugcgggaugcugcucaucaccgaggacgccaaccacaaguucaccggccugaucgggaugcuguacgcgaugagccggcucggccgcgaggacacgaucaagauccugcgggacgccggguaccacgugaaggccaacggcguggacgucaccacccaccgccaggacaucaacggcaaggagaugaaguucgaggugcugacccucgccucccugacgaccgagauccagaucaacaucgagaucgagagccggaaguccuacaagaagaugcugaaggagaugggggagguggccccggaguaccgccacgacagccccgacugcggcaugaucauccucugcaucgcggcccuggucaucaccaagcuggccgccggggaccgguccggccucaccgcggugauccgccgggccaacaacgugcugaagaacgagaugaagcgcuacaaggggcugcuccccaaggacaucgccaacagcuucuacgaggucuucgagaagcacccccacuucaucgacguguucgugcacuucggcaucgcccaguccagcacgcggggcgggucccgcgucgagggcaucuucgccgggcuguucaugaacgcguacggcgccggccaggugaugcugcgguggggcgugcucgccaagagcgucaagaacaucaugcuggggcacgccuccgugcaggccgagauggagcaggucguggagguguacgaguacgcgcagaagcucgggggcgaggccggguucuaccacauccugaacaacccgaaggccagccugcugucccucacccaguucccccacuucagcagcgugguccugggcaacgccgccggccuggggaucaugggcgaguaccgcgggacgccccggaaccaggaccucuacgacgcggccaaggccuacgccgagcagcugaaggagaacggcgugaucaacuacuccgugcuggaccucaccgccgaggagcuggaggcgaucaagcaccagcugaaccccaaggacaacgacgucgagcucugaggacuagugaagggaacacccaaauuuaauucagccuuaagcacaauuaauuaagagugaaacguaauuguacaagcaguuggucacccaccauagggcaugaucaacaccgcaaccuuuccuuuuucccccagugauucugaaaaaccccucuucccuucagcuugcuuagauguuccaaauuuaguaagcuuaaggcggccuacagaagaaaaagaaaaaaaaggccacaaaaguucccucucacuuucaguaaauaaaauaaaagcagcaacagaaauaaagaaauaaaugaaauucaaaaugaaauaaauauuguguugugcagcauuaaaaaaucaauaaaaauuaaaaaugagcaagaucuaaaaaaaaaaaaaaaaaaaaaaaaaaaaaaaaaaaaaaaaaaaaaaaaaaaaaaaaaaaaaaaaugcaucccccccccccccccccccccccccccccccaaaggcucuuuucagagccaccagaauu

SEQ ID NO: 10353 - RNA, 1761 nt, Artificial Sequence
  mRNA product Design f-1 comprising derived and/or modified sequence from HRSV(A2)__P03418.1__N (opt2)
gggagagcggcucggccauuuugucccagucaguccggaggcugcggcugcagaaguaccgccugcggaguaacugcaaagaagcuuaccauggcccucuccaaggucaagcucaacgacacccucaacaaggaccagcuccucuccuccuccaaguacaccauccagcgcuccaccggcgacuccaucgacacccccaacuacgacguccagaagcacaucaacaagcucugcggcaugcuccucaucaccgaggacgccaaccacaaguucaccggccucaucggcaugcucuacgccaugucccgccucggccgcgaggacaccaucaagauccuccgcgacgccggcuaccacgucaaggccaacggcgucgacgucaccacccaccgccaggacaucaacggcaaggagaugaaguucgagguccucacccucgccucccucaccaccgagauccagaucaacaucgagaucgagucccgcaaguccuacaagaagaugcucaaggagaugggcgaggucgcccccgaguaccgccacgacucccccgacugcggcaugaucauccucugcaucgccgcccucgucaucaccaagcucgccgccggcgaccgcuccggccucaccgccgucauccgccgcgccaacaacguccucaagaacgagaugaagcgcuacaagggccuccuccccaaggacaucgccaacuccuucuacgaggucuucgagaagcacccccacuucaucgacgucuucguccacuucggcaucgcccaguccuccacccgcggcggcucccgcgucgagggcaucuucgccggccucuucaugaacgccuacggcgccggccaggucaugcuccgcuggggcguccucgccaaguccgucaagaacaucaugcucggccacgccuccguccaggccgagauggagcaggucgucgaggucuacgaguacgcccagaagcucggcggcgaggccggcuucuaccacauccucaacaaccccaaggccucccuccucucccucacccaguucccccacuucuccuccgucguccucggcaacgccgccggccucggcaucaugggcgaguaccgcggcaccccccgcaaccaggaccucuacgacgccgccaaggccuacgccgagcagcucaaggagaacggcgucaucaacuacuccguccucgaccucaccgccgaggagcucgaggccaucaagcaccagcucaaccccaaggacaacgacgucgagcucugaggacuagugaagggaacacccaaauuuaauucagccuuaagcacaauuaauuaagagugaaacguaauuguacaagcaguuggucacccaccauagggcaugaucaacaccgcaaccuuuccuuuuucccccagugauucugaaaaaccccucuucccuucagcuugcuuagauguuccaaauuuaguaagcuuaaggcggccuacagaagaaaaagaaaaaaaaggccacaaaaguucccucucacuuucaguaaauaaaauaaaagcagcaacagaaauaaagaaauaaaugaaauucaaaaugaaauaaauauuguguugugcagcauuaaaaaaucaauaaaaauuaaaaaugagcaagaucuaaaaaaaaaaaaaaaaaaaaaaaaaaaaaaaaaaaaaaaaaaaaaaaaaaaaaaaaaaaaaaaaugcaucccccccccccccccccccccccccccccccaaaggcucuuuucagagccaccagaauu

SEQ ID NO: 10354 - RNA, 1761 nt, Artificial Sequence
  mRNA product Design f-1 comprising derived and/or modified sequence from HRSV(A2)__P03418.1__N (opt3)
gggagagcggcucggccauuuugucccagucaguccggaggcugcggcugcagaaguaccgccugcggaguaacugcaaagaagcuuaccauggcccugagcaaggugaaacucaacgacacccuuaauaaggaucagcuguuguccucuucaaaauacacaauccaaagaaguacuggcgacagcauugauacgcccaacuaugacguccagaagcacauaaauaaauuaugcgggaugcugcuaaucaccgaggaugcuaaccauaaguucacaggacucauugguaugcuguacgcaauguccaggcuuggccgggaagacacuaucaagauucugcgcgaugccggguaucacguuaaagcgaauggaguggacguaaccacacaucgacaggauaucaacggcaaggagaugaaauuugaaguguugacccucgcuucucugacuacagagauacagaucaauauugaaaucgagucgcguaagucauacaaaaagaugcugaaggagaugggugaagucgccccugaguauagacacgacagcccagauugugggaugauuauccucugcauagcagccuuagugauuaccaaacuggcugcaggagacaggaguggccuuacggccguuauccggcgcgcuaacaauguguugaagaacgaaaugaaaagauacaagggccugcuaccgaaagauauugccaauuccuucuaugaggucuuugagaagcauccccacuucaucgacguguuuguacacuucgggaucgcgcaaucuagcacuaggggagguucccggguugaaggcauuuuugcaggacucuucaugaacgccuacggggcuggccaggugaugcugcgcugggguguccuugccaaaucagugaagaauauaaugcuggggcaugcaagugugcaggcugagauggaacaggucguugagguguacgaauaugcccaaaaguugggaggcgaggcgggcuuuuaccacauccucaacaauccuaaagccagccuguuaucucugacccaguucccacauuuuuccucaguagugcucgggaacgcagcuggacuugguauuaugggcgaguaucgagggacacccagaaaccaggaccuguacgaugccgcuaaggccuaugcagaacaguugaaagagaauggagucaucaacuacagcgugcuagaccugacugccgaggaacucgaagcuauaaagcaccaacugaauccuaaagauaacgacguugagcuuugaggacuagugaagggaacacccaaauuuaauucagccuuaagcacaauuaauuaagagugaaacguaauuguacaagcaguuggucacccaccauagggcaugaucaacaccgcaaccuuuccuuuuucccccagugauucugaaaaaccccucuucccuucagcuugcuuagauguuccaaauuuaguaagcuuaaggcggccuacagaagaaaaagaaaaaaaaggccacaaaaguucccucucacuuucaguaaauaaaauaaaagcagcaacagaaauaaagaaauaaaugaaauucaaaaugaaauaaauauuguguugugcagcauuaaaaaaucaauaaaaauuaaaaaugagcaagaucuaaaaaaaaaaaaaaaaaaaaaaaaaaaaaaaaaaaaaaaaaaaaaaaaaaaaaaaaaaaaaaaaugcaucccccccccccccccccccccccccccccccaaaggcucuuuucagagccaccagaauu

SEQ ID NO: 10355 - RNA, 1761 nt, Artificial Sequence
  mRNA product Design f-1 comprising derived and/or modified sequence from HRSV(A2)__P03418.1__N (opt4)
gggagagcggcucggccauuuugucccagucaguccggaggcugcggcugcagaaguaccgccugcggaguaacugcaaagaagcuuaccauggcccugagcaaggugaagcugaacgacacccugaacaaggaccagcugcugagcagcagcaaguacaccauccagagaagcaccggcgacagcaucgacacccccaacuacgacgugcagaagcacaucaacaagcugugcggcaugcugcugaucaccgaggacgccaaccacaaguucaccggccugaucggcaugcuguacgccaugagcagacugggcagagaggacaccaucaagauccugagagacgccggcuaccacgugaaggccaacggcguggacgugaccacccacagacaggacaucaacggcaaggagaugaaguucgaggugcugacccuggccagccugaccaccgagauccagaucaacaucgagaucgagagcagaaagagcuacaagaagaugcugaaggagaugggcgagguggcccccgaguacagacacgacagccccgacugcggcaugaucauccugugcaucgccgcccuggugaucaccaagcuggccgccggcgacagaagcggccugaccgccgugaucagaagagccaacaacgugcugaagaacgagaugaagagauacaagggccugcugcccaaggacaucgccaacagcuucuacgagguguucgagaagcacccccacuucaucgacguguucgugcacuucggcaucgcccagagcagcaccagaggcggcagcagaguggagggcaucuucgccggccuguucaugaacgccuacggcgccggccaggugaugcugagauggggcgugcuggccaagagcgugaagaacaucaugcugggccacgccagcgugcaggccgagauggagcaggugguggagguguacgaguacgcccagaagcugggcggcgaggccggcuucuaccacauccugaacaaccccaaggccagccugcugagccugacccaguucccccacuucagcagcguggugcugggcaacgccgccggccugggcaucaugggcgaguacagaggcacccccagaaaccaggaccuguacgacgccgccaaggccuacgccgagcagcugaaggagaacggcgugaucaacuacagcgugcuggaccugaccgccgaggagcuggaggccaucaagcaccagcugaaccccaaggacaacgacguggagcugugaggacuagugaagggaacacccaaauuuaauucagccuuaagcacaauuaauuaagagugaaacguaauuguacaagcaguuggucacccaccauagggcaugaucaacaccgcaaccuuuccuuuuucccccagugauucugaaaaaccccucuucccuucagcuugcuuagauguuccaaauuuaguaagcuuaaggcggccuacagaagaaaaagaaaaaaaaggccacaaaaguucccucucacuuucaguaaauaaaauaaaagcagcaacagaaauaaagaaauaaaugaaauucaaaaugaaauaaauauuguguugugcagcauuaaaaaaucaauaaaaauuaaaaaugagcaagaucuaaaaaaaaaaaaaaaaaaaaaaaaaaaaaaaaaaaaaaaaaaaaaaaaaaaaaaaaaaaaaaaaugcaucccccccccccccccccccccccccccccccaaaggcucuuuucagagccaccagaauu

SEQ ID NO: 10356 - RNA, 1761 nt, Artificial Sequence
  mRNA product Design f-1 comprising derived and/or modified sequence from HRSV(A2)__P03418.1__N (opt5)
gggagagcggcucggccauuuugucccagucaguccggaggcugcggcugcagaaguaccgccugcggaguaacugcaaagaagcuuaccauggcccugagcaaggugaaacucaacgacacccugaauaaggaucagcuucuguccucuagcaaauacacaauccaaagauccacgggcgacucuauugauacccccaacuaugacguccagaagcacaucaauaaacucugcgggaugcugcuuauuacagaggaugcuaaccauaaguucaccggacugaucggcaugcucuacgccaugagccggcuggggcgcgaagacacaauuaagauccugagagaugcgggauaucacguuaaagcuaauggcguggacgugaccacacaucggcaggauaucaacgggaaggagaugaaauuugaaguccucacccuggccucccuuacgaccgagauucagaucaauauugaaaucgagucucgcaagagcuacaaaaagaugcugaaggagaugggagaaguggccccugaguauagacacgacuccccggauuguggcaugauuauccucugcauugcugcccugguuaucacaaaacuugcugccggcgaccggagcgggcugaccgcggugauccgcagagccaacaauguccucaagaacgaaaugaaacgguacaagggacugcugcccaaagauauugcuaauucuuucuaugagguguuugagaagcauccucacuucaucgacguuuuugugcacuucggcauugcccaauccagcacacgcgggggaucuagagucgaaggcaucuuugcuggacucuucaugaacgccuacggggcgggccaggugaugcugcgguggggcgugcuugccaaauccgucaagaauauuaugcuggggcaugcuagcguucaggccgagauggaacaggugguggaggucuacgaauaugcucaaaagcucggaggcgaggccggguuuuaccacauccugaacaaucccaaagccucucuucugucccucacccaguucccucauuuuagcuccgugguucugggaaacgcugcgggccuggggaucaugggagaguaucgcggcacgcccagaaaccaggaccucuacgaugccgcuaaggccuaugccgaacagcugaaagagaauggcgugauuaacuacucuguccuugaccugacagcugaggaacucgaagccaucaagcaccaacugaauccuaaagauaacgacguggagcuuugaggacuagugaagggaacacccaaauuuaauucagccuuaagcacaauuaauuaagagugaaacguaauuguacaagcaguuggucacccaccauagggcaugaucaacaccgcaaccuuuccuuuuucccccagugauucugaaaaaccccucuucccuucagcuugcuuagauguuccaaauuuaguaagcuuaaggcggccuacagaagaaaaagaaaaaaaaggccacaaaaguucccucucacuuucaguaaauaaaauaaaagcagcaacagaaauaaagaaauaaaugaaauucaaaaugaaauaaauauuguguugugcagcauuaaaaaaucaauaaaaauuaaaaaugagcaagaucuaaaaaaaaaaaaaaaaaaaaaaaaaaaaaaaaaaaaaaaaaaaaaaaaaaaaaaaaaaaaaaaaugcaucccccccccccccccccccccccccccccccaaaggcucuuuucagagccaccagaauu

SEQ ID NO: 10357 - RNA, 1761 nt, Artificial Sequence
  mRNA product Design f-1 comprising derived and/or modified sequence from HRSV(A2)__P03418.1__N (opt6)
gggagagcggcucggccauuuugucccagucaguccggaggcugcggcugcagaaguaccgccugcggaguaacugcaaagaagcuuaccauggcacuaagcaaagucaaauuaaacgacacauuaaacaaagaccaacucuuaucaucaucaaaauacacaauacaaagaagcaccggagacaguaucgacacaccaaacuaugacguccaaaaacauauaaauaaauuaugcggcaugcucuuaaucacagaagacgccaaccauaaauuuacaggauuaauaggaauguuauaugcaaugucacgacuagguagagaagacacaauaaaaauacuaagagacgcaggcuaucacguaaaagcaaauggaguagacguaaccacacacagacaagacauaaauggaaaagaaaugaaauuugaaguauuaacacuagcaucacuaacaacagaaauacaaaucaacauagaaauagaaucaagaaaaagcuacaaaaaaauguuaaaagaaaugggagaagucgcaccagaauauagacaugauucaccagacugcggaaugauaauacuaugcauagcagcccuaguaauuacaaaacuagcagcaggagacagaagcggauuaacagcaguaauaagaagagcaaacaacguacuaaaaaacgaaaugaaaagauauaaaggauuauuaccaaaagacauagcaaacucauucuaugaaguauucgaaaaacacccccacuuuauagacgucuucguacacuucggaauagcccaaucauccacaagaggaggaucaagagucgaaggaauauucgcaggauuauucaugaacgcauauggcgcaggacaaguaaugcuaagauggggaguacuagcaaaauccgucaaaaacauaaugcuaggacacgcaucaguucaagcagaaauggaacaaguaguagaaguauacgaauacgcccaaaaacuaggaggagaagcaggauucuaccacauacuaaauaauccaaaagcaucacuacuaagccuaacccaauuuccccacuucucaaguguaguauuaggaaaugcagcuggacuaggaauaaugggagaauacagaggaacaccaagaaaccaagacuuauacgacgcagcaaaagcauacgcagagcaacuuaaagaaaacggaguaauaaacuauagcguacuagacuuaacagcagaagaacuggaagcaauaaaacaucaauuaaacccgaaagacaaugacguagaauuauaaggacuagugaagggaacacccaaauuuaauucagccuuaagcacaauuaauuaagagugaaacguaauuguacaagcaguuggucacccaccauagggcaugaucaacaccgcaaccuuuccuuuuucccccagugauucugaaaaaccccucuucccuucagcuugcuuagauguuccaaauuuaguaagcuuaaggcggccuacagaagaaaaagaaaaaaaaggccacaaaaguucccucucacuuucaguaaauaaaauaaaagcagcaacagaaauaaagaaauaaaugaaauucaaaaugaaauaaauauuguguugugcagcauuaaaaaaucaauaaaaauuaaaaaugagcaagaucuaaaaaaaaaaaaaaaaaaaaaaaaaaaaaaaaaaaaaaaaaaaaaaaaaaaaaaaaaaaaaaaaugcaucccccccccccccccccccccccccccccccaaaggcucuuuucagagccaccagaauu

SEQ ID NO: 10358 - RNA, 1761 nt, Artificial Sequence
  mRNA product Design f-1 comprising derived and/or modified sequence from HRSV(A2)__P03418.1__N (opt11)
gggagagcggcucggccauuuugucccagucaguccggaggcugcggcugcagaaguaccgccugcggaguaacugcaaagaagcuuaccauggcacucucgaaaguaaaacucaacgacacccucaacaaagaccaacuccuuuccagcuccaaauacaccauccaacgauccaccggagacuccaucgacacgcccaacuacgacguccagaaacacaucaacaagcucugcggaaugcuacuaaucaccgaggacgccaaccacaaauucacaggacuuauagggaugcucuacgccaugucccgccucggacgcgaagacacaauaaaaauccuacgagacgccggcuaccacguaaaggcaaacggcgucgacgucaccacacacagacaagacaucaacggaaaggaaaugaaauucgaaguccucacccucgccagccuaaccaccgagauccaaaucaacaucgaaaucgaaucacgcaaauccuacaagaaaaugcucaaagaaaugggagaagucgcccccgaauaccgucacgacucgcccgacugcggcaugauaauccuaugcaucgccgcacucgucauaaccaaacucgccgccggugaccgaucaggacugacagcagucauccgccgagcaaacaacgugcucaaaaacgaaaugaaacgcuacaaaggccuacuccccaaagacaucgccaacuccuucuacgaagucuucgaaaaacacccacacuucaucgacgucuucguccacuucggcaucgcacaaucaucaaccagaggcggcagccgcguugaaggcaucuucgcaggacucuuuaugaacgccuacggcgccggccaagucaugcuccgcuggggcguccuggcaaaaagcgucaaaaacaucaugcuaggccacgcuagcguccaagccgaaauggaacaagucgucgaaguuuacgaguacgcacaaaaacucggcggcgaagcaggcuucuaccacauccuaaacaaccccaaagccucccugcuaucacucacccaauucccccacuucuccagcgucguccucggcaacgccgcaggacuaggcaucaugggagaauaccgcgggacaccgcgcaaccaagaccucuacgacgccgccaaagccuacgccgaacaacucaaagaaaacggcgucauaaacuacucaguccucgaccucaccgccgaagaacucgaagccaucaaacaccaacucaacccaaaagacaacgacgucgaauuauaaggacuagugaagggaacacccaaauuuaauucagccuuaagcacaauuaauuaagagugaaacguaauuguacaagcaguuggucacccaccauagggcaugaucaacaccgcaaccuuuccuuuuucccccagugauucugaaaaaccccucuucccuucagcuugcuuagauguuccaaauuuaguaagcuuaaggcggccuacagaagaaaaagaaaaaaaaggccacaaaaguucccucucacuuucaguaaauaaaauaaaagcagcaacagaaauaaagaaauaaaugaaauucaaaaugaaauaaauauuguguugugcagcauuaaaaaaucaauaaaaauuaaaaaugagcaagaucuaaaaaaaaaaaaaaaaaaaaaaaaaaaaaaaaaaaaaaaaaaaaaaaaaaaaaaaaaaaaaaaaugcaucccccccccccccccccccccccccccccccaaaggcucuuuucagagccaccagaauu

SEQ ID NO: 10359 - RNA, 1541 nt, Artificial Sequence
  mRNA product Design f-2 comprising derived and/or modified sequence from HRSV(A2)__P03418.1__N (wt)
gggagagcggcucggccauuuugucccagucaguccggaggcugcggcugcagaaguaccgccugcggaguaacugcaaagaagcuuaccauggcucuuagcaaagucaaguugaaugauacacucaacaaagaucaacuucugucauccagcaaauacaccauccaacggagcacaggagauaguauugauacuccuaauuaugaugugcagaaacacaucaauaaguuauguggcauguuauuaaucacagaagaugcuaaucauaaauucacuggguuaauagguauguuauaugcgaugucuagguuaggaagagaagacaccauaaaaauacucagagaugcgggauaucauguaaaagcaaauggaguagauguaacaacacaucgucaagacauuaauggaaaagaaaugaaauuugaaguguuaacauuggcaagcuuaacaacugaaauucaaaucaacauugagauagaaucuagaaaauccuacaaaaaaaugcuaaaagaaaugggagagguagcuccagaauacaggcaugacucuccugauugugggaugauaauauuauguauagcagcauuaguaauaacuaaauuagcagcaggggacagaucuggucuuacagccgugauuaggagagcuaauaauguccuaaaaaaugaaaugaaacguuacaaaggcuuacuacccaaggacauagccaacagcuucuaugaaguguuugaaaaacauccccacuuuauagauguuuuuguucauuuugguauagcacaaucuucuaccagagguggcaguagaguugaagggauuuuugcaggauuguuuaugaaugccuauggugcagggcaagugauguuacgguggggagucuuagcaaaaucaguuaaaaauauuauguuaggacaugcuagugugcaagcagaaauggaacaaguuguugagguuuaugaauaugcccaaaaauuggguggugaagcaggauucuaccauauauugaacaacccaaaagcaucauuauuaucuuugacucaauuuccucacuucuccaguguaguauuaggcaaugcugcuggccuaggcauaaugggagaguacagagguacaccgaggaaucaagaucuauaugaugcagcaaaggcauaugcugaacaacucaaagaaaauggugugauuaacuacaguguacuagacuugacagcagaagaacuagaggcuaucaaacaucagcuuaauccaaaagauaaugauguagagcuuugaggacuaguggaagcauuuuccuggcugauuaaaagaaauuacucagcuauggucaucuguuccuguuagaaggcuaugcagcauauuauauacuaugcgcauguuaugaaaugcauaauaaaaaauuuuaaaaaaucuaaaagaucuaaaaaaaaaaaaaaaaaaaaaaaaaaaaaaaaaaaaaaaaaaaaaaaaaaaaaaaaaaaaaaaaugcaucccccccccccccccccccccccccccccccaaaggcucuuuucagagccaccagaauu

SEQ ID NO: 10360 - RNA, 1541 nt, Artificial Sequence
  mRNA product Design f-2 comprising derived and/or modified sequence from HRSV(A2)__P03418.1__N (opt1)
gggagagcggcucggccauuuugucccagucaguccggaggcugcggcugcagaaguaccgccugcggaguaacugcaaagaagcuuaccauggcccugagcaaggugaagcucaacgacacccugaacaaggaccagcugcucuccagcuccaaguacaccauccagcgcagcaccggcgacuccaucgacacccccaacuacgacguccagaagcacaucaacaagcugugcgggaugcugcucaucaccgaggacgccaaccacaaguucaccggccugaucgggaugcuguacgcgaugagccggcucggccgcgaggacacgaucaagauccugcgggacgccggguaccacgugaaggccaacggcguggacgucaccacccaccgccaggacaucaacggcaaggagaugaaguucgaggugcugacccucgccucccugacgaccgagauccagaucaacaucgagaucgagagccggaaguccuacaagaagaugcugaaggagaugggggagguggccccggaguaccgccacgacagccccgacugcggcaugaucauccucugcaucgcggcccuggucaucaccaagcuggccgccggggaccgguccggccucaccgcggugauccgccgggccaacaacgugcugaagaacgagaugaagcgcuacaaggggcugcuccccaaggacaucgccaacagcuucuacgaggucuucgagaagcacccccacuucaucgacguguucgugcacuucggcaucgcccaguccagcacgcggggcgggucccgcgucgagggcaucuucgccgggcuguucaugaacgcguacggcgccggccaggugaugcugcgguggggcgugcucgccaagagcgucaagaacaucaugcuggggcacgccuccgugcaggccgagauggagcaggucguggagguguacgaguacgcgcagaagcucgggggcgaggccggguucuaccacauccugaacaacccgaaggccagccugcugucccucacccaguucccccacuucagcagcgugguccugggcaacgccgccggccuggggaucaugggcgaguaccgcgggacgccccggaaccaggaccucuacgacgcggccaaggccuacgccgagcagcugaaggagaacggcgugaucaacuacuccgugcuggaccucaccgccgaggagcuggaggcgaucaagcaccagcugaaccccaaggacaacgacgucgagcucugaggacuaguggaagcauuuuccuggcugauuaaaagaaauuacucagcuauggucaucuguuccuguuagaaggcuaugcagcauauuauauacuaugcgcauguuaugaaaugcauaauaaaaaauuuuaaaaaaucuaaaagaucuaaaaaaaaaaaaaaaaaaaaaaaaaaaaaaaaaaaaaaaaaaaaaaaaaaaaaaaaaaaaaaaaugcaucccccccccccccccccccccccccccccccaaaggcucuuuucagagccaccagaauu

SEQ ID NO: 10361 - RNA, 1541 nt, Artificial Sequence
  mRNA product Design f-2 comprising derived and/or modified sequence from HRSV(A2)__P03418.1__N (opt2)
gggagagcggcucggccauuuugucccagucaguccggaggcugcggcugcagaaguaccgccugcggaguaacugcaaagaagcuuaccauggcccucuccaaggucaagcucaacgacacccucaacaaggaccagcuccucuccuccuccaaguacaccauccagcgcuccaccggcgacuccaucgacacccccaacuacgacguccagaagcacaucaacaagcucugcggcaugcuccucaucaccgaggacgccaaccacaaguucaccggccucaucggcaugcucuacgccaugucccgccucggccgcgaggacaccaucaagauccuccgcgacgccggcuaccacgucaaggccaacggcgucgacgucaccacccaccgccaggacaucaacggcaaggagaugaaguucgagguccucacccucgccucccucaccaccgagauccagaucaacaucgagaucgagucccgcaaguccuacaagaagaugcucaaggagaugggcgaggucgcccccgaguaccgccacgacucccccgacugcggcaugaucauccucugcaucgccgcccucgucaucaccaagcucgccgccggcgaccgcuccggccucaccgccgucauccgccgcgccaacaacguccucaagaacgagaugaagcgcuacaagggccuccuccccaaggacaucgccaacuccuucuacgaggucuucgagaagcacccccacuucaucgacgucuucguccacuucggcaucgcccaguccuccacccgcggcggcucccgcgucgagggcaucuucgccggccucuucaugaacgccuacggcgccggccaggucaugcuccgcuggggcguccucgccaaguccgucaagaacaucaugcucggccacgccuccguccaggccgagauggagcaggucgucgaggucuacgaguacgcccagaagcucggcggcgaggccggcuucuaccacauccucaacaaccccaaggccucccuccucucccucacccaguucccccacuucuccuccgucguccucggcaacgccgccggccucggcaucaugggcgaguaccgcggcaccccccgcaaccaggaccucuacgacgccgccaaggccuacgccgagcagcucaaggagaacggcgucaucaacuacuccguccucgaccucaccgccgaggagcucgaggccaucaagcaccagcucaaccccaaggacaacgacgucgagcucugaggacuaguggaagcauuuuccuggcugauuaaaagaaauuacucagcuauggucaucuguuccuguuagaaggcuaugcagcauauuauauacuaugcgcauguuaugaaaugcauaauaaaaaauuuuaaaaaaucuaaaagaucuaaaaaaaaaaaaaaaaaaaaaaaaaaaaaaaaaaaaaaaaaaaaaaaaaaaaaaaaaaaaaaaaugcaucccccccccccccccccccccccccccccccaaaggcucuuuucagagccaccagaauu

SEQ ID NO: 10362 - RNA, 1541 nt, Artificial Sequence
  mRNA product Design f-2 comprising derived and/or modified sequence from HRSV(A2)__P03418.1__N (opt3)
gggagagcggcucggccauuuugucccagucaguccggaggcugcggcugcagaaguaccgccugcggaguaacugcaaagaagcuuaccauggcccugagcaaggugaaacucaacgacacccuuaauaaggaucagcuguuguccucuucaaaauacacaauccaaagaaguacuggcgacagcauugauacgcccaacuaugacguccagaagcacauaaauaaauuaugcgggaugcugcuaaucaccgaggaugcuaaccauaaguucacaggacucauugguaugcuguacgcaauguccaggcuuggccgggaagacacuaucaagauucugcgcgaugccggguaucacguuaaagcgaauggaguggacguaaccacacaucgacaggauaucaacggcaaggagaugaaauuugaaguguugacccucgcuucucugacuacagagauacagaucaauauugaaaucgagucgcguaagucauacaaaaagaugcugaaggagaugggugaagucgccccugaguauagacacgacagcccagauugugggaugauuauccucugcauagcagccuuagugauuaccaaacuggcugcaggagacaggaguggccuuacggccguuauccggcgcgcuaacaauguguugaagaacgaaaugaaaagauacaagggccugcuaccgaaagauauugccaauuccuucuaugaggucuuugagaagcauccccacuucaucgacguguuuguacacuucgggaucgcgcaaucuagcacuaggggagguucccggguugaaggcauuuuugcaggacucuucaugaacgccuacggggcuggccaggugaugcugcgcugggguguccuugccaaaucagugaagaauauaaugcuggggcaugcaagugugcaggcugagauggaacaggucguugagguguacgaauaugcccaaaaguugggaggcgaggcgggcuuuuaccacauccucaacaauccuaaagccagccuguuaucucugacccaguucccacauuuuuccucaguagugcucgggaacgcagcuggacuugguauuaugggcgaguaucgagggacacccagaaaccaggaccuguacgaugccgcuaaggccuaugcagaacaguugaaagagaauggagucaucaacuacagcgugcuagaccugacugccgaggaacucgaagcuauaaagcaccaacugaauccuaaagauaacgacguugagcuuugaggacuaguggaagcauuuuccuggcugauuaaaagaaauuacucagcuauggucaucuguuccuguuagaaggcuaugcagcauauuauauacuaugcgcauguuaugaaaugcauaauaaaaaauuuuaaaaaaucuaaaagaucuaaaaaaaaaaaaaaaaaaaaaaaaaaaaaaaaaaaaaaaaaaaaaaaaaaaaaaaaaaaaaaaaugcaucccccccccccccccccccccccccccccccaaaggcucuuuucagagccaccagaauu

SEQ ID NO: 10363 - RNA, 1541 nt, Artificial Sequence
  mRNA product Design f-2 comprising derived and/or modified sequence from HRSV(A2)__P03418.1__N (opt4)
gggagagcggcucggccauuuugucccagucaguccggaggcugcggcugcagaaguaccgccugcggaguaacugcaaagaagcuuaccauggcccugagcaaggugaagcugaacgacacccugaacaaggaccagcugcugagcagcagcaaguacaccauccagagaagcaccggcgacagcaucgacacccccaacuacgacgugcagaagcacaucaacaagcugugcggcaugcugcugaucaccgaggacgccaaccacaaguucaccggccugaucggcaugcuguacgccaugagcagacugggcagagaggacaccaucaagauccugagagacgccggcuaccacgugaaggccaacggcguggacgugaccacccacagacaggacaucaacggcaaggagaugaaguucgaggugcugacccuggccagccugaccaccgagauccagaucaacaucgagaucgagagcagaaagagcuacaagaagaugcugaaggagaugggcgagguggcccccgaguacagacacgacagccccgacugcggcaugaucauccugugcaucgccgcccuggugaucaccaagcuggccgccggcgacagaagcggccugaccgccgugaucagaagagccaacaacgugcugaagaacgagaugaagagauacaagggccugcugcccaaggacaucgccaacagcuucuacgagguguucgagaagcacccccacuucaucgacguguucgugcacuucggcaucgcccagagcagcaccagaggcggcagcagaguggagggcaucuucgccggccuguucaugaacgccuacggcgccggccaggugaugcugagauggggcgugcuggccaagagcgugaagaacaucaugcugggccacgccagcgugcaggccgagauggagcaggugguggagguguacgaguacgcccagaagcugggcggcgaggccggcuucuaccacauccugaacaaccccaaggccagccugcugagccugacccaguucccccacuucagcagcguggugcugggcaacgccgccggccugggcaucaugggcgaguacagaggcacccccagaaaccaggaccuguacgacgccgccaaggccuacgccgagcagcugaaggagaacggcgugaucaacuacagcgugcuggaccugaccgccgaggagcuggaggccaucaagcaccagcugaaccccaaggacaacgacguggagcugugaggacuaguggaagcauuuuccuggcugauuaaaagaaauuacucagcuauggucaucuguuccuguuagaaggcuaugcagcauauuauauacuaugcgcauguuaugaaaugcauaauaaaaaauuuuaaaaaaucuaaaagaucuaaaaaaaaaaaaaaaaaaaaaaaaaaaaaaaaaaaaaaaaaaaaaaaaaaaaaaaaaaaaaaaaugcaucccccccccccccccccccccccccccccccaaaggcucuuuucagagccaccagaauu

SEQ ID NO: 10364 - RNA, 1541 nt, Artificial Sequence
  mRNA product Design f-2 comprising derived and/or modified sequence from HRSV(A2)__P03418.1__N (opt5)
gggagagcggcucggccauuuugucccagucaguccggaggcugcggcugcagaaguaccgccugcggaguaacugcaaagaagcuuaccauggcccugagcaaggugaaacucaacgacacccugaauaaggaucagcuucuguccucuagcaaauacacaauccaaagauccacgggcgacucuauugauacccccaacuaugacguccagaagcacaucaauaaacucugcgggaugcugcuuauuacagaggaugcuaaccauaaguucaccggacugaucggcaugcucuacgccaugagccggcuggggcgcgaagacacaauuaagauccugagagaugcgggauaucacguuaaagcuaauggcguggacgugaccacacaucggcaggauaucaacgggaaggagaugaaauuugaaguccucacccuggccucccuuacgaccgagauucagaucaauauugaaaucgagucucgcaagagcuacaaaaagaugcugaaggagaugggagaaguggccccugaguauagacacgacuccccggauuguggcaugauuauccucugcauugcugcccugguuaucacaaaacuugcugccggcgaccggagcgggcugaccgcggugauccgcagagccaacaauguccucaagaacgaaaugaaacgguacaagggacugcugcccaaagauauugcuaauucuuucuaugagguguuugagaagcauccucacuucaucgacguuuuugugcacuucggcauugcccaauccagcacacgcgggggaucuagagucgaaggcaucuuugcuggacucuucaugaacgccuacggggcgggccaggugaugcugcgguggggcgugcuugccaaauccgucaagaauauuaugcuggggcaugcuagcguucaggccgagauggaacaggugguggaggucuacgaauaugcucaaaagcucggaggcgaggccggguuuuaccacauccugaacaaucccaaagccucucuucugucccucacccaguucccucauuuuagcuccgugguucugggaaacgcugcgggccuggggaucaugggagaguaucgcggcacgcccagaaaccaggaccucuacgaugccgcuaaggccuaugccgaacagcugaaagagaauggcgugauuaacuacucuguccuugaccugacagcugaggaacucgaagccaucaagcaccaacugaauccuaaagauaacgacguggagcuuugaggacuaguggaagcauuuuccuggcugauuaaaagaaauuacucagcuauggucaucuguuccuguuagaaggcuaugcagcauauuauauacuaugcgcauguuaugaaaugcauaauaaaaaauuuuaaaaaaucuaaaagaucuaaaaaaaaaaaaaaaaaaaaaaaaaaaaaaaaaaaaaaaaaaaaaaaaaaaaaaaaaaaaaaaaugcaucccccccccccccccccccccccccccccccaaaggcucuuuucagagccaccagaauu

SEQ ID NO: 10365 - RNA, 1541 nt, Artificial Sequence
  mRNA product Design f-2 comprising derived and/or modified sequence from HRSV(A2)__P03418.1__N (opt6)
gggagagcggcucggccauuuugucccagucaguccggaggcugcggcugcagaaguaccgccugcggaguaacugcaaagaagcuuaccauggcacuaagcaaagucaaauuaaacgacacauuaaacaaagaccaacucuuaucaucaucaaaauacacaauacaaagaagcaccggagacaguaucgacacaccaaacuaugacguccaaaaacauauaaauaaauuaugcggcaugcucuuaaucacagaagacgccaaccauaaauuuacaggauuaauaggaauguuauaugcaaugucacgacuagguagagaagacacaauaaaaauacuaagagacgcaggcuaucacguaaaagcaaauggaguagacguaaccacacacagacaagacauaaauggaaaagaaaugaaauuugaaguauuaacacuagcaucacuaacaacagaaauacaaaucaacauagaaauagaaucaagaaaaagcuacaaaaaaauguuaaaagaaaugggagaagucgcaccagaauauagacaugauucaccagacugcggaaugauaauacuaugcauagcagcccuaguaauuacaaaacuagcagcaggagacagaagcggauuaacagcaguaauaagaagagcaaacaacguacuaaaaaacgaaaugaaaagauauaaaggauuauuaccaaaagacauagcaaacucauucuaugaaguauucgaaaaacacccccacuuuauagacgucuucguacacuucggaauagcccaaucauccacaagaggaggaucaagagucgaaggaauauucgcaggauuauucaugaacgcauauggcgcaggacaaguaaugcuaagauggggaguacuagcaaaauccgucaaaaacauaaugcuaggacacgcaucaguucaagcagaaauggaacaaguaguagaaguauacgaauacgcccaaaaacuaggaggagaagcaggauucuaccacauacuaaauaauccaaaagcaucacuacuaagccuaacccaauuuccccacuucucaaguguaguauuaggaaaugcagcuggacuaggaauaaugggagaauacagaggaacaccaagaaaccaagacuuauacgacgcagcaaaagcauacgcagagcaacuuaaagaaaacggaguaauaaacuauagcguacuagacuuaacagcagaagaacuggaagcaauaaaacaucaauuaaacccgaaagacaaugacguagaauuauaaggacuaguggaagcauuuuccuggcugauuaaaagaaauuacucagcuauggucaucuguuccuguuagaaggcuaugcagcauauuauauacuaugcgcauguuaugaaaugcauaauaaaaaauuuuaaaaaaucuaaaagaucuaaaaaaaaaaaaaaaaaaaaaaaaaaaaaaaaaaaaaaaaaaaaaaaaaaaaaaaaaaaaaaaaugcaucccccccccccccccccccccccccccccccaaaggcucuuuucagagccaccagaauu

SEQ ID NO: 10366 - RNA, 1541 nt, Artificial Sequence
  mRNA product Design f-2 comprising derived and/or modified sequence from HRSV(A2)__P03418.1__N (opt11)
gggagagcggcucggccauuuugucccagucaguccggaggcugcggcugcagaaguaccgccugcggaguaacugcaaagaagcuuaccauggcacucucgaaaguaaaacucaacgacacccucaacaaagaccaacuccuuuccagcuccaaauacaccauccaacgauccaccggagacuccaucgacacgcccaacuacgacguccagaaacacaucaacaagcucugcggaaugcuacuaaucaccgaggacgccaaccacaaauucacaggacuuauagggaugcucuacgccaugucccgccucggacgcgaagacacaauaaaaauccuacgagacgccggcuaccacguaaaggcaaacggcgucgacgucaccacacacagacaagacaucaacggaaaggaaaugaaauucgaaguccucacccucgccagccuaaccaccgagauccaaaucaacaucgaaaucgaaucacgcaaauccuacaagaaaaugcucaaagaaaugggagaagucgcccccgaauaccgucacgacucgcccgacugcggcaugauaauccuaugcaucgccgcacucgucauaaccaaacucgccgccggugaccgaucaggacugacagcagucauccgccgagcaaacaacgugcucaaaaacgaaaugaaacgcuacaaaggccuacuccccaaagacaucgccaacuccuucuacgaagucuucgaaaaacacccacacuucaucgacgucuucguccacuucggcaucgcacaaucaucaaccagaggcggcagccgcguugaaggcaucuucgcaggacucuuuaugaacgccuacggcgccggccaagucaugcuccgcuggggcguccuggcaaaaagcgucaaaaacaucaugcuaggccacgcuagcguccaagccgaaauggaacaagucgucgaaguuuacgaguacgcacaaaaacucggcggcgaagcaggcuucuaccacauccuaaacaaccccaaagccucccugcuaucacucacccaauucccccacuucuccagcgucguccucggcaacgccgcaggacuaggcaucaugggagaauaccgcgggacaccgcgcaaccaagaccucuacgacgccgccaaagccuacgccgaacaacucaaagaaaacggcgucauaaacuacucaguccucgaccucaccgccgaagaacucgaagccaucaaacaccaacucaacccaaaagacaacgacgucgaauuauaaggacuaguggaagcauuuuccuggcugauuaaaagaaauuacucagcuauggucaucuguuccuguuagaaggcuaugcagcauauuauauacuaugcgcauguuaugaaaugcauaauaaaaaauuuuaaaaaaucuaaaagaucuaaaaaaaaaaaaaaaaaaaaaaaaaaaaaaaaaaaaaaaaaaaaaaaaaaaaaaaaaaaaaaaaugcaucccccccccccccccccccccccccccccccaaaggcucuuuucagagccaccagaauu

SEQ ID NO: 10367 - RNA, 1532 nt, Artificial Sequence
  mRNA product Design f-3 comprising derived and/or modified sequence from HRSV(A2)__P03418.1__N (wt)
gggagagucccgcagucggcguccagcggcucugcuuguucgugugugugucguugcaggccuuauucaagcuuaccauggcucuuagcaaagucaaguugaaugauacacucaacaaagaucaacuucugucauccagcaaauacaccauccaacggagcacaggagauaguauugauacuccuaauuaugaugugcagaaacacaucaauaaguuauguggcauguuauuaaucacagaagaugcuaaucauaaauucacuggguuaauagguauguuauaugcgaugucuagguuaggaagagaagacaccauaaaaauacucagagaugcgggauaucauguaaaagcaaauggaguagauguaacaacacaucgucaagacauuaauggaaaagaaaugaaauuugaaguguuaacauuggcaagcuuaacaacugaaauucaaaucaacauugagauagaaucuagaaaauccuacaaaaaaaugcuaaaagaaaugggagagguagcuccagaauacaggcaugacucuccugauugugggaugauaauauuauguauagcagcauuaguaauaacuaaauuagcagcaggggacagaucuggucuuacagccgugauuaggagagcuaauaauguccuaaaaaaugaaaugaaacguuacaaaggcuuacuacccaaggacauagccaacagcuucuaugaaguguuugaaaaacauccccacuuuauagauguuuuuguucauuuugguauagcacaaucuucuaccagagguggcaguagaguugaagggauuuuugcaggauuguuuaugaaugccuauggugcagggcaagugauguuacgguggggagucuuagcaaaaucaguuaaaaauauuauguuaggacaugcuagugugcaagcagaaauggaacaaguuguugagguuuaugaauaugcccaaaaauuggguggugaagcaggauucuaccauauauugaacaacccaaaagcaucauuauuaucuuugacucaauuuccucacuucuccaguguaguauuaggcaaugcugcuggccuaggcauaaugggagaguacagagguacaccgaggaaucaagaucuauaugaugcagcaaaggcauaugcugaacaacucaaagaaaauggugugauuaacuacaguguacuagacuugacagcagaagaacuagaggcuaucaaacaucagcuuaauccaaaagauaaugauguagagcuuugaggacuaguacuggcugcaucucccuuuccucuguccuccauccuucucccaggauggugaagggggaccugguacccagugauccccaccccaggauccuaaaucaugacuuaccugcuaauaaaaacucauuggaaaagugagaagaucuaaaaaaaaaaaaaaaaaaaaaaaaaaaaaaaaaaaaaaaaaaaaaaaaaaaaaaaaaaaaaaaaugcaucccccccccccccccccccccccccccccccaaaggcucuuuucagagccaccagaauu

SEQ ID NO: 10368 - RNA, 1532 nt, Artificial Sequence
  mRNA product Design f-3 comprising derived and/or modified sequence from HRSV(A2)__P03418.1__N (opt1)
gggagagucccgcagucggcguccagcggcucugcuuguucgugugugugucguugcaggccuuauucaagcuuaccauggcccugagcaaggugaagcucaacgacacccugaacaaggaccagcugcucuccagcuccaaguacaccauccagcgcagcaccggcgacuccaucgacacccccaacuacgacguccagaagcacaucaacaagcugugcgggaugcugcucaucaccgaggacgccaaccacaaguucaccggccugaucgggaugcuguacgcgaugagccggcucggccgcgaggacacgaucaagauccugcgggacgccggguaccacgugaaggccaacggcguggacgucaccacccaccgccaggacaucaacggcaaggagaugaaguucgaggugcugacccucgccucccugacgaccgagauccagaucaacaucgagaucgagagccggaaguccuacaagaagaugcugaaggagaugggggagguggccccggaguaccgccacgacagccccgacugcggcaugaucauccucugcaucgcggcccuggucaucaccaagcuggccgccggggaccgguccggccucaccgcggugauccgccgggccaacaacgugcugaagaacgagaugaagcgcuacaaggggcugcuccccaaggacaucgccaacagcuucuacgaggucuucgagaagcacccccacuucaucgacguguucgugcacuucggcaucgcccaguccagcacgcggggcgggucccgcgucgagggcaucuucgccgggcuguucaugaacgcguacggcgccggccaggugaugcugcgguggggcgugcucgccaagagcgucaagaacaucaugcuggggcacgccuccgugcaggccgagauggagcaggucguggagguguacgaguacgcgcagaagcucgggggcgaggccggguucuaccacauccugaacaacccgaaggccagccugcugucccucacccaguucccccacuucagcagcgugguccugggcaacgccgccggccuggggaucaugggcgaguaccgcgggacgccccggaaccaggaccucuacgacgcggccaaggccuacgccgagcagcugaaggagaacggcgugaucaacuacuccgugcuggaccucaccgccgaggagcuggaggcgaucaagcaccagcugaaccccaaggacaacgacgucgagcucugaggacuaguacuggcugcaucucccuuuccucuguccuccauccuucucccaggauggugaagggggaccugguacccagugauccccaccccaggauccuaaaucaugacuuaccugcuaauaaaaacucauuggaaaagugagaagaucuaaaaaaaaaaaaaaaaaaaaaaaaaaaaaaaaaaaaaaaaaaaaaaaaaaaaaaaaaaaaaaaaugcaucccccccccccccccccccccccccccccccaaaggcucuuuucagagccaccagaauu

SEQ ID NO: 10369 - RNA, 1532 nt, Artificial Sequence
  mRNA product Design f-3 comprising derived and/or modified sequence from HRSV(A2)__P03418.1__N (opt2)
gggagagucccgcagucggcguccagcggcucugcuuguucgugugugugucguugcaggccuuauucaagcuuaccauggcccucuccaaggucaagcucaacgacacccucaacaaggaccagcuccucuccuccuccaaguacaccauccagcgcuccaccggcgacuccaucgacacccccaacuacgacguccagaagcacaucaacaagcucugcggcaugcuccucaucaccgaggacgccaaccacaaguucaccggccucaucggcaugcucuacgccaugucccgccucggccgcgaggacaccaucaagauccuccgcgacgccggcuaccacgucaaggccaacggcgucgacgucaccacccaccgccaggacaucaacggcaaggagaugaaguucgagguccucacccucgccucccucaccaccgagauccagaucaacaucgagaucgagucccgcaaguccuacaagaagaugcucaaggagaugggcgaggucgcccccgaguaccgccacgacucccccgacugcggcaugaucauccucugcaucgccgcccucgucaucaccaagcucgccgccggcgaccgcuccggccucaccgccgucauccgccgcgccaacaacguccucaagaacgagaugaagcgcuacaagggccuccuccccaaggacaucgccaacuccuucuacgaggucuucgagaagcacccccacuucaucgacgucuucguccacuucggcaucgcccaguccuccacccgcggcggcucccgcgucgagggcaucuucgccggccucuucaugaacgccuacggcgccggccaggucaugcuccgcuggggcguccucgccaaguccgucaagaacaucaugcucggccacgccuccguccaggccgagauggagcaggucgucgaggucuacgaguacgcccagaagcucggcggcgaggccggcuucuaccacauccucaacaaccccaaggccucccuccucucccucacccaguucccccacuucuccuccgucguccucggcaacgccgccggccucggcaucaugggcgaguaccgcggcaccccccgcaaccaggaccucuacgacgccgccaaggccuacgccgagcagcucaaggagaacggcgucaucaacuacuccguccucgaccucaccgccgaggagcucgaggccaucaagcaccagcucaaccccaaggacaacgacgucgagcucugaggacuaguacuggcugcaucucccuuuccucuguccuccauccuucucccaggauggugaagggggaccugguacccagugauccccaccccaggauccuaaaucaugacuuaccugcuaauaaaaacucauuggaaaagugagaagaucuaaaaaaaaaaaaaaaaaaaaaaaaaaaaaaaaaaaaaaaaaaaaaaaaaaaaaaaaaaaaaaaaugcaucccccccccccccccccccccccccccccccaaaggcucuuuucagagccaccagaauu

SEQ ID NO: 10370 - RNA, 1532 nt, Artificial Sequence
  mRNA product Design f-3 comprising derived and/or modified sequence from HRSV(A2)__P03418.1__N (opt3)
gggagagucccgcagucggcguccagcggcucugcuuguucgugugugugucguugcaggccuuauucaagcuuaccauggcccugagcaaggugaaacucaacgacacccuuaauaaggaucagcuguuguccucuucaaaauacacaauccaaagaaguacuggcgacagcauugauacgcccaacuaugacguccagaagcacauaaauaaauuaugcgggaugcugcuaaucaccgaggaugcuaaccauaaguucacaggacucauugguaugcuguacgcaauguccaggcuuggccgggaagacacuaucaagauucugcgcgaugccggguaucacguuaaagcgaauggaguggacguaaccacacaucgacaggauaucaacggcaaggagaugaaauuugaaguguugacccucgcuucucugacuacagagauacagaucaauauugaaaucgagucgcguaagucauacaaaaagaugcugaaggagaugggugaagucgccccugaguauagacacgacagcccagauugugggaugauuauccucugcauagcagccuuagugauuaccaaacuggcugcaggagacaggaguggccuuacggccguuauccggcgcgcuaacaauguguugaagaacgaaaugaaaagauacaagggccugcuaccgaaagauauugccaauuccuucuaugaggucuuugagaagcauccccacuucaucgacguguuuguacacuucgggaucgcgcaaucuagcacuaggggagguucccggguugaaggcauuuuugcaggacucuucaugaacgccuacggggcuggccaggugaugcugcgcugggguguccuugccaaaucagugaagaauauaaugcuggggcaugcaagugugcaggcugagauggaacaggucguugagguguacgaauaugcccaaaaguugggaggcgaggcgggcuuuuaccacauccucaacaauccuaaagccagccuguuaucucugacccaguucccacauuuuuccucaguagugcucgggaacgcagcuggacuugguauuaugggcgaguaucgagggacacccagaaaccaggaccuguacgaugccgcuaaggccuaugcagaacaguugaaagagaauggagucaucaacuacagcgugcuagaccugacugccgaggaacucgaagcuauaaagcaccaacugaauccuaaagauaacgacguugagcuuugaggacuaguacuggcugcaucucccuuuccucuguccuccauccuucucccaggauggugaagggggaccugguacccagugauccccaccccaggauccuaaaucaugacuuaccugcuaauaaaaacucauuggaaaagugagaagaucuaaaaaaaaaaaaaaaaaaaaaaaaaaaaaaaaaaaaaaaaaaaaaaaaaaaaaaaaaaaaaaaaugcaucccccccccccccccccccccccccccccccaaaggcucuuuucagagccaccagaauu

SEQ ID NO: 10371 - RNA, 1532 nt, Artificial Sequence
  mRNA product Design f-3 comprising derived and/or modified sequence from HRSV(A2)__P03418.1__N (opt4)
gggagagucccgcagucggcguccagcggcucugcuuguucgugugugugucguugcaggccuuauucaagcuuaccauggcccugagcaaggugaagcugaacgacacccugaacaaggaccagcugcugagcagcagcaaguacaccauccagagaagcaccggcgacagcaucgacacccccaacuacgacgugcagaagcacaucaacaagcugugcggcaugcugcugaucaccgaggacgccaaccacaaguucaccggccugaucggcaugcuguacgccaugagcagacugggcagagaggacaccaucaagauccugagagacgccggcuaccacgugaaggccaacggcguggacgugaccacccacagacaggacaucaacggcaaggagaugaaguucgaggugcugacccuggccagccugaccaccgagauccagaucaacaucgagaucgagagcagaaagagcuacaagaagaugcugaaggagaugggcgagguggcccccgaguacagacacgacagccccgacugcggcaugaucauccugugcaucgccgcccuggugaucaccaagcuggccgccggcgacagaagcggccugaccgccgugaucagaagagccaacaacgugcugaagaacgagaugaagagauacaagggccugcugcccaaggacaucgccaacagcuucuacgagguguucgagaagcacccccacuucaucgacguguucgugcacuucggcaucgcccagagcagcaccagaggcggcagcagaguggagggcaucuucgccggccuguucaugaacgccuacggcgccggccaggugaugcugagauggggcgugcuggccaagagcgugaagaacaucaugcugggccacgccagcgugcaggccgagauggagcaggugguggagguguacgaguacgcccagaagcugggcggcgaggccggcuucuaccacauccugaacaaccccaaggccagccugcugagccugacccaguucccccacuucagcagcguggugcugggcaacgccgccggccugggcaucaugggcgaguacagaggcacccccagaaaccaggaccuguacgacgccgccaaggccuacgccgagcagcugaaggagaacggcgugaucaacuacagcgugcuggaccugaccgccgaggagcuggaggccaucaagcaccagcugaaccccaaggacaacgacguggagcugugaggacuaguacuggcugcaucucccuuuccucuguccuccauccuucucccaggauggugaagggggaccugguacccagugauccccaccccaggauccuaaaucaugacuuaccugcuaauaaaaacucauuggaaaagugagaagaucuaaaaaaaaaaaaaaaaaaaaaaaaaaaaaaaaaaaaaaaaaaaaaaaaaaaaaaaaaaaaaaaaugcaucccccccccccccccccccccccccccccccaaaggcucuuuucagagccaccagaauu

SEQ ID NO: 10372 - RNA, 1532 nt, Artificial Sequence
  mRNA product Design f-3 comprising derived and/or modified sequence from HRSV(A2)__P03418.1__N (opt5)
gggagagucccgcagucggcguccagcggcucugcuuguucgugugugugucguugcaggccuuauucaagcuuaccauggcccugagcaaggugaaacucaacgacacccugaauaaggaucagcuucuguccucuagcaaauacacaauccaaagauccacgggcgacucuauugauacccccaacuaugacguccagaagcacaucaauaaacucugcgggaugcugcuuauuacagaggaugcuaaccauaaguucaccggacugaucggcaugcucuacgccaugagccggcuggggcgcgaagacacaauuaagauccugagagaugcgggauaucacguuaaagcuaauggcguggacgugaccacacaucggcaggauaucaacgggaaggagaugaaauuugaaguccucacccuggccucccuuacgaccgagauucagaucaauauugaaaucgagucucgcaagagcuacaaaaagaugcugaaggagaugggagaaguggccccugaguauagacacgacuccccggauuguggcaugauuauccucugcauugcugcccugguuaucacaaaacuugcugccggcgaccggagcgggcugaccgcggugauccgcagagccaacaauguccucaagaacgaaaugaaacgguacaagggacugcugcccaaagauauugcuaauucuuucuaugagguguuugagaagcauccucacuucaucgacguuuuugugcacuucggcauugcccaauccagcacacgcgggggaucuagagucgaaggcaucuuugcuggacucuucaugaacgccuacggggcgggccaggugaugcugcgguggggcgugcuugccaaauccgucaagaauauuaugcuggggcaugcuagcguucaggccgagauggaacaggugguggaggucuacgaauaugcucaaaagcucggaggcgaggccggguuuuaccacauccugaacaaucccaaagccucucuucugucccucacccaguucccucauuuuagcuccgugguucugggaaacgcugcgggccuggggaucaugggagaguaucgcggcacgcccagaaaccaggaccucuacgaugccgcuaaggccuaugccgaacagcugaaagagaauggcgugauuaacuacucuguccuugaccugacagcugaggaacucgaagccaucaagcaccaacugaauccuaaagauaacgacguggagcuuugaggacuaguacuggcugcaucucccuuuccucuguccuccauccuucucccaggauggugaagggggaccugguacccagugauccccaccccaggauccuaaaucaugacuuaccugcuaauaaaaacucauuggaaaagugagaagaucuaaaaaaaaaaaaaaaaaaaaaaaaaaaaaaaaaaaaaaaaaaaaaaaaaaaaaaaaaaaaaaaaugcaucccccccccccccccccccccccccccccccaaaggcucuuuucagagccaccagaauu

SEQ ID NO: 10373 - RNA, 1532 nt, Artificial Sequence
  mRNA product Design f-3 comprising derived and/or modified sequence from HRSV(A2)__P03418.1__N (opt6)
gggagagucccgcagucggcguccagcggcucugcuuguucgugugugugucguugcaggccuuauucaagcuuaccauggcacuaagcaaagucaaauuaaacgacacauuaaacaaagaccaacucuuaucaucaucaaaauacacaauacaaagaagcaccggagacaguaucgacacaccaaacuaugacguccaaaaacauauaaauaaauuaugcggcaugcucuuaaucacagaagacgccaaccauaaauuuacaggauuaauaggaauguuauaugcaaugucacgacuagguagagaagacacaauaaaaauacuaagagacgcaggcuaucacguaaaagcaaauggaguagacguaaccacacacagacaagacauaaauggaaaagaaaugaaauuugaaguauuaacacuagcaucacuaacaacagaaauacaaaucaacauagaaauagaaucaagaaaaagcuacaaaaaaauguuaaaagaaaugggagaagucgcaccagaauauagacaugauucaccagacugcggaaugauaauacuaugcauagcagcccuaguaauuacaaaacuagcagcaggagacagaagcggauuaacagcaguaauaagaagagcaaacaacguacuaaaaaacgaaaugaaaagauauaaaggauuauuaccaaaagacauagcaaacucauucuaugaaguauucgaaaaacacccccacuuuauagacgucuucguacacuucggaauagcccaaucauccacaagaggaggaucaagagucgaaggaauauucgcaggauuauucaugaacgcauauggcgcaggacaaguaaugcuaagauggggaguacuagcaaaauccgucaaaaacauaaugcuaggacacgcaucaguucaagcagaaauggaacaaguaguagaaguauacgaauacgcccaaaaacuaggaggagaagcaggauucuaccacauacuaaauaauccaaaagcaucacuacuaagccuaacccaauuuccccacuucucaaguguaguauuaggaaaugcagcuggacuaggaauaaugggagaauacagaggaacaccaagaaaccaagacuuauacgacgcagcaaaagcauacgcagagcaacuuaaagaaaacggaguaauaaacuauagcguacuagacuuaacagcagaagaacuggaagcaauaaaacaucaauuaaacccgaaagacaaugacguagaauuauaaggacuaguacuggcugcaucucccuuuccucuguccuccauccuucucccaggauggugaagggggaccugguacccagugauccccaccccaggauccuaaaucaugacuuaccugcuaauaaaaacucauuggaaaagugagaagaucuaaaaaaaaaaaaaaaaaaaaaaaaaaaaaaaaaaaaaaaaaaaaaaaaaaaaaaaaaaaaaaaaugcaucccccccccccccccccccccccccccccccaaaggcucuuuucagagccaccagaauu

SEQ ID NO: 10374 - RNA, 1532 nt, Artificial Sequence
  mRNA product Design f-3 comprising derived and/or modified sequence from HRSV(A2)__P03418.1__N (opt11)
gggagagucccgcagucggcguccagcggcucugcuuguucgugugugugucguugcaggccuuauucaagcuuaccauggcacucucgaaaguaaaacucaacgacacccucaacaaagaccaacuccuuuccagcuccaaauacaccauccaacgauccaccggagacuccaucgacacgcccaacuacgacguccagaaacacaucaacaagcucugcggaaugcuacuaaucaccgaggacgccaaccacaaauucacaggacuuauagggaugcucuacgccaugucccgccucggacgcgaagacacaauaaaaauccuacgagacgccggcuaccacguaaaggcaaacggcgucgacgucaccacacacagacaagacaucaacggaaaggaaaugaaauucgaaguccucacccucgccagccuaaccaccgagauccaaaucaacaucgaaaucgaaucacgcaaauccuacaagaaaaugcucaaagaaaugggagaagucgcccccgaauaccgucacgacucgcccgacugcggcaugauaauccuaugcaucgccgcacucgucauaaccaaacucgccgccggugaccgaucaggacugacagcagucauccgccgagcaaacaacgugcucaaaaacgaaaugaaacgcuacaaaggccuacuccccaaagacaucgccaacuccuucuacgaagucuucgaaaaacacccacacuucaucgacgucuucguccacuucggcaucgcacaaucaucaaccagaggcggcagccgcguugaaggcaucuucgcaggacucuuuaugaacgccuacggcgccggccaagucaugcuccgcuggggcguccuggcaaaaagcgucaaaaacaucaugcuaggccacgcuagcguccaagccgaaauggaacaagucgucgaaguuuacgaguacgcacaaaaacucggcggcgaagcaggcuucuaccacauccuaaacaaccccaaagccucccugcuaucacucacccaauucccccacuucuccagcgucguccucggcaacgccgcaggacuaggcaucaugggagaauaccgcgggacaccgcgcaaccaagaccucuacgacgccgccaaagccuacgccgaacaacucaaagaaaacggcgucauaaacuacucaguccucgaccucaccgccgaagaacucgaagccaucaaacaccaacucaacccaaaagacaacgacgucgaauuauaaggacuaguacuggcugcaucucccuuuccucuguccuccauccuucucccaggauggugaagggggaccugguacccagugauccccaccccaggauccuaaaucaugacuuaccugcuaauaaaaacucauuggaaaagugagaagaucuaaaaaaaaaaaaaaaaaaaaaaaaaaaaaaaaaaaaaaaaaaaaaaaaaaaaaaaaaaaaaaaaugcaucccccccccccccccccccccccccccccccaaaggcucuuuucagagccaccagaauu

SEQ ID NO: 10375 - RNA, 1748 nt, Artificial Sequence
  mRNA product Design f-4 comprising derived and/or modified sequence from HRSV(A2)__P03418.1__N (wt)
gggagagucccgcagucggcguccagcggcucugcuuguucgugugugugucguugcaggccuuauucaagcuuaccauggcucuuagcaaagucaaguugaaugauacacucaacaaagaucaacuucugucauccagcaaauacaccauccaacggagcacaggagauaguauugauacuccuaauuaugaugugcagaaacacaucaauaaguuauguggcauguuauuaaucacagaagaugcuaaucauaaauucacuggguuaauagguauguuauaugcgaugucuagguuaggaagagaagacaccauaaaaauacucagagaugcgggauaucauguaaaagcaaauggaguagauguaacaacacaucgucaagacauuaauggaaaagaaaugaaauuugaaguguuaacauuggcaagcuuaacaacugaaauucaaaucaacauugagauagaaucuagaaaauccuacaaaaaaaugcuaaaagaaaugggagagguagcuccagaauacaggcaugacucuccugauugugggaugauaauauuauguauagcagcauuaguaauaacuaaauuagcagcaggggacagaucuggucuuacagccgugauuaggagagcuaauaauguccuaaaaaaugaaaugaaacguuacaaaggcuuacuacccaaggacauagccaacagcuucuaugaaguguuugaaaaacauccccacuuuauagauguuuuuguucauuuugguauagcacaaucuucuaccagagguggcaguagaguugaagggauuuuugcaggauuguuuaugaaugccuauggugcagggcaagugauguuacgguggggagucuuagcaaaaucaguuaaaaauauuauguuaggacaugcuagugugcaagcagaaauggaacaaguuguugagguuuaugaauaugcccaaaaauuggguggugaagcaggauucuaccauauauugaacaacccaaaagcaucauuauuaucuuugacucaauuuccucacuucuccaguguaguauuaggcaaugcugcuggccuaggcauaaugggagaguacagagguacaccgaggaaucaagaucuauaugaugcagcaaaggcauaugcugaacaacucaaagaaaauggugugauuaacuacaguguacuagacuugacagcagaagaacuagaggcuaucaaacaucagcuuaauccaaaagauaaugauguagagcuuugaggacuagugaagggaacacccaaauuuaauucagccuuaagcacaauuaauuaagagugaaacguaauuguacaagcaguuggucacccaccauagggcaugaucaacaccgcaaccuuuccuuuuucccccagugauucugaaaaaccccucuucccuucagcuugcuuagauguuccaaauuuaguaagcuuaaggcggccuacagaagaaaaagaaaaaaaaggccacaaaaguucccucucacuuucaguaaauaaaauaaaagcagcaacagaaauaaagaaauaaaugaaauucaaaaugaaauaaauauuguguugugcagcauuaaaaaaucaauaaaaauuaaaaaugagcaagaucuaaaaaaaaaaaaaaaaaaaaaaaaaaaaaaaaaaaaaaaaaaaaaaaaaaaaaaaaaaaaaaaaugcaucccccccccccccccccccccccccccccccaaaggcucuuuucagagccaccagaauu

SEQ ID NO: 10376 - RNA, 1748 nt, Artificial Sequence
  mRNA product Design f-4 comprising derived and/or modified sequence from HRSV(A2)__P03418.1__N (opt1)
gggagagucccgcagucggcguccagcggcucugcuuguucgugugugugucguugcaggccuuauucaagcuuaccauggcccugagcaaggugaagcucaacgacacccugaacaaggaccagcugcucuccagcuccaaguacaccauccagcgcagcaccggcgacuccaucgacacccccaacuacgacguccagaagcacaucaacaagcugugcgggaugcugcucaucaccgaggacgccaaccacaaguucaccggccugaucgggaugcuguacgcgaugagccggcucggccgcgaggacacgaucaagauccugcgggacgccggguaccacgugaaggccaacggcguggacgucaccacccaccgccaggacaucaacggcaaggagaugaaguucgaggugcugacccucgccucccugacgaccgagauccagaucaacaucgagaucgagagccggaaguccuacaagaagaugcugaaggagaugggggagguggccccggaguaccgccacgacagccccgacugcggcaugaucauccucugcaucgcggcccuggucaucaccaagcuggccgccggggaccgguccggccucaccgcggugauccgccgggccaacaacgugcugaagaacgagaugaagcgcuacaaggggcugcuccccaaggacaucgccaacagcuucuacgaggucuucgagaagcacccccacuucaucgacguguucgugcacuucggcaucgcccaguccagcacgcggggcgggucccgcgucgagggcaucuucgccgggcuguucaugaacgcguacggcgccggccaggugaugcugcgguggggcgugcucgccaagagcgucaagaacaucaugcuggggcacgccuccgugcaggccgagauggagcaggucguggagguguacgaguacgcgcagaagcucgggggcgaggccggguucuaccacauccugaacaacccgaaggccagccugcugucccucacccaguucccccacuucagcagcgugguccugggcaacgccgccggccuggggaucaugggcgaguaccgcgggacgccccggaaccaggaccucuacgacgcggccaaggccuacgccgagcagcugaaggagaacggcgugaucaacuacuccgugcuggaccucaccgccgaggagcuggaggcgaucaagcaccagcugaaccccaaggacaacgacgucgagcucugaggacuagugaagggaacacccaaauuuaauucagccuuaagcacaauuaauuaagagugaaacguaauuguacaagcaguuggucacccaccauagggcaugaucaacaccgcaaccuuuccuuuuucccccagugauucugaaaaaccccucuucccuucagcuugcuuagauguuccaaauuuaguaagcuuaaggcggccuacagaagaaaaagaaaaaaaaggccacaaaaguucccucucacuuucaguaaauaaaauaaaagcagcaacagaaauaaagaaauaaaugaaauucaaaaugaaauaaauauuguguugugcagcauuaaaaaaucaauaaaaauuaaaaaugagcaagaucuaaaaaaaaaaaaaaaaaaaaaaaaaaaaaaaaaaaaaaaaaaaaaaaaaaaaaaaaaaaaaaaaugcaucccccccccccccccccccccccccccccccaaaggcucuuuucagagccaccagaauu

SEQ ID NO: 10377 - RNA, 1748 nt, Artificial Sequence
  mRNA product Design f-4 comprising derived and/or modified sequence from HRSV(A2)__P03418.1__N (opt2)
gggagagucccgcagucggcguccagcggcucugcuuguucgugugugugucguugcaggccuuauucaagcuuaccauggcccucuccaaggucaagcucaacgacacccucaacaaggaccagcuccucuccuccuccaaguacaccauccagcgcuccaccggcgacuccaucgacacccccaacuacgacguccagaagcacaucaacaagcucugcggcaugcuccucaucaccgaggacgccaaccacaaguucaccggccucaucggcaugcucuacgccaugucccgccucggccgcgaggacaccaucaagauccuccgcgacgccggcuaccacgucaaggccaacggcgucgacgucaccacccaccgccaggacaucaacggcaaggagaugaaguucgagguccucacccucgccucccucaccaccgagauccagaucaacaucgagaucgagucccgcaaguccuacaagaagaugcucaaggagaugggcgaggucgcccccgaguaccgccacgacucccccgacugcggcaugaucauccucugcaucgccgcccucgucaucaccaagcucgccgccggcgaccgcuccggccucaccgccgucauccgccgcgccaacaacguccucaagaacgagaugaagcgcuacaagggccuccuccccaaggacaucgccaacuccuucuacgaggucuucgagaagcacccccacuucaucgacgucuucguccacuucggcaucgcccaguccuccacccgcggcggcucccgcgucgagggcaucuucgccggccucuucaugaacgccuacggcgccggccaggucaugcuccgcuggggcguccucgccaaguccgucaagaacaucaugcucggccacgccuccguccaggccgagauggagcaggucgucgaggucuacgaguacgcccagaagcucggcggcgaggccggcuucuaccacauccucaacaaccccaaggccucccuccucucccucacccaguucccccacuucuccuccgucguccucggcaacgccgccggccucggcaucaugggcgaguaccgcggcaccccccgcaaccaggaccucuacgacgccgccaaggccuacgccgagcagcucaaggagaacggcgucaucaacuacuccguccucgaccucaccgccgaggagcucgaggccaucaagcaccagcucaaccccaaggacaacgacgucgagcucugaggacuagugaagggaacacccaaauuuaauucagccuuaagcacaauuaauuaagagugaaacguaauuguacaagcaguuggucacccaccauagggcaugaucaacaccgcaaccuuuccuuuuucccccagugauucugaaaaaccccucuucccuucagcuugcuuagauguuccaaauuuaguaagcuuaaggcggccuacagaagaaaaagaaaaaaaaggccacaaaaguucccucucacuuucaguaaauaaaauaaaagcagcaacagaaauaaagaaauaaaugaaauucaaaaugaaauaaauauuguguugugcagcauuaaaaaaucaauaaaaauuaaaaaugagcaagaucuaaaaaaaaaaaaaaaaaaaaaaaaaaaaaaaaaaaaaaaaaaaaaaaaaaaaaaaaaaaaaaaaugcaucccccccccccccccccccccccccccccccaaaggcucuuuucagagccaccagaauu

SEQ ID NO: 10378 - RNA, 1748 nt, Artificial Sequence
  mRNA product Design f-4 comprising derived and/or modified sequence from HRSV(A2)__P03418.1__N (opt3)
gggagagucccgcagucggcguccagcggcucugcuuguucgugugugugucguugcaggccuuauucaagcuuaccauggcccugagcaaggugaaacucaacgacacccuuaauaaggaucagcuguuguccucuucaaaauacacaauccaaagaaguacuggcgacagcauugauacgcccaacuaugacguccagaagcacauaaauaaauuaugcgggaugcugcuaaucaccgaggaugcuaaccauaaguucacaggacucauugguaugcuguacgcaauguccaggcuuggccgggaagacacuaucaagauucugcgcgaugccggguaucacguuaaagcgaauggaguggacguaaccacacaucgacaggauaucaacggcaaggagaugaaauuugaaguguugacccucgcuucucugacuacagagauacagaucaauauugaaaucgagucgcguaagucauacaaaaagaugcugaaggagaugggugaagucgccccugaguauagacacgacagcccagauugugggaugauuauccucugcauagcagccuuagugauuaccaaacuggcugcaggagacaggaguggccuuacggccguuauccggcgcgcuaacaauguguugaagaacgaaaugaaaagauacaagggccugcuaccgaaagauauugccaauuccuucuaugaggucuuugagaagcauccccacuucaucgacguguuuguacacuucgggaucgcgcaaucuagcacuaggggagguucccggguugaaggcauuuuugcaggacucuucaugaacgccuacggggcuggccaggugaugcugcgcugggguguccuugccaaaucagugaagaauauaaugcuggggcaugcaagugugcaggcugagauggaacaggucguugagguguacgaauaugcccaaaaguugggaggcgaggcgggcuuuuaccacauccucaacaauccuaaagccagccuguuaucucugacccaguucccacauuuuuccucaguagugcucgggaacgcagcuggacuugguauuaugggcgaguaucgagggacacccagaaaccaggaccuguacgaugccgcuaaggccuaugcagaacaguugaaagagaauggagucaucaacuacagcgugcuagaccugacugccgaggaacucgaagcuauaaagcaccaacugaauccuaaagauaacgacguugagcuuugaggacuagugaagggaacacccaaauuuaauucagccuuaagcacaauuaauuaagagugaaacguaauuguacaagcaguuggucacccaccauagggcaugaucaacaccgcaaccuuuccuuuuucccccagugauucugaaaaaccccucuucccuucagcuugcuuagauguuccaaauuuaguaagcuuaaggcggccuacagaagaaaaagaaaaaaaaggccacaaaaguucccucucacuuucaguaaauaaaauaaaagcagcaacagaaauaaagaaauaaaugaaauucaaaaugaaauaaauauuguguugugcagcauuaaaaaaucaauaaaaauuaaaaaugagcaagaucuaaaaaaaaaaaaaaaaaaaaaaaaaaaaaaaaaaaaaaaaaaaaaaaaaaaaaaaaaaaaaaaaugcaucccccccccccccccccccccccccccccccaaaggcucuuuucagagccaccagaauu

SEQ ID NO: 10379 - RNA, 1748 nt, Artificial Sequence
  mRNA product Design f-4 comprising derived and/or modified sequence from HRSV(A2)__P03418.1__N (opt4)
gggagagucccgcagucggcguccagcggcucugcuuguucgugugugugucguugcaggccuuauucaagcuuaccauggcccugagcaaggugaagcugaacgacacccugaacaaggaccagcugcugagcagcagcaaguacaccauccagagaagcaccggcgacagcaucgacacccccaacuacgacgugcagaagcacaucaacaagcugugcggcaugcugcugaucaccgaggacgccaaccacaaguucaccggccugaucggcaugcuguacgccaugagcagacugggcagagaggacaccaucaagauccugagagacgccggcuaccacgugaaggccaacggcguggacgugaccacccacagacaggacaucaacggcaaggagaugaaguucgaggugcugacccuggccagccugaccaccgagauccagaucaacaucgagaucgagagcagaaagagcuacaagaagaugcugaaggagaugggcgagguggcccccgaguacagacacgacagccccgacugcggcaugaucauccugugcaucgccgcccuggugaucaccaagcuggccgccggcgacagaagcggccugaccgccgugaucagaagagccaacaacgugcugaagaacgagaugaagagauacaagggccugcugcccaaggacaucgccaacagcuucuacgagguguucgagaagcacccccacuucaucgacguguucgugcacuucggcaucgcccagagcagcaccagaggcggcagcagaguggagggcaucuucgccggccuguucaugaacgccuacggcgccggccaggugaugcugagauggggcgugcuggccaagagcgugaagaacaucaugcugggccacgccagcgugcaggccgagauggagcaggugguggagguguacgaguacgcccagaagcugggcggcgaggccggcuucuaccacauccugaacaaccccaaggccagccugcugagccugacccaguucccccacuucagcagcguggugcugggcaacgccgccggccugggcaucaugggcgaguacagaggcacccccagaaaccaggaccuguacgacgccgccaaggccuacgccgagcagcugaaggagaacggcgugaucaacuacagcgugcuggaccugaccgccgaggagcuggaggccaucaagcaccagcugaaccccaaggacaacgacguggagcugugaggacuagugaagggaacacccaaauuuaauucagccuuaagcacaauuaauuaagagugaaacguaauuguacaagcaguuggucacccaccauagggcaugaucaacaccgcaaccuuuccuuuuucccccagugauucugaaaaaccccucuucccuucagcuugcuuagauguuccaaauuuaguaagcuuaaggcggccuacagaagaaaaagaaaaaaaaggccacaaaaguucccucucacuuucaguaaauaaaauaaaagcagcaacagaaauaaagaaauaaaugaaauucaaaaugaaauaaauauuguguugugcagcauuaaaaaaucaauaaaaauuaaaaaugagcaagaucuaaaaaaaaaaaaaaaaaaaaaaaaaaaaaaaaaaaaaaaaaaaaaaaaaaaaaaaaaaaaaaaaugcaucccccccccccccccccccccccccccccccaaaggcucuuuucagagccaccagaauu

SEQ ID NO: 10380 - RNA, 1748 nt, Artificial Sequence
  mRNA product Design f-4 comprising derived and/or modified sequence from HRSV(A2)__P03418.1__N (opt5)
gggagagucccgcagucggcguccagcggcucugcuuguucgugugugugucguugcaggccuuauucaagcuuaccauggcccugagcaaggugaaacucaacgacacccugaauaaggaucagcuucuguccucuagcaaauacacaauccaaagauccacgggcgacucuauugauacccccaacuaugacguccagaagcacaucaauaaacucugcgggaugcugcuuauuacagaggaugcuaaccauaaguucaccggacugaucggcaugcucuacgccaugagccggcuggggcgcgaagacacaauuaagauccugagagaugcgggauaucacguuaaagcuaauggcguggacgugaccacacaucggcaggauaucaacgggaaggagaugaaauuugaaguccucacccuggccucccuuacgaccgagauucagaucaauauugaaaucgagucucgcaagagcuacaaaaagaugcugaaggagaugggagaaguggccccugaguauagacacgacuccccggauuguggcaugauuauccucugcauugcugcccugguuaucacaaaacuugcugccggcgaccggagcgggcugaccgcggugauccgcagagccaacaauguccucaagaacgaaaugaaacgguacaagggacugcugcccaaagauauugcuaauucuuucuaugagguguuugagaagcauccucacuucaucgacguuuuugugcacuucggcauugcccaauccagcacacgcgggggaucuagagucgaaggcaucuuugcuggacucuucaugaacgccuacggggcgggccaggugaugcugcgguggggcgugcuugccaaauccgucaagaauauuaugcuggggcaugcuagcguucaggccgagauggaacaggugguggaggucuacgaauaugcucaaaagcucggaggcgaggccggguuuuaccacauccugaacaaucccaaagccucucuucugucccucacccaguucccucauuuuagcuccgugguucugggaaacgcugcgggccuggggaucaugggagaguaucgcggcacgcccagaaaccaggaccucuacgaugccgcuaaggccuaugccgaacagcugaaagagaauggcgugauuaacuacucuguccuugaccugacagcugaggaacucgaagccaucaagcaccaacugaauccuaaagauaacgacguggagcuuugaggacuagugaagggaacacccaaauuuaauucagccuuaagcacaauuaauuaagagugaaacguaauuguacaagcaguuggucacccaccauagggcaugaucaacaccgcaaccuuuccuuuuucccccagugauucugaaaaaccccucuucccuucagcuugcuuagauguuccaaauuuaguaagcuuaaggcggccuacagaagaaaaagaaaaaaaaggccacaaaaguucccucucacuuucaguaaauaaaauaaaagcagcaacagaaauaaagaaauaaaugaaauucaaaaugaaauaaauauuguguugugcagcauuaaaaaaucaauaaaaauuaaaaaugagcaagaucuaaaaaaaaaaaaaaaaaaaaaaaaaaaaaaaaaaaaaaaaaaaaaaaaaaaaaaaaaaaaaaaaugcaucccccccccccccccccccccccccccccccaaaggcucuuuucagagccaccagaauu

SEQ ID NO: 10381 - RNA, 1748 nt, Artificial Sequence
  mRNA product Design f-4 comprising derived and/or modified sequence from HRSV(A2)__P03418.1__N (opt6)
gggagagucccgcagucggcguccagcggcucugcuuguucgugugugugucguugcaggccuuauucaagcuuaccauggcacuaagcaaagucaaauuaaacgacacauuaaacaaagaccaacucuuaucaucaucaaaauacacaauacaaagaagcaccggagacaguaucgacacaccaaacuaugacguccaaaaacauauaaauaaauuaugcggcaugcucuuaaucacagaagacgccaaccauaaauuuacaggauuaauaggaauguuauaugcaaugucacgacuagguagagaagacacaauaaaaauacuaagagacgcaggcuaucacguaaaagcaaauggaguagacguaaccacacacagacaagacauaaauggaaaagaaaugaaauuugaaguauuaacacuagcaucacuaacaacagaaauacaaaucaacauagaaauagaaucaagaaaaagcuacaaaaaaauguuaaaagaaaugggagaagucgcaccagaauauagacaugauucaccagacugcggaaugauaauacuaugcauagcagcccuaguaauuacaaaacuagcagcaggagacagaagcggauuaacagcaguaauaagaagagcaaacaacguacuaaaaaacgaaaugaaaagauauaaaggauuauuaccaaaagacauagcaaacucauucuaugaaguauucgaaaaacacccccacuuuauagacgucuucguacacuucggaauagcccaaucauccacaagaggaggaucaagagucgaaggaauauucgcaggauuauucaugaacgcauauggcgcaggacaaguaaugcuaagauggggaguacuagcaaaauccgucaaaaacauaaugcuaggacacgcaucaguucaagcagaaauggaacaaguaguagaaguauacgaauacgcccaaaaacuaggaggagaagcaggauucuaccacauacuaaauaauccaaaagcaucacuacuaagccuaacccaauuuccccacuucucaaguguaguauuaggaaaugcagcuggacuaggaauaaugggagaauacagaggaacaccaagaaaccaagacuuauacgacgcagcaaaagcauacgcagagcaacuuaaagaaaacggaguaauaaacuauagcguacuagacuuaacagcagaagaacuggaagcaauaaaacaucaauuaaacccgaaagacaaugacguagaauuauaaggacuagugaagggaacacccaaauuuaauucagccuuaagcacaauuaauuaagagugaaacguaauuguacaagcaguuggucacccaccauagggcaugaucaacaccgcaaccuuuccuuuuucccccagugauucugaaaaaccccucuucccuucagcuugcuuagauguuccaaauuuaguaagcuuaaggcggccuacagaagaaaaagaaaaaaaaggccacaaaaguucccucucacuuucaguaaauaaaauaaaagcagcaacagaaauaaagaaauaaaugaaauucaaaaugaaauaaauauuguguugugcagcauuaaaaaaucaauaaaaauuaaaaaugagcaagaucuaaaaaaaaaaaaaaaaaaaaaaaaaaaaaaaaaaaaaaaaaaaaaaaaaaaaaaaaaaaaaaaaugcaucccccccccccccccccccccccccccccccaaaggcucuuuucagagccaccagaauu

SEQ ID NO: 10382 - RNA, 1748 nt, Artificial Sequence
  mRNA product Design f-4 comprising derived and/or modified sequence from HRSV(A2)__P03418.1__N (opt11)
gggagagucccgcagucggcguccagcggcucugcuuguucgugugugugucguugcaggccuuauucaagcuuaccauggcacucucgaaaguaaaacucaacgacacccucaacaaagaccaacuccuuuccagcuccaaauacaccauccaacgauccaccggagacuccaucgacacgcccaacuacgacguccagaaacacaucaacaagcucugcggaaugcuacuaaucaccgaggacgccaaccacaaauucacaggacuuauagggaugcucuacgccaugucccgccucggacgcgaagacacaauaaaaauccuacgagacgccggcuaccacguaaaggcaaacggcgucgacgucaccacacacagacaagacaucaacggaaaggaaaugaaauucgaaguccucacccucgccagccuaaccaccgagauccaaaucaacaucgaaaucgaaucacgcaaauccuacaagaaaaugcucaaagaaaugggagaagucgcccccgaauaccgucacgacucgcccgacugcggcaugauaauccuaugcaucgccgcacucgucauaaccaaacucgccgccggugaccgaucaggacugacagcagucauccgccgagcaaacaacgugcucaaaaacgaaaugaaacgcuacaaaggccuacuccccaaagacaucgccaacuccuucuacgaagucuucgaaaaacacccacacuucaucgacgucuucguccacuucggcaucgcacaaucaucaaccagaggcggcagccgcguugaaggcaucuucgcaggacucuuuaugaacgccuacggcgccggccaagucaugcuccgcuggggcguccuggcaaaaagcgucaaaaacaucaugcuaggccacgcuagcguccaagccgaaauggaacaagucgucgaaguuuacgaguacgcacaaaaacucggcggcgaagcaggcuucuaccacauccuaaacaaccccaaagccucccugcuaucacucacccaauucccccacuucuccagcgucguccucggcaacgccgcaggacuaggcaucaugggagaauaccgcgggacaccgcgcaaccaagaccucuacgacgccgccaaagccuacgccgaacaacucaaagaaaacggcgucauaaacuacucaguccucgaccucaccgccgaagaacucgaagccaucaaacaccaacucaacccaaaagacaacgacgucgaauuauaaggacuagugaagggaacacccaaauuuaauucagccuuaagcacaauuaauuaagagugaaacguaauuguacaagcaguuggucacccaccauagggcaugaucaacaccgcaaccuuuccuuuuucccccagugauucugaaaaaccccucuucccuucagcuugcuuagauguuccaaauuuaguaagcuuaaggcggccuacagaagaaaaagaaaaaaaaggccacaaaaguucccucucacuuucaguaaauaaaauaaaagcagcaacagaaauaaagaaauaaaugaaauucaaaaugaaauaaauauuguguugugcagcauuaaaaaaucaauaaaaauuaaaaaugagcaagaucuaaaaaaaaaaaaaaaaaaaaaaaaaaaaaaaaaaaaaaaaaaaaaaaaaaaaaaaaaaaaaaaaugcaucccccccccccccccccccccccccccccccaaaggcucuuuucagagccaccagaauu

SEQ ID NO: 10383 - RNA, 1524 nt, Artificial Sequence
  mRNA product Design f-5 comprising derived and/or modified sequence from HRSV(A2)__P03418.1__N (wt)
gggagacuuucccauucuguagcagaauuugguguugccuguggucuuggucccgcggagaagcuuaccauggcucuuagcaaagucaaguugaaugauacacucaacaaagaucaacuucugucauccagcaaauacaccauccaacggagcacaggagauaguauugauacuccuaauuaugaugugcagaaacacaucaauaaguuauguggcauguuauuaaucacagaagaugcuaaucauaaauucacuggguuaauagguauguuauaugcgaugucuagguuaggaagagaagacaccauaaaaauacucagagaugcgggauaucauguaaaagcaaauggaguagauguaacaacacaucgucaagacauuaauggaaaagaaaugaaauuugaaguguuaacauuggcaagcuuaacaacugaaauucaaaucaacauugagauagaaucuagaaaauccuacaaaaaaaugcuaaaagaaaugggagagguagcuccagaauacaggcaugacucuccugauugugggaugauaauauuauguauagcagcauuaguaauaacuaaauuagcagcaggggacagaucuggucuuacagccgugauuaggagagcuaauaauguccuaaaaaaugaaaugaaacguuacaaaggcuuacuacccaaggacauagccaacagcuucuaugaaguguuugaaaaacauccccacuuuauagauguuuuuguucauuuugguauagcacaaucuucuaccagagguggcaguagaguugaagggauuuuugcaggauuguuuaugaaugccuauggugcagggcaagugauguuacgguggggagucuuagcaaaaucaguuaaaaauauuauguuaggacaugcuagugugcaagcagaaauggaacaaguuguugagguuuaugaauaugcccaaaaauuggguggugaagcaggauucuaccauauauugaacaacccaaaagcaucauuauuaucuuugacucaauuuccucacuucuccaguguaguauuaggcaaugcugcuggccuaggcauaaugggagaguacagagguacaccgaggaaucaagaucuauaugaugcagcaaaggcauaugcugaacaacucaaagaaaauggugugauuaacuacaguguacuagacuugacagcagaagaacuagaggcuaucaaacaucagcuuaauccaaaagauaaugauguagagcuuugaggacuaguacuggcugcaucucccuuuccucuguccuccauccuucucccaggauggugaagggggaccugguacccagugauccccaccccaggauccuaaaucaugacuuaccugcuaauaaaaacucauuggaaaagugagaagaucuaaaaaaaaaaaaaaaaaaaaaaaaaaaaaaaaaaaaaaaaaaaaaaaaaaaaaaaaaaaaaaaaugcaucccccccccccccccccccccccccccccccaaaggcucuuuucagagccaccagaauu

SEQ ID NO: 10384 - RNA, 1524 nt, Artificial Sequence
  mRNA product Design f-5 comprising derived and/or modified sequence from HRSV(A2)__P03418.1__N (opt1)
gggagacuuucccauucuguagcagaauuugguguugccuguggucuuggucccgcggagaagcuuaccauggcccugagcaaggugaagcucaacgacacccugaacaaggaccagcugcucuccagcuccaaguacaccauccagcgcagcaccggcgacuccaucgacacccccaacuacgacguccagaagcacaucaacaagcugugcgggaugcugcucaucaccgaggacgccaaccacaaguucaccggccugaucgggaugcuguacgcgaugagccggcucggccgcgaggacacgaucaagauccugcgggacgccggguaccacgugaaggccaacggcguggacgucaccacccaccgccaggacaucaacggcaaggagaugaaguucgaggugcugacccucgccucccugacgaccgagauccagaucaacaucgagaucgagagccggaaguccuacaagaagaugcugaaggagaugggggagguggccccggaguaccgccacgacagccccgacugcggcaugaucauccucugcaucgcggcccuggucaucaccaagcuggccgccggggaccgguccggccucaccgcggugauccgccgggccaacaacgugcugaagaacgagaugaagcgcuacaaggggcugcuccccaaggacaucgccaacagcuucuacgaggucuucgagaagcacccccacuucaucgacguguucgugcacuucggcaucgcccaguccagcacgcggggcgggucccgcgucgagggcaucuucgccgggcuguucaugaacgcguacggcgccggccaggugaugcugcgguggggcgugcucgccaagagcgucaagaacaucaugcuggggcacgccuccgugcaggccgagauggagcaggucguggagguguacgaguacgcgcagaagcucgggggcgaggccggguucuaccacauccugaacaacccgaaggccagccugcugucccucacccaguucccccacuucagcagcgugguccugggcaacgccgccggccuggggaucaugggcgaguaccgcgggacgccccggaaccaggaccucuacgacgcggccaaggccuacgccgagcagcugaaggagaacggcgugaucaacuacuccgugcuggaccucaccgccgaggagcuggaggcgaucaagcaccagcugaaccccaaggacaacgacgucgagcucugaggacuaguacuggcugcaucucccuuuccucuguccuccauccuucucccaggauggugaagggggaccugguacccagugauccccaccccaggauccuaaaucaugacuuaccugcuaauaaaaacucauuggaaaagugagaagaucuaaaaaaaaaaaaaaaaaaaaaaaaaaaaaaaaaaaaaaaaaaaaaaaaaaaaaaaaaaaaaaaaugcaucccccccccccccccccccccccccccccccaaaggcucuuuucagagccaccagaauu

SEQ ID NO: 10385 - RNA, 1524 nt, Artificial Sequence
  mRNA product Design f-5 comprising derived and/or modified sequence from HRSV(A2)__P03418.1__N (opt2)
gggagacuuucccauucuguagcagaauuugguguugccuguggucuuggucccgcggagaagcuuaccauggcccucuccaaggucaagcucaacgacacccucaacaaggaccagcuccucuccuccuccaaguacaccauccagcgcuccaccggcgacuccaucgacacccccaacuacgacguccagaagcacaucaacaagcucugcggcaugcuccucaucaccgaggacgccaaccacaaguucaccggccucaucggcaugcucuacgccaugucccgccucggccgcgaggacaccaucaagauccuccgcgacgccggcuaccacgucaaggccaacggcgucgacgucaccacccaccgccaggacaucaacggcaaggagaugaaguucgagguccucacccucgccucccucaccaccgagauccagaucaacaucgagaucgagucccgcaaguccuacaagaagaugcucaaggagaugggcgaggucgcccccgaguaccgccacgacucccccgacugcggcaugaucauccucugcaucgccgcccucgucaucaccaagcucgccgccggcgaccgcuccggccucaccgccgucauccgccgcgccaacaacguccucaagaacgagaugaagcgcuacaagggccuccuccccaaggacaucgccaacuccuucuacgaggucuucgagaagcacccccacuucaucgacgucuucguccacuucggcaucgcccaguccuccacccgcggcggcucccgcgucgagggcaucuucgccggccucuucaugaacgccuacggcgccggccaggucaugcuccgcuggggcguccucgccaaguccgucaagaacaucaugcucggccacgccuccguccaggccgagauggagcaggucgucgaggucuacgaguacgcccagaagcucggcggcgaggccggcuucuaccacauccucaacaaccccaaggccucccuccucucccucacccaguucccccacuucuccuccgucguccucggcaacgccgccggccucggcaucaugggcgaguaccgcggcaccccccgcaaccaggaccucuacgacgccgccaaggccuacgccgagcagcucaaggagaacggcgucaucaacuacuccguccucgaccucaccgccgaggagcucgaggccaucaagcaccagcucaaccccaaggacaacgacgucgagcucugaggacuaguacuggcugcaucucccuuuccucuguccuccauccuucucccaggauggugaagggggaccugguacccagugauccccaccccaggauccuaaaucaugacuuaccugcuaauaaaaacucauuggaaaagugagaagaucuaaaaaaaaaaaaaaaaaaaaaaaaaaaaaaaaaaaaaaaaaaaaaaaaaaaaaaaaaaaaaaaaugcaucccccccccccccccccccccccccccccccaaaggcucuuuucagagccaccagaauu

SEQ ID NO: 10386 - RNA, 1524 nt, Artificial Sequence
  mRNA product Design f-5 comprising derived and/or modified sequence from HRSV(A2)__P03418.1__N (opt3)
gggagacuuucccauucuguagcagaauuugguguugccuguggucuuggucccgcggagaagcuuaccauggcccugagcaaggugaaacucaacgacacccuuaauaaggaucagcuguuguccucuucaaaauacacaauccaaagaaguacuggcgacagcauugauacgcccaacuaugacguccagaagcacauaaauaaauuaugcgggaugcugcuaaucaccgaggaugcuaaccauaaguucacaggacucauugguaugcuguacgcaauguccaggcuuggccgggaagacacuaucaagauucugcgcgaugccggguaucacguuaaagcgaauggaguggacguaaccacacaucgacaggauaucaacggcaaggagaugaaauuugaaguguugacccucgcuucucugacuacagagauacagaucaauauugaaaucgagucgcguaagucauacaaaaagaugcugaaggagaugggugaagucgccccugaguauagacacgacagcccagauugugggaugauuauccucugcauagcagccuuagugauuaccaaacuggcugcaggagacaggaguggccuuacggccguuauccggcgcgcuaacaauguguugaagaacgaaaugaaaagauacaagggccugcuaccgaaagauauugccaauuccuucuaugaggucuuugagaagcauccccacuucaucgacguguuuguacacuucgggaucgcgcaaucuagcacuaggggagguucccggguugaaggcauuuuugcaggacucuucaugaacgccuacggggcuggccaggugaugcugcgcugggguguccuugccaaaucagugaagaauauaaugcuggggcaugcaagugugcaggcugagauggaacaggucguugagguguacgaauaugcccaaaaguugggaggcgaggcgggcuuuuaccacauccucaacaauccuaaagccagccuguuaucucugacccaguucccacauuuuuccucaguagugcucgggaacgcagcuggacuugguauuaugggcgaguaucgagggacacccagaaaccaggaccuguacgaugccgcuaaggccuaugcagaacaguugaaagagaauggagucaucaacuacagcgugcuagaccugacugccgaggaacucgaagcuauaaagcaccaacugaauccuaaagauaacgacguugagcuuugaggacuaguacuggcugcaucucccuuuccucuguccuccauccuucucccaggauggugaagggggaccugguacccagugauccccaccccaggauccuaaaucaugacuuaccugcuaauaaaaacucauuggaaaagugagaagaucuaaaaaaaaaaaaaaaaaaaaaaaaaaaaaaaaaaaaaaaaaaaaaaaaaaaaaaaaaaaaaaaaugcaucccccccccccccccccccccccccccccccaaaggcucuuuucagagccaccagaauu

SEQ ID NO: 10387 - RNA, 1524 nt, Artificial Sequence
  mRNA product Design f-5 comprising derived and/or modified sequence from HRSV(A2)__P03418.1__N (opt4)
gggagacuuucccauucuguagcagaauuugguguugccuguggucuuggucccgcggagaagcuuaccauggcccugagcaaggugaagcugaacgacacccugaacaaggaccagcugcugagcagcagcaaguacaccauccagagaagcaccggcgacagcaucgacacccccaacuacgacgugcagaagcacaucaacaagcugugcggcaugcugcugaucaccgaggacgccaaccacaaguucaccggccugaucggcaugcuguacgccaugagcagacugggcagagaggacaccaucaagauccugagagacgccggcuaccacgugaaggccaacggcguggacgugaccacccacagacaggacaucaacggcaaggagaugaaguucgaggugcugacccuggccagccugaccaccgagauccagaucaacaucgagaucgagagcagaaagagcuacaagaagaugcugaaggagaugggcgagguggcccccgaguacagacacgacagccccgacugcggcaugaucauccugugcaucgccgcccuggugaucaccaagcuggccgccggcgacagaagcggccugaccgccgugaucagaagagccaacaacgugcugaagaacgagaugaagagauacaagggccugcugcccaaggacaucgccaacagcuucuacgagguguucgagaagcacccccacuucaucgacguguucgugcacuucggcaucgcccagagcagcaccagaggcggcagcagaguggagggcaucuucgccggccuguucaugaacgccuacggcgccggccaggugaugcugagauggggcgugcuggccaagagcgugaagaacaucaugcugggccacgccagcgugcaggccgagauggagcaggugguggagguguacgaguacgcccagaagcugggcggcgaggccggcuucuaccacauccugaacaaccccaaggccagccugcugagccugacccaguucccccacuucagcagcguggugcugggcaacgccgccggccugggcaucaugggcgaguacagaggcacccccagaaaccaggaccuguacgacgccgccaaggccuacgccgagcagcugaaggagaacggcgugaucaacuacagcgugcuggaccugaccgccgaggagcuggaggccaucaagcaccagcugaaccccaaggacaacgacguggagcugugaggacuaguacuggcugcaucucccuuuccucuguccuccauccuucucccaggauggugaagggggaccugguacccagugauccccaccccaggauccuaaaucaugacuuaccugcuaauaaaaacucauuggaaaagugagaagaucuaaaaaaaaaaaaaaaaaaaaaaaaaaaaaaaaaaaaaaaaaaaaaaaaaaaaaaaaaaaaaaaaugcaucccccccccccccccccccccccccccccccaaaggcucuuuucagagccaccagaauu

SEQ ID NO: 10388 - RNA, 1524 nt, Artificial Sequence
  mRNA product Design f-5 comprising derived and/or modified sequence from HRSV(A2)__P03418.1__N (opt5)
gggagacuuucccauucuguagcagaauuugguguugccuguggucuuggucccgcggagaagcuuaccauggcccugagcaaggugaaacucaacgacacccugaauaaggaucagcuucuguccucuagcaaauacacaauccaaagauccacgggcgacucuauugauacccccaacuaugacguccagaagcacaucaauaaacucugcgggaugcugcuuauuacagaggaugcuaaccauaaguucaccggacugaucggcaugcucuacgccaugagccggcuggggcgcgaagacacaauuaagauccugagagaugcgggauaucacguuaaagcuaauggcguggacgugaccacacaucggcaggauaucaacgggaaggagaugaaauuugaaguccucacccuggccucccuuacgaccgagauucagaucaauauugaaaucgagucucgcaagagcuacaaaaagaugcugaaggagaugggagaaguggccccugaguauagacacgacuccccggauuguggcaugauuauccucugcauugcugcccugguuaucacaaaacuugcugccggcgaccggagcgggcugaccgcggugauccgcagagccaacaauguccucaagaacgaaaugaaacgguacaagggacugcugcccaaagauauugcuaauucuuucuaugagguguuugagaagcauccucacuucaucgacguuuuugugcacuucggcauugcccaauccagcacacgcgggggaucuagagucgaaggcaucuuugcuggacucuucaugaacgccuacggggcgggccaggugaugcugcgguggggcgugcuugccaaauccgucaagaauauuaugcuggggcaugcuagcguucaggccgagauggaacaggugguggaggucuacgaauaugcucaaaagcucggaggcgaggccggguuuuaccacauccugaacaaucccaaagccucucuucugucccucacccaguucccucauuuuagcuccgugguucugggaaacgcugcgggccuggggaucaugggagaguaucgcggcacgcccagaaaccaggaccucuacgaugccgcuaaggccuaugccgaacagcugaaagagaauggcgugauuaacuacucuguccuugaccugacagcugaggaacucgaagccaucaagcaccaacugaauccuaaagauaacgacguggagcuuugaggacuaguacuggcugcaucucccuuuccucuguccuccauccuucucccaggauggugaagggggaccugguacccagugauccccaccccaggauccuaaaucaugacuuaccugcuaauaaaaacucauuggaaaagugagaagaucuaaaaaaaaaaaaaaaaaaaaaaaaaaaaaaaaaaaaaaaaaaaaaaaaaaaaaaaaaaaaaaaaugcaucccccccccccccccccccccccccccccccaaaggcucuuuucagagccaccagaauu

SEQ ID NO: 10389 - RNA, 1524 nt, Artificial Sequence
  mRNA product Design f-5 comprising derived and/or modified sequence from HRSV(A2)__P03418.1__N (opt6)
gggagacuuucccauucuguagcagaauuugguguugccuguggucuuggucccgcggagaagcuuaccauggcacuaagcaaagucaaauuaaacgacacauuaaacaaagaccaacucuuaucaucaucaaaauacacaauacaaagaagcaccggagacaguaucgacacaccaaacuaugacguccaaaaacauauaaauaaauuaugcggcaugcucuuaaucacagaagacgccaaccauaaauuuacaggauuaauaggaauguuauaugcaaugucacgacuagguagagaagacacaauaaaaauacuaagagacgcaggcuaucacguaaaagcaaauggaguagacguaaccacacacagacaagacauaaauggaaaagaaaugaaauuugaaguauuaacacuagcaucacuaacaacagaaauacaaaucaacauagaaauagaaucaagaaaaagcuacaaaaaaauguuaaaagaaaugggagaagucgcaccagaauauagacaugauucaccagacugcggaaugauaauacuaugcauagcagcccuaguaauuacaaaacuagcagcaggagacagaagcggauuaacagcaguaauaagaagagcaaacaacguacuaaaaaacgaaaugaaaagauauaaaggauuauuaccaaaagacauagcaaacucauucuaugaaguauucgaaaaacacccccacuuuauagacgucuucguacacuucggaauagcccaaucauccacaagaggaggaucaagagucgaaggaauauucgcaggauuauucaugaacgcauauggcgcaggacaaguaaugcuaagauggggaguacuagcaaaauccgucaaaaacauaaugcuaggacacgcaucaguucaagcagaaauggaacaaguaguagaaguauacgaauacgcccaaaaacuaggaggagaagcaggauucuaccacauacuaaauaauccaaaagcaucacuacuaagccuaacccaauuuccccacuucucaaguguaguauuaggaaaugcagcuggacuaggaauaaugggagaauacagaggaacaccaagaaaccaagacuuauacgacgcagcaaaagcauacgcagagcaacuuaaagaaaacggaguaauaaacuauagcguacuagacuuaacagcagaagaacuggaagcaauaaaacaucaauuaaacccgaaagacaaugacguagaauuauaaggacuaguacuggcugcaucucccuuuccucuguccuccauccuucucccaggauggugaagggggaccugguacccagugauccccaccccaggauccuaaaucaugacuuaccugcuaauaaaaacucauuggaaaagugagaagaucuaaaaaaaaaaaaaaaaaaaaaaaaaaaaaaaaaaaaaaaaaaaaaaaaaaaaaaaaaaaaaaaaugcaucccccccccccccccccccccccccccccccaaaggcucuuuucagagccaccagaauu

SEQ ID NO: 10390 - RNA, 1524 nt, Artificial Sequence
  mRNA product Design f-5 comprising derived and/or modified sequence from HRSV(A2)__P03418.1__N (opt11)
gggagacuuucccauucuguagcagaauuugguguugccuguggucuuggucccgcggagaagcuuaccauggcacucucgaaaguaaaacucaacgacacccucaacaaagaccaacuccuuuccagcuccaaauacaccauccaacgauccaccggagacuccaucgacacgcccaacuacgacguccagaaacacaucaacaagcucugcggaaugcuacuaaucaccgaggacgccaaccacaaauucacaggacuuauagggaugcucuacgccaugucccgccucggacgcgaagacacaauaaaaauccuacgagacgccggcuaccacguaaaggcaaacggcgucgacgucaccacacacagacaagacaucaacggaaaggaaaugaaauucgaaguccucacccucgccagccuaaccaccgagauccaaaucaacaucgaaaucgaaucacgcaaauccuacaagaaaaugcucaaagaaaugggagaagucgcccccgaauaccgucacgacucgcccgacugcggcaugauaauccuaugcaucgccgcacucgucauaaccaaacucgccgccggugaccgaucaggacugacagcagucauccgccgagcaaacaacgugcucaaaaacgaaaugaaacgcuacaaaggccuacuccccaaagacaucgccaacuccuucuacgaagucuucgaaaaacacccacacuucaucgacgucuucguccacuucggcaucgcacaaucaucaaccagaggcggcagccgcguugaaggcaucuucgcaggacucuuuaugaacgccuacggcgccggccaagucaugcuccgcuggggcguccuggcaaaaagcgucaaaaacaucaugcuaggccacgcuagcguccaagccgaaauggaacaagucgucgaaguuuacgaguacgcacaaaaacucggcggcgaagcaggcuucuaccacauccuaaacaaccccaaagccucccugcuaucacucacccaauucccccacuucuccagcgucguccucggcaacgccgcaggacuaggcaucaugggagaauaccgcgggacaccgcgcaaccaagaccucuacgacgccgccaaagccuacgccgaacaacucaaagaaaacggcgucauaaacuacucaguccucgaccucaccgccgaagaacucgaagccaucaaacaccaacucaacccaaaagacaacgacgucgaauuauaaggacuaguacuggcugcaucucccuuuccucuguccuccauccuucucccaggauggugaagggggaccugguacccagugauccccaccccaggauccuaaaucaugacuuaccugcuaauaaaaacucauuggaaaagugagaagaucuaaaaaaaaaaaaaaaaaaaaaaaaaaaaaaaaaaaaaaaaaaaaaaaaaaaaaaaaaaaaaaaaugcaucccccccccccccccccccccccccccccccaaaggcucuuuucagagccaccagaauu

SEQ ID NO: 10391 - RNA, 1520 nt, Artificial Sequence
  mRNA product Design g-1 comprising derived and/or modified sequence from HRSV(A2)__P03418.1__N (wt)
gggagacuuucccauucuguagcagaauuugguguugccuguggucuuggucccgcggagaagcuuaccauggcucuuagcaaagucaaguugaaugauacacucaacaaagaucaacuucugucauccagcaaauacaccauccaacggagcacaggagauaguauugauacuccuaauuaugaugugcagaaacacaucaauaaguuauguggcauguuauuaaucacagaagaugcuaaucauaaauucacuggguuaauagguauguuauaugcgaugucuagguuaggaagagaagacaccauaaaaauacucagagaugcgggauaucauguaaaagcaaauggaguagauguaacaacacaucgucaagacauuaauggaaaagaaaugaaauuugaaguguuaacauuggcaagcuuaacaacugaaauucaaaucaacauugagauagaaucuagaaaauccuacaaaaaaaugcuaaaagaaaugggagagguagcuccagaauacaggcaugacucuccugauugugggaugauaauauuauguauagcagcauuaguaauaacuaaauuagcagcaggggacagaucuggucuuacagccgugauuaggagagcuaauaauguccuaaaaaaugaaaugaaacguuacaaaggcuuacuacccaaggacauagccaacagcuucuaugaaguguuugaaaaacauccccacuuuauagauguuuuuguucauuuugguauagcacaaucuucuaccagagguggcaguagaguugaagggauuuuugcaggauuguuuaugaaugccuauggugcagggcaagugauguuacgguggggagucuuagcaaaaucaguuaaaaauauuauguuaggacaugcuagugugcaagcagaaauggaacaaguuguugagguuuaugaauaugcccaaaaauuggguggugaagcaggauucuaccauauauugaacaacccaaaagcaucauuauuaucuuugacucaauuuccucacuucuccaguguaguauuaggcaaugcugcuggccuaggcauaaugggagaguacagagguacaccgaggaaucaagaucuauaugaugcagcaaaggcauaugcugaacaacucaaagaaaauggugugauuaacuacaguguacuagacuugacagcagaagaacuagaggcuaucaaacaucagcuuaauccaaaagauaaugauguagagcuuugaggacuaguggaagcauuuuccuggcugauuaaaagaaauuacucagcuauggucaucuguuccuguuagaaggcuaugcagcauauuauauacuaugcgcauguuaugaaaugcauaauaaaaaauuuuaaaaaaucuaaaagaucuaaaaaaaaaaaaaaaaaaaaaaaaaaaaaaaaaaaaaaaaaaaaaaaaaaaaaaaaaaaaaaaaugcaucccccccccccccccccccccccccccccccaaaggcucuuuucagagccaccagaauu

SEQ ID NO: 10392 - RNA, 1520 nt, Artificial Sequence
  mRNA product Design g-1 comprising derived and/or modified sequence from HRSV(A2)__P03418.1__N (opt1)
gggagacuuucccauucuguagcagaauuugguguugccuguggucuuggucccgcggagaagcuuaccauggcccugagcaaggugaagcucaacgacacccugaacaaggaccagcugcucuccagcuccaaguacaccauccagcgcagcaccggcgacuccaucgacacccccaacuacgacguccagaagcacaucaacaagcugugcgggaugcugcucaucaccgaggacgccaaccacaaguucaccggccugaucgggaugcuguacgcgaugagccggcucggccgcgaggacacgaucaagauccugcgggacgccggguaccacgugaaggccaacggcguggacgucaccacccaccgccaggacaucaacggcaaggagaugaaguucgaggugcugacccucgccucccugacgaccgagauccagaucaacaucgagaucgagagccggaaguccuacaagaagaugcugaaggagaugggggagguggccccggaguaccgccacgacagccccgacugcggcaugaucauccucugcaucgcggcccuggucaucaccaagcuggccgccggggaccgguccggccucaccgcggugauccgccgggccaacaacgugcugaagaacgagaugaagcgcuacaaggggcugcuccccaaggacaucgccaacagcuucuacgaggucuucgagaagcacccccacuucaucgacguguucgugcacuucggcaucgcccaguccagcacgcggggcgggucccgcgucgagggcaucuucgccgggcuguucaugaacgcguacggcgccggccaggugaugcugcgguggggcgugcucgccaagagcgucaagaacaucaugcuggggcacgccuccgugcaggccgagauggagcaggucguggagguguacgaguacgcgcagaagcucgggggcgaggccggguucuaccacauccugaacaacccgaaggccagccugcugucccucacccaguucccccacuucagcagcgugguccugggcaacgccgccggccuggggaucaugggcgaguaccgcgggacgccccggaaccaggaccucuacgacgcggccaaggccuacgccgagcagcugaaggagaacggcgugaucaacuacuccgugcuggaccucaccgccgaggagcuggaggcgaucaagcaccagcugaaccccaaggacaacgacgucgagcucugaggacuaguggaagcauuuuccuggcugauuaaaagaaauuacucagcuauggucaucuguuccuguuagaaggcuaugcagcauauuauauacuaugcgcauguuaugaaaugcauaauaaaaaauuuuaaaaaaucuaaaagaucuaaaaaaaaaaaaaaaaaaaaaaaaaaaaaaaaaaaaaaaaaaaaaaaaaaaaaaaaaaaaaaaaugcaucccccccccccccccccccccccccccccccaaaggcucuuuucagagccaccagaauu

SEQ ID NO: 10393 - RNA, 1520 nt, Artificial Sequence
  mRNA product Design g-1 comprising derived and/or modified sequence from HRSV(A2)__P03418.1__N (opt2)
gggagacuuucccauucuguagcagaauuugguguugccuguggucuuggucccgcggagaagcuuaccauggcccucuccaaggucaagcucaacgacacccucaacaaggaccagcuccucuccuccuccaaguacaccauccagcgcuccaccggcgacuccaucgacacccccaacuacgacguccagaagcacaucaacaagcucugcggcaugcuccucaucaccgaggacgccaaccacaaguucaccggccucaucggcaugcucuacgccaugucccgccucggccgcgaggacaccaucaagauccuccgcgacgccggcuaccacgucaaggccaacggcgucgacgucaccacccaccgccaggacaucaacggcaaggagaugaaguucgagguccucacccucgccucccucaccaccgagauccagaucaacaucgagaucgagucccgcaaguccuacaagaagaugcucaaggagaugggcgaggucgcccccgaguaccgccacgacucccccgacugcggcaugaucauccucugcaucgccgcccucgucaucaccaagcucgccgccggcgaccgcuccggccucaccgccgucauccgccgcgccaacaacguccucaagaacgagaugaagcgcuacaagggccuccuccccaaggacaucgccaacuccuucuacgaggucuucgagaagcacccccacuucaucgacgucuucguccacuucggcaucgcccaguccuccacccgcggcggcucccgcgucgagggcaucuucgccggccucuucaugaacgccuacggcgccggccaggucaugcuccgcuggggcguccucgccaaguccgucaagaacaucaugcucggccacgccuccguccaggccgagauggagcaggucgucgaggucuacgaguacgcccagaagcucggcggcgaggccggcuucuaccacauccucaacaaccccaaggccucccuccucucccucacccaguucccccacuucuccuccgucguccucggcaacgccgccggccucggcaucaugggcgaguaccgcggcaccccccgcaaccaggaccucuacgacgccgccaaggccuacgccgagcagcucaaggagaacggcgucaucaacuacuccguccucgaccucaccgccgaggagcucgaggccaucaagcaccagcucaaccccaaggacaacgacgucgagcucugaggacuaguggaagcauuuuccuggcugauuaaaagaaauuacucagcuauggucaucuguuccuguuagaaggcuaugcagcauauuauauacuaugcgcauguuaugaaaugcauaauaaaaaauuuuaaaaaaucuaaaagaucuaaaaaaaaaaaaaaaaaaaaaaaaaaaaaaaaaaaaaaaaaaaaaaaaaaaaaaaaaaaaaaaaugcaucccccccccccccccccccccccccccccccaaaggcucuuuucagagccaccagaauu

SEQ ID NO: 10394 - RNA, 1520 nt, Artificial Sequence
  mRNA product Design g-1 comprising derived and/or modified sequence from HRSV(A2)__P03418.1__N (opt3)
gggagacuuucccauucuguagcagaauuugguguugccuguggucuuggucccgcggagaagcuuaccauggcccugagcaaggugaaacucaacgacacccuuaauaaggaucagcuguuguccucuucaaaauacacaauccaaagaaguacuggcgacagcauugauacgcccaacuaugacguccagaagcacauaaauaaauuaugcgggaugcugcuaaucaccgaggaugcuaaccauaaguucacaggacucauugguaugcuguacgcaauguccaggcuuggccgggaagacacuaucaagauucugcgcgaugccggguaucacguuaaagcgaauggaguggacguaaccacacaucgacaggauaucaacggcaaggagaugaaauuugaaguguugacccucgcuucucugacuacagagauacagaucaauauugaaaucgagucgcguaagucauacaaaaagaugcugaaggagaugggugaagucgccccugaguauagacacgacagcccagauugugggaugauuauccucugcauagcagccuuagugauuaccaaacuggcugcaggagacaggaguggccuuacggccguuauccggcgcgcuaacaauguguugaagaacgaaaugaaaagauacaagggccugcuaccgaaagauauugccaauuccuucuaugaggucuuugagaagcauccccacuucaucgacguguuuguacacuucgggaucgcgcaaucuagcacuaggggagguucccggguugaaggcauuuuugcaggacucuucaugaacgccuacggggcuggccaggugaugcugcgcugggguguccuugccaaaucagugaagaauauaaugcuggggcaugcaagugugcaggcugagauggaacaggucguugagguguacgaauaugcccaaaaguugggaggcgaggcgggcuuuuaccacauccucaacaauccuaaagccagccuguuaucucugacccaguucccacauuuuuccucaguagugcucgggaacgcagcuggacuugguauuaugggcgaguaucgagggacacccagaaaccaggaccuguacgaugccgcuaaggccuaugcagaacaguugaaagagaauggagucaucaacuacagcgugcuagaccugacugccgaggaacucgaagcuauaaagcaccaacugaauccuaaagauaacgacguugagcuuugaggacuaguggaagcauuuuccuggcugauuaaaagaaauuacucagcuauggucaucuguuccuguuagaaggcuaugcagcauauuauauacuaugcgcauguuaugaaaugcauaauaaaaaauuuuaaaaaaucuaaaagaucuaaaaaaaaaaaaaaaaaaaaaaaaaaaaaaaaaaaaaaaaaaaaaaaaaaaaaaaaaaaaaaaaugcaucccccccccccccccccccccccccccccccaaaggcucuuuucagagccaccagaauu

SEQ ID NO: 10395 - RNA, 1520 nt, Artificial Sequence
  mRNA product Design g-1 comprising derived and/or modified sequence from HRSV(A2)__P03418.1__N (opt4)
gggagacuuucccauucuguagcagaauuugguguugccuguggucuuggucccgcggagaagcuuaccauggcccugagcaaggugaagcugaacgacacccugaacaaggaccagcugcugagcagcagcaaguacaccauccagagaagcaccggcgacagcaucgacacccccaacuacgacgugcagaagcacaucaacaagcugugcggcaugcugcugaucaccgaggacgccaaccacaaguucaccggccugaucggcaugcuguacgccaugagcagacugggcagagaggacaccaucaagauccugagagacgccggcuaccacgugaaggccaacggcguggacgugaccacccacagacaggacaucaacggcaaggagaugaaguucgaggugcugacccuggccagccugaccaccgagauccagaucaacaucgagaucgagagcagaaagagcuacaagaagaugcugaaggagaugggcgagguggcccccgaguacagacacgacagccccgacugcggcaugaucauccugugcaucgccgcccuggugaucaccaagcuggccgccggcgacagaagcggccugaccgccgugaucagaagagccaacaacgugcugaagaacgagaugaagagauacaagggccugcugcccaaggacaucgccaacagcuucuacgagguguucgagaagcacccccacuucaucgacguguucgugcacuucggcaucgcccagagcagcaccagaggcggcagcagaguggagggcaucuucgccggccuguucaugaacgccuacggcgccggccaggugaugcugagauggggcgugcuggccaagagcgugaagaacaucaugcugggccacgccagcgugcaggccgagauggagcaggugguggagguguacgaguacgcccagaagcugggcggcgaggccggcuucuaccacauccugaacaaccccaaggccagccugcugagccugacccaguucccccacuucagcagcguggugcugggcaacgccgccggccugggcaucaugggcgaguacagaggcacccccagaaaccaggaccuguacgacgccgccaaggccuacgccgagcagcugaaggagaacggcgugaucaacuacagcgugcuggaccugaccgccgaggagcuggaggccaucaagcaccagcugaaccccaaggacaacgacguggagcugugaggacuaguggaagcauuuuccuggcugauuaaaagaaauuacucagcuauggucaucuguuccuguuagaaggcuaugcagcauauuauauacuaugcgcauguuaugaaaugcauaauaaaaaauuuuaaaaaaucuaaaagaucuaaaaaaaaaaaaaaaaaaaaaaaaaaaaaaaaaaaaaaaaaaaaaaaaaaaaaaaaaaaaaaaaugcaucccccccccccccccccccccccccccccccaaaggcucuuuucagagccaccagaauu

SEQ ID NO: 10396 - RNA, 1520 nt, Artificial Sequence
  mRNA product Design g-1 comprising derived and/or modified sequence from HRSV(A2)__P03418.1__N (opt5)
gggagacuuucccauucuguagcagaauuugguguugccuguggucuuggucccgcggagaagcuuaccauggcccugagcaaggugaaacucaacgacacccugaauaaggaucagcuucuguccucuagcaaauacacaauccaaagauccacgggcgacucuauugauacccccaacuaugacguccagaagcacaucaauaaacucugcgggaugcugcuuauuacagaggaugcuaaccauaaguucaccggacugaucggcaugcucuacgccaugagccggcuggggcgcgaagacacaauuaagauccugagagaugcgggauaucacguuaaagcuaauggcguggacgugaccacacaucggcaggauaucaacgggaaggagaugaaauuugaaguccucacccuggccucccuuacgaccgagauucagaucaauauugaaaucgagucucgcaagagcuacaaaaagaugcugaaggagaugggagaaguggccccugaguauagacacgacuccccggauuguggcaugauuauccucugcauugcugcccugguuaucacaaaacuugcugccggcgaccggagcgggcugaccgcggugauccgcagagccaacaauguccucaagaacgaaaugaaacgguacaagggacugcugcccaaagauauugcuaauucuuucuaugagguguuugagaagcauccucacuucaucgacguuuuugugcacuucggcauugcccaauccagcacacgcgggggaucuagagucgaaggcaucuuugcuggacucuucaugaacgccuacggggcgggccaggugaugcugcgguggggcgugcuugccaaauccgucaagaauauuaugcuggggcaugcuagcguucaggccgagauggaacaggugguggaggucuacgaauaugcucaaaagcucggaggcgaggccggguuuuaccacauccugaacaaucccaaagccucucuucugucccucacccaguucccucauuuuagcuccgugguucugggaaacgcugcgggccuggggaucaugggagaguaucgcggcacgcccagaaaccaggaccucuacgaugccgcuaaggccuaugccgaacagcugaaagagaauggcgugauuaacuacucuguccuugaccugacagcugaggaacucgaagccaucaagcaccaacugaauccuaaagauaacgacguggagcuuugaggacuaguggaagcauuuuccuggcugauuaaaagaaauuacucagcuauggucaucuguuccuguuagaaggcuaugcagcauauuauauacuaugcgcauguuaugaaaugcauaauaaaaaauuuuaaaaaaucuaaaagaucuaaaaaaaaaaaaaaaaaaaaaaaaaaaaaaaaaaaaaaaaaaaaaaaaaaaaaaaaaaaaaaaaugcaucccccccccccccccccccccccccccccccaaaggcucuuuucagagccaccagaauu

SEQ ID NO: 10397 - RNA, 1520 nt, Artificial Sequence
  mRNA product Design g-1 comprising derived and/or modified sequence from HRSV(A2)__P03418.1__N (opt6)
gggagacuuucccauucuguagcagaauuugguguugccuguggucuuggucccgcggagaagcuuaccauggcacuaagcaaagucaaauuaaacgacacauuaaacaaagaccaacucuuaucaucaucaaaauacacaauacaaagaagcaccggagacaguaucgacacaccaaacuaugacguccaaaaacauauaaauaaauuaugcggcaugcucuuaaucacagaagacgccaaccauaaauuuacaggauuaauaggaauguuauaugcaaugucacgacuagguagagaagacacaauaaaaauacuaagagacgcaggcuaucacguaaaagcaaauggaguagacguaaccacacacagacaagacauaaauggaaaagaaaugaaauuugaaguauuaacacuagcaucacuaacaacagaaauacaaaucaacauagaaauagaaucaagaaaaagcuacaaaaaaauguuaaaagaaaugggagaagucgcaccagaauauagacaugauucaccagacugcggaaugauaauacuaugcauagcagcccuaguaauuacaaaacuagcagcaggagacagaagcggauuaacagcaguaauaagaagagcaaacaacguacuaaaaaacgaaaugaaaagauauaaaggauuauuaccaaaagacauagcaaacucauucuaugaaguauucgaaaaacacccccacuuuauagacgucuucguacacuucggaauagcccaaucauccacaagaggaggaucaagagucgaaggaauauucgcaggauuauucaugaacgcauauggcgcaggacaaguaaugcuaagauggggaguacuagcaaaauccgucaaaaacauaaugcuaggacacgcaucaguucaagcagaaauggaacaaguaguagaaguauacgaauacgcccaaaaacuaggaggagaagcaggauucuaccacauacuaaauaauccaaaagcaucacuacuaagccuaacccaauuuccccacuucucaaguguaguauuaggaaaugcagcuggacuaggaauaaugggagaauacagaggaacaccaagaaaccaagacuuauacgacgcagcaaaagcauacgcagagcaacuuaaagaaaacggaguaauaaacuauagcguacuagacuuaacagcagaagaacuggaagcaauaaaacaucaauuaaacccgaaagacaaugacguagaauuauaaggacuaguggaagcauuuuccuggcugauuaaaagaaauuacucagcuauggucaucuguuccuguuagaaggcuaugcagcauauuauauacuaugcgcauguuaugaaaugcauaauaaaaaauuuuaaaaaaucuaaaagaucuaaaaaaaaaaaaaaaaaaaaaaaaaaaaaaaaaaaaaaaaaaaaaaaaaaaaaaaaaaaaaaaaugcaucccccccccccccccccccccccccccccccaaaggcucuuuucagagccaccagaauu

SEQ ID NO: 10398 - RNA, 1520 nt, Artificial Sequence
  mRNA product Design g-1 comprising derived and/or modified sequence from HRSV(A2)__P03418.1__N (opt11)
gggagacuuucccauucuguagcagaauuugguguugccuguggucuuggucccgcggagaagcuuaccauggcacucucgaaaguaaaacucaacgacacccucaacaaagaccaacuccuuuccagcuccaaauacaccauccaacgauccaccggagacuccaucgacacgcccaacuacgacguccagaaacacaucaacaagcucugcggaaugcuacuaaucaccgaggacgccaaccacaaauucacaggacuuauagggaugcucuacgccaugucccgccucggacgcgaagacacaauaaaaauccuacgagacgccggcuaccacguaaaggcaaacggcgucgacgucaccacacacagacaagacaucaacggaaaggaaaugaaauucgaaguccucacccucgccagccuaaccaccgagauccaaaucaacaucgaaaucgaaucacgcaaauccuacaagaaaaugcucaaagaaaugggagaagucgcccccgaauaccgucacgacucgcccgacugcggcaugauaauccuaugcaucgccgcacucgucauaaccaaacucgccgccggugaccgaucaggacugacagcagucauccgccgagcaaacaacgugcucaaaaacgaaaugaaacgcuacaaaggccuacuccccaaagacaucgccaacuccuucuacgaagucuucgaaaaacacccacacuucaucgacgucuucguccacuucggcaucgcacaaucaucaaccagaggcggcagccgcguugaaggcaucuucgcaggacucuuuaugaacgccuacggcgccggccaagucaugcuccgcuggggcguccuggcaaaaagcgucaaaaacaucaugcuaggccacgcuagcguccaagccgaaauggaacaagucgucgaaguuuacgaguacgcacaaaaacucggcggcgaagcaggcuucuaccacauccuaaacaaccccaaagccucccugcuaucacucacccaauucccccacuucuccagcgucguccucggcaacgccgcaggacuaggcaucaugggagaauaccgcgggacaccgcgcaaccaagaccucuacgacgccgccaaagccuacgccgaacaacucaaagaaaacggcgucauaaacuacucaguccucgaccucaccgccgaagaacucgaagccaucaaacaccaacucaacccaaaagacaacgacgucgaauuauaaggacuaguggaagcauuuuccuggcugauuaaaagaaauuacucagcuauggucaucuguuccuguuagaaggcuaugcagcauauuauauacuaugcgcauguuaugaaaugcauaauaaaaaauuuuaaaaaaucuaaaagaucuaaaaaaaaaaaaaaaaaaaaaaaaaaaaaaaaaaaaaaaaaaaaaaaaaaaaaaaaaaaaaaaaugcaucccccccccccccccccccccccccccccccaaaggcucuuuucagagccaccagaauu

SEQ ID NO: 10399 - RNA, 1535 nt, Artificial Sequence
  mRNA product Design g-2 comprising derived and/or modified sequence from HRSV(A2)__P03418.1__N (wt)
gggagaguccgcucagccagguugcagaagcggcuuagcguguguccuaaucuucucucugcguguagguaggccugugccgcaaacaagcuuaccauggcucuuagcaaagucaaguugaaugauacacucaacaaagaucaacuucugucauccagcaaauacaccauccaacggagcacaggagauaguauugauacuccuaauuaugaugugcagaaacacaucaauaaguuauguggcauguuauuaaucacagaagaugcuaaucauaaauucacuggguuaauagguauguuauaugcgaugucuagguuaggaagagaagacaccauaaaaauacucagagaugcgggauaucauguaaaagcaaauggaguagauguaacaacacaucgucaagacauuaauggaaaagaaaugaaauuugaaguguuaacauuggcaagcuuaacaacugaaauucaaaucaacauugagauagaaucuagaaaauccuacaaaaaaaugcuaaaagaaaugggagagguagcuccagaauacaggcaugacucuccugauugugggaugauaauauuauguauagcagcauuaguaauaacuaaauuagcagcaggggacagaucuggucuuacagccgugauuaggagagcuaauaauguccuaaaaaaugaaaugaaacguuacaaaggcuuacuacccaaggacauagccaacagcuucuaugaaguguuugaaaaacauccccacuuuauagauguuuuuguucauuuugguauagcacaaucuucuaccagagguggcaguagaguugaagggauuuuugcaggauuguuuaugaaugccuauggugcagggcaagugauguuacgguggggagucuuagcaaaaucaguuaaaaauauuauguuaggacaugcuagugugcaagcagaaauggaacaaguuguugagguuuaugaauaugcccaaaaauuggguggugaagcaggauucuaccauauauugaacaacccaaaagcaucauuauuaucuuugacucaauuuccucacuucuccaguguaguauuaggcaaugcugcuggccuaggcauaaugggagaguacagagguacaccgaggaaucaagaucuauaugaugcagcaaaggcauaugcugaacaacucaaagaaaauggugugauuaacuacaguguacuagacuugacagcagaagaacuagaggcuaucaaacaucagcuuaauccaaaagauaaugauguagagcuuugaggacuaguaauaaggaaacuguaugaaugucugugggcaggaagugaagagauccuucuguaaagguuuuuggaauuaugucugcugaauaauaaacuuuuuugaaauaauaaaucugguagaaaaaugagaucuaaaaaaaaaaaaaaaaaaaaaaaaaaaaaaaaaaaaaaaaaaaaaaaaaaaaaaaaaaaaaaaaugcaucccccccccccccccccccccccccccccccaaaggcucuuuucagagccaccagaauu

SEQ ID NO: 10400 - RNA, 1535 nt, Artificial Sequence
  mRNA product Design g-2 comprising derived and/or modified sequence from HRSV(A2)__P03418.1__N (opt1)
gggagaguccgcucagccagguugcagaagcggcuuagcguguguccuaaucuucucucugcguguagguaggccugugccgcaaacaagcuuaccauggcccugagcaaggugaagcucaacgacacccugaacaaggaccagcugcucuccagcuccaaguacaccauccagcgcagcaccggcgacuccaucgacacccccaacuacgacguccagaagcacaucaacaagcugugcgggaugcugcucaucaccgaggacgccaaccacaaguucaccggccugaucgggaugcuguacgcgaugagccggcucggccgcgaggacacgaucaagauccugcgggacgccggguaccacgugaaggccaacggcguggacgucaccacccaccgccaggacaucaacggcaaggagaugaaguucgaggugcugacccucgccucccugacgaccgagauccagaucaacaucgagaucgagagccggaaguccuacaagaagaugcugaaggagaugggggagguggccccggaguaccgccacgacagccccgacugcggcaugaucauccucugcaucgcggcccuggucaucaccaagcuggccgccggggaccgguccggccucaccgcggugauccgccgggccaacaacgugcugaagaacgagaugaagcgcuacaaggggcugcuccccaaggacaucgccaacagcuucuacgaggucuucgagaagcacccccacuucaucgacguguucgugcacuucggcaucgcccaguccagcacgcggggcgggucccgcgucgagggcaucuucgccgggcuguucaugaacgcguacggcgccggccaggugaugcugcgguggggcgugcucgccaagagcgucaagaacaucaugcuggggcacgccuccgugcaggccgagauggagcaggucguggagguguacgaguacgcgcagaagcucgggggcgaggccggguucuaccacauccugaacaacccgaaggccagccugcugucccucacccaguucccccacuucagcagcgugguccugggcaacgccgccggccuggggaucaugggcgaguaccgcgggacgccccggaaccaggaccucuacgacgcggccaaggccuacgccgagcagcugaaggagaacggcgugaucaacuacuccgugcuggaccucaccgccgaggagcuggaggcgaucaagcaccagcugaaccccaaggacaacgacgucgagcucugaggacuaguaauaaggaaacuguaugaaugucugugggcaggaagugaagagauccuucuguaaagguuuuuggaauuaugucugcugaauaauaaacuuuuuugaaauaauaaaucugguagaaaaaugagaucuaaaaaaaaaaaaaaaaaaaaaaaaaaaaaaaaaaaaaaaaaaaaaaaaaaaaaaaaaaaaaaaaugcaucccccccccccccccccccccccccccccccaaaggcucuuuucagagccaccagaauu

SEQ ID NO: 10401 - RNA, 1535 nt, Artificial Sequence
  mRNA product Design g-2 comprising derived and/or modified sequence from HRSV(A2)__P03418.1__N (opt2)
gggagaguccgcucagccagguugcagaagcggcuuagcguguguccuaaucuucucucugcguguagguaggccugugccgcaaacaagcuuaccauggcccucuccaaggucaagcucaacgacacccucaacaaggaccagcuccucuccuccuccaaguacaccauccagcgcuccaccggcgacuccaucgacacccccaacuacgacguccagaagcacaucaacaagcucugcggcaugcuccucaucaccgaggacgccaaccacaaguucaccggccucaucggcaugcucuacgccaugucccgccucggccgcgaggacaccaucaagauccuccgcgacgccggcuaccacgucaaggccaacggcgucgacgucaccacccaccgccaggacaucaacggcaaggagaugaaguucgagguccucacccucgccucccucaccaccgagauccagaucaacaucgagaucgagucccgcaaguccuacaagaagaugcucaaggagaugggcgaggucgcccccgaguaccgccacgacucccccgacugcggcaugaucauccucugcaucgccgcccucgucaucaccaagcucgccgccggcgaccgcuccggccucaccgccgucauccgccgcgccaacaacguccucaagaacgagaugaagcgcuacaagggccuccuccccaaggacaucgccaacuccuucuacgaggucuucgagaagcacccccacuucaucgacgucuucguccacuucggcaucgcccaguccuccacccgcggcggcucccgcgucgagggcaucuucgccggccucuucaugaacgccuacggcgccggccaggucaugcuccgcuggggcguccucgccaaguccgucaagaacaucaugcucggccacgccuccguccaggccgagauggagcaggucgucgaggucuacgaguacgcccagaagcucggcggcgaggccggcuucuaccacauccucaacaaccccaaggccucccuccucucccucacccaguucccccacuucuccuccgucguccucggcaacgccgccggccucggcaucaugggcgaguaccgcggcaccccccgcaaccaggaccucuacgacgccgccaaggccuacgccgagcagcucaaggagaacggcgucaucaacuacuccguccucgaccucaccgccgaggagcucgaggccaucaagcaccagcucaaccccaaggacaacgacgucgagcucugaggacuaguaauaaggaaacuguaugaaugucugugggcaggaagugaagagauccuucuguaaagguuuuuggaauuaugucugcugaauaauaaacuuuuuugaaauaauaaaucugguagaaaaaugagaucuaaaaaaaaaaaaaaaaaaaaaaaaaaaaaaaaaaaaaaaaaaaaaaaaaaaaaaaaaaaaaaaaugcaucccccccccccccccccccccccccccccccaaaggcucuuuucagagccaccagaauu

SEQ ID NO: 10402 - RNA, 1535 nt, Artificial Sequence
  mRNA product Design g-2 comprising derived and/or modified sequence from HRSV(A2)__P03418.1__N (opt3)
gggagaguccgcucagccagguugcagaagcggcuuagcguguguccuaaucuucucucugcguguagguaggccugugccgcaaacaagcuuaccauggcccugagcaaggugaaacucaacgacacccuuaauaaggaucagcuguuguccucuucaaaauacacaauccaaagaaguacuggcgacagcauugauacgcccaacuaugacguccagaagcacauaaauaaauuaugcgggaugcugcuaaucaccgaggaugcuaaccauaaguucacaggacucauugguaugcuguacgcaauguccaggcuuggccgggaagacacuaucaagauucugcgcgaugccggguaucacguuaaagcgaauggaguggacguaaccacacaucgacaggauaucaacggcaaggagaugaaauuugaaguguugacccucgcuucucugacuacagagauacagaucaauauugaaaucgagucgcguaagucauacaaaaagaugcugaaggagaugggugaagucgccccugaguauagacacgacagcccagauugugggaugauuauccucugcauagcagccuuagugauuaccaaacuggcugcaggagacaggaguggccuuacggccguuauccggcgcgcuaacaauguguugaagaacgaaaugaaaagauacaagggccugcuaccgaaagauauugccaauuccuucuaugaggucuuugagaagcauccccacuucaucgacguguuuguacacuucgggaucgcgcaaucuagcacuaggggagguucccggguugaaggcauuuuugcaggacucuucaugaacgccuacggggcuggccaggugaugcugcgcugggguguccuugccaaaucagugaagaauauaaugcuggggcaugcaagugugcaggcugagauggaacaggucguugagguguacgaauaugcccaaaaguugggaggcgaggcgggcuuuuaccacauccucaacaauccuaaagccagccuguuaucucugacccaguucccacauuuuuccucaguagugcucgggaacgcagcuggacuugguauuaugggcgaguaucgagggacacccagaaaccaggaccuguacgaugccgcuaaggccuaugcagaacaguugaaagagaauggagucaucaacuacagcgugcuagaccugacugccgaggaacucgaagcuauaaagcaccaacugaauccuaaagauaacgacguugagcuuugaggacuaguaauaaggaaacuguaugaaugucugugggcaggaagugaagagauccuucuguaaagguuuuuggaauuaugucugcugaauaauaaacuuuuuugaaauaauaaaucugguagaaaaaugagaucuaaaaaaaaaaaaaaaaaaaaaaaaaaaaaaaaaaaaaaaaaaaaaaaaaaaaaaaaaaaaaaaaugcaucccccccccccccccccccccccccccccccaaaggcucuuuucagagccaccagaauu

SEQ ID NO: 10403 - RNA, 1535 nt, Artificial Sequence
  mRNA product Design g-2 comprising derived and/or modified sequence from HRSV(A2)__P03418.1__N (opt4)
gggagaguccgcucagccagguugcagaagcggcuuagcguguguccuaaucuucucucugcguguagguaggccugugccgcaaacaagcuuaccauggcccugagcaaggugaagcugaacgacacccugaacaaggaccagcugcugagcagcagcaaguacaccauccagagaagcaccggcgacagcaucgacacccccaacuacgacgugcagaagcacaucaacaagcugugcggcaugcugcugaucaccgaggacgccaaccacaaguucaccggccugaucggcaugcuguacgccaugagcagacugggcagagaggacaccaucaagauccugagagacgccggcuaccacgugaaggccaacggcguggacgugaccacccacagacaggacaucaacggcaaggagaugaaguucgaggugcugacccuggccagccugaccaccgagauccagaucaacaucgagaucgagagcagaaagagcuacaagaagaugcugaaggagaugggcgagguggcccccgaguacagacacgacagccccgacugcggcaugaucauccugugcaucgccgcccuggugaucaccaagcuggccgccggcgacagaagcggccugaccgccgugaucagaagagccaacaacgugcugaagaacgagaugaagagauacaagggccugcugcccaaggacaucgccaacagcuucuacgagguguucgagaagcacccccacuucaucgacguguucgugcacuucggcaucgcccagagcagcaccagaggcggcagcagaguggagggcaucuucgccggccuguucaugaacgccuacggcgccggccaggugaugcugagauggggcgugcuggccaagagcgugaagaacaucaugcugggccacgccagcgugcaggccgagauggagcaggugguggagguguacgaguacgcccagaagcugggcggcgaggccggcuucuaccacauccugaacaaccccaaggccagccugcugagccugacccaguucccccacuucagcagcguggugcugggcaacgccgccggccugggcaucaugggcgaguacagaggcacccccagaaaccaggaccuguacgacgccgccaaggccuacgccgagcagcugaaggagaacggcgugaucaacuacagcgugcuggaccugaccgccgaggagcuggaggccaucaagcaccagcugaaccccaaggacaacgacguggagcugugaggacuaguaauaaggaaacuguaugaaugucugugggcaggaagugaagagauccuucuguaaagguuuuuggaauuaugucugcugaauaauaaacuuuuuugaaauaauaaaucugguagaaaaaugagaucuaaaaaaaaaaaaaaaaaaaaaaaaaaaaaaaaaaaaaaaaaaaaaaaaaaaaaaaaaaaaaaaaugcaucccccccccccccccccccccccccccccccaaaggcucuuuucagagccaccagaauu

SEQ ID NO: 10404 - RNA, 1535 nt, Artificial Sequence
  mRNA product Design g-2 comprising derived and/or modified sequence from HRSV(A2)__P03418.1__N (opt5)
gggagaguccgcucagccagguugcagaagcggcuuagcguguguccuaaucuucucucugcguguagguaggccugugccgcaaacaagcuuaccauggcccugagcaaggugaaacucaacgacacccugaauaaggaucagcuucuguccucuagcaaauacacaauccaaagauccacgggcgacucuauugauacccccaacuaugacguccagaagcacaucaauaaacucugcgggaugcugcuuauuacagaggaugcuaaccauaaguucaccggacugaucggcaugcucuacgccaugagccggcuggggcgcgaagacacaauuaagauccugagagaugcgggauaucacguuaaagcuaauggcguggacgugaccacacaucggcaggauaucaacgggaaggagaugaaauuugaaguccucacccuggccucccuuacgaccgagauucagaucaauauugaaaucgagucucgcaagagcuacaaaaagaugcugaaggagaugggagaaguggccccugaguauagacacgacuccccggauuguggcaugauuauccucugcauugcugcccugguuaucacaaaacuugcugccggcgaccggagcgggcugaccgcggugauccgcagagccaacaauguccucaagaacgaaaugaaacgguacaagggacugcugcccaaagauauugcuaauucuuucuaugagguguuugagaagcauccucacuucaucgacguuuuugugcacuucggcauugcccaauccagcacacgcgggggaucuagagucgaaggcaucuuugcuggacucuucaugaacgccuacggggcgggccaggugaugcugcgguggggcgugcuugccaaauccgucaagaauauuaugcuggggcaugcuagcguucaggccgagauggaacaggugguggaggucuacgaauaugcucaaaagcucggaggcgaggccggguuuuaccacauccugaacaaucccaaagccucucuucugucccucacccaguucccucauuuuagcuccgugguucugggaaacgcugcgggccuggggaucaugggagaguaucgcggcacgcccagaaaccaggaccucuacgaugccgcuaaggccuaugccgaacagcugaaagagaauggcgugauuaacuacucuguccuugaccugacagcugaggaacucgaagccaucaagcaccaacugaauccuaaagauaacgacguggagcuuugaggacuaguaauaaggaaacuguaugaaugucugugggcaggaagugaagagauccuucuguaaagguuuuuggaauuaugucugcugaauaauaaacuuuuuugaaauaauaaaucugguagaaaaaugagaucuaaaaaaaaaaaaaaaaaaaaaaaaaaaaaaaaaaaaaaaaaaaaaaaaaaaaaaaaaaaaaaaaugcaucccccccccccccccccccccccccccccccaaaggcucuuuucagagccaccagaauu

SEQ ID NO: 10405 - RNA, 1535 nt, Artificial Sequence
  mRNA product Design g-2 comprising derived and/or modified sequence from HRSV(A2)__P03418.1__N (opt6)
gggagaguccgcucagccagguugcagaagcggcuuagcguguguccuaaucuucucucugcguguagguaggccugugccgcaaacaagcuuaccauggcacuaagcaaagucaaauuaaacgacacauuaaacaaagaccaacucuuaucaucaucaaaauacacaauacaaagaagcaccggagacaguaucgacacaccaaacuaugacguccaaaaacauauaaauaaauuaugcggcaugcucuuaaucacagaagacgccaaccauaaauuuacaggauuaauaggaauguuauaugcaaugucacgacuagguagagaagacacaauaaaaauacuaagagacgcaggcuaucacguaaaagcaaauggaguagacguaaccacacacagacaagacauaaauggaaaagaaaugaaauuugaaguauuaacacuagcaucacuaacaacagaaauacaaaucaacauagaaauagaaucaagaaaaagcuacaaaaaaauguuaaaagaaaugggagaagucgcaccagaauauagacaugauucaccagacugcggaaugauaauacuaugcauagcagcccuaguaauuacaaaacuagcagcaggagacagaagcggauuaacagcaguaauaagaagagcaaacaacguacuaaaaaacgaaaugaaaagauauaaaggauuauuaccaaaagacauagcaaacucauucuaugaaguauucgaaaaacacccccacuuuauagacgucuucguacacuucggaauagcccaaucauccacaagaggaggaucaagagucgaaggaauauucgcaggauuauucaugaacgcauauggcgcaggacaaguaaugcuaagauggggaguacuagcaaaauccgucaaaaacauaaugcuaggacacgcaucaguucaagcagaaauggaacaaguaguagaaguauacgaauacgcccaaaaacuaggaggagaagcaggauucuaccacauacuaaauaauccaaaagcaucacuacuaagccuaacccaauuuccccacuucucaaguguaguauuaggaaaugcagcuggacuaggaauaaugggagaauacagaggaacaccaagaaaccaagacuuauacgacgcagcaaaagcauacgcagagcaacuuaaagaaaacggaguaauaaacuauagcguacuagacuuaacagcagaagaacuggaagcaauaaaacaucaauuaaacccgaaagacaaugacguagaauuauaaggacuaguaauaaggaaacuguaugaaugucugugggcaggaagugaagagauccuucuguaaagguuuuuggaauuaugucugcugaauaauaaacuuuuuugaaauaauaaaucugguagaaaaaugagaucuaaaaaaaaaaaaaaaaaaaaaaaaaaaaaaaaaaaaaaaaaaaaaaaaaaaaaaaaaaaaaaaaugcaucccccccccccccccccccccccccccccccaaaggcucuuuucagagccaccagaauu

SEQ ID NO: 10406 - RNA, 1535 nt, Artificial Sequence
  mRNA product Design g-2 comprising derived and/or modified sequence from HRSV(A2)__P03418.1__N (opt11)
gggagaguccgcucagccagguugcagaagcggcuuagcguguguccuaaucuucucucugcguguagguaggccugugccgcaaacaagcuuaccauggcacucucgaaaguaaaacucaacgacacccucaacaaagaccaacuccuuuccagcuccaaauacaccauccaacgauccaccggagacuccaucgacacgcccaacuacgacguccagaaacacaucaacaagcucugcggaaugcuacuaaucaccgaggacgccaaccacaaauucacaggacuuauagggaugcucuacgccaugucccgccucggacgcgaagacacaauaaaaauccuacgagacgccggcuaccacguaaaggcaaacggcgucgacgucaccacacacagacaagacaucaacggaaaggaaaugaaauucgaaguccucacccucgccagccuaaccaccgagauccaaaucaacaucgaaaucgaaucacgcaaauccuacaagaaaaugcucaaagaaaugggagaagucgcccccgaauaccgucacgacucgcccgacugcggcaugauaauccuaugcaucgccgcacucgucauaaccaaacucgccgccggugaccgaucaggacugacagcagucauccgccgagcaaacaacgugcucaaaaacgaaaugaaacgcuacaaaggccuacuccccaaagacaucgccaacuccuucuacgaagucuucgaaaaacacccacacuucaucgacgucuucguccacuucggcaucgcacaaucaucaaccagaggcggcagccgcguugaaggcaucuucgcaggacucuuuaugaacgccuacggcgccggccaagucaugcuccgcuggggcguccuggcaaaaagcgucaaaaacaucaugcuaggccacgcuagcguccaagccgaaauggaacaagucgucgaaguuuacgaguacgcacaaaaacucggcggcgaagcaggcuucuaccacauccuaaacaaccccaaagccucccugcuaucacucacccaauucccccacuucuccagcgucguccucggcaacgccgcaggacuaggcaucaugggagaauaccgcgggacaccgcgcaaccaagaccucuacgacgccgccaaagccuacgccgaacaacucaaagaaaacggcgucauaaacuacucaguccucgaccucaccgccgaagaacucgaagccaucaaacaccaacucaacccaaaagacaacgacgucgaauuauaaggacuaguaauaaggaaacuguaugaaugucugugggcaggaagugaagagauccuucuguaaagguuuuuggaauuaugucugcugaauaauaaacuuuuuugaaauaauaaaucugguagaaaaaugagaucuaaaaaaaaaaaaaaaaaaaaaaaaaaaaaaaaaaaaaaaaaaaaaaaaaaaaaaaaaaaaaaaaugcaucccccccccccccccccccccccccccccccaaaggcucuuuucagagccaccagaauu

SEQ ID NO: 10407 - RNA, 1767 nt, Artificial Sequence
  mRNA product Design g-3 comprising derived and/or modified sequence from HRSV(A2)__P03418.1__N (wt)
gggagaguccgcucagccagguugcagaagcggcuuagcguguguccuaaucuucucucugcguguagguaggccugugccgcaaacaagcuuaccauggcucuuagcaaagucaaguugaaugauacacucaacaaagaucaacuucugucauccagcaaauacaccauccaacggagcacaggagauaguauugauacuccuaauuaugaugugcagaaacacaucaauaaguuauguggcauguuauuaaucacagaagaugcuaaucauaaauucacuggguuaauagguauguuauaugcgaugucuagguuaggaagagaagacaccauaaaaauacucagagaugcgggauaucauguaaaagcaaauggaguagauguaacaacacaucgucaagacauuaauggaaaagaaaugaaauuugaaguguuaacauuggcaagcuuaacaacugaaauucaaaucaacauugagauagaaucuagaaaauccuacaaaaaaaugcuaaaagaaaugggagagguagcuccagaauacaggcaugacucuccugauugugggaugauaauauuauguauagcagcauuaguaauaacuaaauuagcagcaggggacagaucuggucuuacagccgugauuaggagagcuaauaauguccuaaaaaaugaaaugaaacguuacaaaggcuuacuacccaaggacauagccaacagcuucuaugaaguguuugaaaaacauccccacuuuauagauguuuuuguucauuuugguauagcacaaucuucuaccagagguggcaguagaguugaagggauuuuugcaggauuguuuaugaaugccuauggugcagggcaagugauguuacgguggggagucuuagcaaaaucaguuaaaaauauuauguuaggacaugcuagugugcaagcagaaauggaacaaguuguugagguuuaugaauaugcccaaaaauuggguggugaagcaggauucuaccauauauugaacaacccaaaagcaucauuauuaucuuugacucaauuuccucacuucuccaguguaguauuaggcaaugcugcuggccuaggcauaaugggagaguacagagguacaccgaggaaucaagaucuauaugaugcagcaaaggcauaugcugaacaacucaaagaaaauggugugauuaacuacaguguacuagacuugacagcagaagaacuagaggcuaucaaacaucagcuuaauccaaaagauaaugauguagagcuuugaggacuagugaagggaacacccaaauuuaauucagccuuaagcacaauuaauuaagagugaaacguaauuguacaagcaguuggucacccaccauagggcaugaucaacaccgcaaccuuuccuuuuucccccagugauucugaaaaaccccucuucccuucagcuugcuuagauguuccaaauuuaguaagcuuaaggcggccuacagaagaaaaagaaaaaaaaggccacaaaaguucccucucacuuucaguaaauaaaauaaaagcagcaacagaaauaaagaaauaaaugaaauucaaaaugaaauaaauauuguguugugcagcauuaaaaaaucaauaaaaauuaaaaaugagcaagaucuaaaaaaaaaaaaaaaaaaaaaaaaaaaaaaaaaaaaaaaaaaaaaaaaaaaaaaaaaaaaaaaaugcaucccccccccccccccccccccccccccccccaaaggcucuuuucagagccaccagaauu

SEQ ID NO: 10408 - RNA, 1767 nt, Artificial Sequence
  mRNA product Design g-3 comprising derived and/or modified sequence from HRSV(A2)__P03418.1__N (opt1)
gggagaguccgcucagccagguugcagaagcggcuuagcguguguccuaaucuucucucugcguguagguaggccugugccgcaaacaagcuuaccauggcccugagcaaggugaagcucaacgacacccugaacaaggaccagcugcucuccagcuccaaguacaccauccagcgcagcaccggcgacuccaucgacacccccaacuacgacguccagaagcacaucaacaagcugugcgggaugcugcucaucaccgaggacgccaaccacaaguucaccggccugaucgggaugcuguacgcgaugagccggcucggccgcgaggacacgaucaagauccugcgggacgccggguaccacgugaaggccaacggcguggacgucaccacccaccgccaggacaucaacggcaaggagaugaaguucgaggugcugacccucgccucccugacgaccgagauccagaucaacaucgagaucgagagccggaaguccuacaagaagaugcugaaggagaugggggagguggccccggaguaccgccacgacagccccgacugcggcaugaucauccucugcaucgcggcccuggucaucaccaagcuggccgccggggaccgguccggccucaccgcggugauccgccgggccaacaacgugcugaagaacgagaugaagcgcuacaaggggcugcuccccaaggacaucgccaacagcuucuacgaggucuucgagaagcacccccacuucaucgacguguucgugcacuucggcaucgcccaguccagcacgcggggcgggucccgcgucgagggcaucuucgccgggcuguucaugaacgcguacggcgccggccaggugaugcugcgguggggcgugcucgccaagagcgucaagaacaucaugcuggggcacgccuccgugcaggccgagauggagcaggucguggagguguacgaguacgcgcagaagcucgggggcgaggccggguucuaccacauccugaacaacccgaaggccagccugcugucccucacccaguucccccacuucagcagcgugguccugggcaacgccgccggccuggggaucaugggcgaguaccgcgggacgccccggaaccaggaccucuacgacgcggccaaggccuacgccgagcagcugaaggagaacggcgugaucaacuacuccgugcuggaccucaccgccgaggagcuggaggcgaucaagcaccagcugaaccccaaggacaacgacgucgagcucugaggacuagugaagggaacacccaaauuuaauucagccuuaagcacaauuaauuaagagugaaacguaauuguacaagcaguuggucacccaccauagggcaugaucaacaccgcaaccuuuccuuuuucccccagugauucugaaaaaccccucuucccuucagcuugcuuagauguuccaaauuuaguaagcuuaaggcggccuacagaagaaaaagaaaaaaaaggccacaaaaguucccucucacuuucaguaaauaaaauaaaagcagcaacagaaauaaagaaauaaaugaaauucaaaaugaaauaaauauuguguugugcagcauuaaaaaaucaauaaaaauuaaaaaugagcaagaucuaaaaaaaaaaaaaaaaaaaaaaaaaaaaaaaaaaaaaaaaaaaaaaaaaaaaaaaaaaaaaaaaugcaucccccccccccccccccccccccccccccccaaaggcucuuuucagagccaccagaauu

SEQ ID NO: 10409 - RNA, 1767 nt, Artificial Sequence
  mRNA product Design g-3 comprising derived and/or modified sequence from HRSV(A2)__P03418.1__N (opt2)
gggagaguccgcucagccagguugcagaagcggcuuagcguguguccuaaucuucucucugcguguagguaggccugugccgcaaacaagcuuaccauggcccucuccaaggucaagcucaacgacacccucaacaaggaccagcuccucuccuccuccaaguacaccauccagcgcuccaccggcgacuccaucgacacccccaacuacgacguccagaagcacaucaacaagcucugcggcaugcuccucaucaccgaggacgccaaccacaaguucaccggccucaucggcaugcucuacgccaugucccgccucggccgcgaggacaccaucaagauccuccgcgacgccggcuaccacgucaaggccaacggcgucgacgucaccacccaccgccaggacaucaacggcaaggagaugaaguucgagguccucacccucgccucccucaccaccgagauccagaucaacaucgagaucgagucccgcaaguccuacaagaagaugcucaaggagaugggcgaggucgcccccgaguaccgccacgacucccccgacugcggcaugaucauccucugcaucgccgcccucgucaucaccaagcucgccgccggcgaccgcuccggccucaccgccgucauccgccgcgccaacaacguccucaagaacgagaugaagcgcuacaagggccuccuccccaaggacaucgccaacuccuucuacgaggucuucgagaagcacccccacuucaucgacgucuucguccacuucggcaucgcccaguccuccacccgcggcggcucccgcgucgagggcaucuucgccggccucuucaugaacgccuacggcgccggccaggucaugcuccgcuggggcguccucgccaaguccgucaagaacaucaugcucggccacgccuccguccaggccgagauggagcaggucgucgaggucuacgaguacgcccagaagcucggcggcgaggccggcuucuaccacauccucaacaaccccaaggccucccuccucucccucacccaguucccccacuucuccuccgucguccucggcaacgccgccggccucggcaucaugggcgaguaccgcggcaccccccgcaaccaggaccucuacgacgccgccaaggccuacgccgagcagcucaaggagaacggcgucaucaacuacuccguccucgaccucaccgccgaggagcucgaggccaucaagcaccagcucaaccccaaggacaacgacgucgagcucugaggacuagugaagggaacacccaaauuuaauucagccuuaagcacaauuaauuaagagugaaacguaauuguacaagcaguuggucacccaccauagggcaugaucaacaccgcaaccuuuccuuuuucccccagugauucugaaaaaccccucuucccuucagcuugcuuagauguuccaaauuuaguaagcuuaaggcggccuacagaagaaaaagaaaaaaaaggccacaaaaguucccucucacuuucaguaaauaaaauaaaagcagcaacagaaauaaagaaauaaaugaaauucaaaaugaaauaaauauuguguugugcagcauuaaaaaaucaauaaaaauuaaaaaugagcaagaucuaaaaaaaaaaaaaaaaaaaaaaaaaaaaaaaaaaaaaaaaaaaaaaaaaaaaaaaaaaaaaaaaugcaucccccccccccccccccccccccccccccccaaaggcucuuuucagagccaccagaauu

SEQ ID NO: 10410 - RNA, 1767 nt, Artificial Sequence
  mRNA product Design g-3 comprising derived and/or modified sequence from HRSV(A2)__P03418.1__N (opt3)
gggagaguccgcucagccagguugcagaagcggcuuagcguguguccuaaucuucucucugcguguagguaggccugugccgcaaacaagcuuaccauggcccugagcaaggugaaacucaacgacacccuuaauaaggaucagcuguuguccucuucaaaauacacaauccaaagaaguacuggcgacagcauugauacgcccaacuaugacguccagaagcacauaaauaaauuaugcgggaugcugcuaaucaccgaggaugcuaaccauaaguucacaggacucauugguaugcuguacgcaauguccaggcuuggccgggaagacacuaucaagauucugcgcgaugccggguaucacguuaaagcgaauggaguggacguaaccacacaucgacaggauaucaacggcaaggagaugaaauuugaaguguugacccucgcuucucugacuacagagauacagaucaauauugaaaucgagucgcguaagucauacaaaaagaugcugaaggagaugggugaagucgccccugaguauagacacgacagcccagauugugggaugauuauccucugcauagcagccuuagugauuaccaaacuggcugcaggagacaggaguggccuuacggccguuauccggcgcgcuaacaauguguugaagaacgaaaugaaaagauacaagggccugcuaccgaaagauauugccaauuccuucuaugaggucuuugagaagcauccccacuucaucgacguguuuguacacuucgggaucgcgcaaucuagcacuaggggagguucccggguugaaggcauuuuugcaggacucuucaugaacgccuacggggcuggccaggugaugcugcgcugggguguccuugccaaaucagugaagaauauaaugcuggggcaugcaagugugcaggcugagauggaacaggucguugagguguacgaauaugcccaaaaguugggaggcgaggcgggcuuuuaccacauccucaacaauccuaaagccagccuguuaucucugacccaguucccacauuuuuccucaguagugcucgggaacgcagcuggacuugguauuaugggcgaguaucgagggacacccagaaaccaggaccuguacgaugccgcuaaggccuaugcagaacaguugaaagagaauggagucaucaacuacagcgugcuagaccugacugccgaggaacucgaagcuauaaagcaccaacugaauccuaaagauaacgacguugagcuuugaggacuagugaagggaacacccaaauuuaauucagccuuaagcacaauuaauuaagagugaaacguaauuguacaagcaguuggucacccaccauagggcaugaucaacaccgcaaccuuuccuuuuucccccagugauucugaaaaaccccucuucccuucagcuugcuuagauguuccaaauuuaguaagcuuaaggcggccuacagaagaaaaagaaaaaaaaggccacaaaaguucccucucacuuucaguaaauaaaauaaaagcagcaacagaaauaaagaaauaaaugaaauucaaaaugaaauaaauauuguguugugcagcauuaaaaaaucaauaaaaauuaaaaaugagcaagaucuaaaaaaaaaaaaaaaaaaaaaaaaaaaaaaaaaaaaaaaaaaaaaaaaaaaaaaaaaaaaaaaaugcaucccccccccccccccccccccccccccccccaaaggcucuuuucagagccaccagaauu

SEQ ID NO: 10411 - RNA, 1767 nt, Artificial Sequence
  mRNA product Design g-3 comprising derived and/or modified sequence from HRSV(A2)__P03418.1__N (opt4)
gggagaguccgcucagccagguugcagaagcggcuuagcguguguccuaaucuucucucugcguguagguaggccugugccgcaaacaagcuuaccauggcccugagcaaggugaagcugaacgacacccugaacaaggaccagcugcugagcagcagcaaguacaccauccagagaagcaccggcgacagcaucgacacccccaacuacgacgugcagaagcacaucaacaagcugugcggcaugcugcugaucaccgaggacgccaaccacaaguucaccggccugaucggcaugcuguacgccaugagcagacugggcagagaggacaccaucaagauccugagagacgccggcuaccacgugaaggccaacggcguggacgugaccacccacagacaggacaucaacggcaaggagaugaaguucgaggugcugacccuggccagccugaccaccgagauccagaucaacaucgagaucgagagcagaaagagcuacaagaagaugcugaaggagaugggcgagguggcccccgaguacagacacgacagccccgacugcggcaugaucauccugugcaucgccgcccuggugaucaccaagcuggccgccggcgacagaagcggccugaccgccgugaucagaagagccaacaacgugcugaagaacgagaugaagagauacaagggccugcugcccaaggacaucgccaacagcuucuacgagguguucgagaagcacccccacuucaucgacguguucgugcacuucggcaucgcccagagcagcaccagaggcggcagcagaguggagggcaucuucgccggccuguucaugaacgccuacggcgccggccaggugaugcugagauggggcgugcuggccaagagcgugaagaacaucaugcugggccacgccagcgugcaggccgagauggagcaggugguggagguguacgaguacgcccagaagcugggcggcgaggccggcuucuaccacauccugaacaaccccaaggccagccugcugagccugacccaguucccccacuucagcagcguggugcugggcaacgccgccggccugggcaucaugggcgaguacagaggcacccccagaaaccaggaccuguacgacgccgccaaggccuacgccgagcagcugaaggagaacggcgugaucaacuacagcgugcuggaccugaccgccgaggagcuggaggccaucaagcaccagcugaaccccaaggacaacgacguggagcugugaggacuagugaagggaacacccaaauuuaauucagccuuaagcacaauuaauuaagagugaaacguaauuguacaagcaguuggucacccaccauagggcaugaucaacaccgcaaccuuuccuuuuucccccagugauucugaaaaaccccucuucccuucagcuugcuuagauguuccaaauuuaguaagcuuaaggcggccuacagaagaaaaagaaaaaaaaggccacaaaaguucccucucacuuucaguaaauaaaauaaaagcagcaacagaaauaaagaaauaaaugaaauucaaaaugaaauaaauauuguguugugcagcauuaaaaaaucaauaaaaauuaaaaaugagcaagaucuaaaaaaaaaaaaaaaaaaaaaaaaaaaaaaaaaaaaaaaaaaaaaaaaaaaaaaaaaaaaaaaaugcaucccccccccccccccccccccccccccccccaaaggcucuuuucagagccaccagaauu

SEQ ID NO: 10412 - RNA, 1767 nt, Artificial Sequence
  mRNA product Design g-3 comprising derived and/or modified sequence from HRSV(A2)__P03418.1__N (opt5)
gggagaguccgcucagccagguugcagaagcggcuuagcguguguccuaaucuucucucugcguguagguaggccugugccgcaaacaagcuuaccauggcccugagcaaggugaaacucaacgacacccugaauaaggaucagcuucuguccucuagcaaauacacaauccaaagauccacgggcgacucuauugauacccccaacuaugacguccagaagcacaucaauaaacucugcgggaugcugcuuauuacagaggaugcuaaccauaaguucaccggacugaucggcaugcucuacgccaugagccggcuggggcgcgaagacacaauuaagauccugagagaugcgggauaucacguuaaagcuaauggcguggacgugaccacacaucggcaggauaucaacgggaaggagaugaaauuugaaguccucacccuggccucccuuacgaccgagauucagaucaauauugaaaucgagucucgcaagagcuacaaaaagaugcugaaggagaugggagaaguggccccugaguauagacacgacuccccggauuguggcaugauuauccucugcauugcugcccugguuaucacaaaacuugcugccggcgaccggagcgggcugaccgcggugauccgcagagccaacaauguccucaagaacgaaaugaaacgguacaagggacugcugcccaaagauauugcuaauucuuucuaugagguguuugagaagcauccucacuucaucgacguuuuugugcacuucggcauugcccaauccagcacacgcgggggaucuagagucgaaggcaucuuugcuggacucuucaugaacgccuacggggcgggccaggugaugcugcgguggggcgugcuugccaaauccgucaagaauauuaugcuggggcaugcuagcguucaggccgagauggaacaggugguggaggucuacgaauaugcucaaaagcucggaggcgaggccggguuuuaccacauccugaacaaucccaaagccucucuucugucccucacccaguucccucauuuuagcuccgugguucugggaaacgcugcgggccuggggaucaugggagaguaucgcggcacgcccagaaaccaggaccucuacgaugccgcuaaggccuaugccgaacagcugaaagagaauggcgugauuaacuacucuguccuugaccugacagcugaggaacucgaagccaucaagcaccaacugaauccuaaagauaacgacguggagcuuugaggacuagugaagggaacacccaaauuuaauucagccuuaagcacaauuaauuaagagugaaacguaauuguacaagcaguuggucacccaccauagggcaugaucaacaccgcaaccuuuccuuuuucccccagugauucugaaaaaccccucuucccuucagcuugcuuagauguuccaaauuuaguaagcuuaaggcggccuacagaagaaaaagaaaaaaaaggccacaaaaguucccucucacuuucaguaaauaaaauaaaagcagcaacagaaauaaagaaauaaaugaaauucaaaaugaaauaaauauuguguugugcagcauuaaaaaaucaauaaaaauuaaaaaugagcaagaucuaaaaaaaaaaaaaaaaaaaaaaaaaaaaaaaaaaaaaaaaaaaaaaaaaaaaaaaaaaaaaaaaugcaucccccccccccccccccccccccccccccccaaaggcucuuuucagagccaccagaauu

SEQ ID NO: 10413 - RNA, 1767 nt, Artificial Sequence
  mRNA product Design g-3 comprising derived and/or modified sequence from HRSV(A2)__P03418.1__N (opt6)
gggagaguccgcucagccagguugcagaagcggcuuagcguguguccuaaucuucucucugcguguagguaggccugugccgcaaacaagcuuaccauggcacuaagcaaagucaaauuaaacgacacauuaaacaaagaccaacucuuaucaucaucaaaauacacaauacaaagaagcaccggagacaguaucgacacaccaaacuaugacguccaaaaacauauaaauaaauuaugcggcaugcucuuaaucacagaagacgccaaccauaaauuuacaggauuaauaggaauguuauaugcaaugucacgacuagguagagaagacacaauaaaaauacuaagagacgcaggcuaucacguaaaagcaaauggaguagacguaaccacacacagacaagacauaaauggaaaagaaaugaaauuugaaguauuaacacuagcaucacuaacaacagaaauacaaaucaacauagaaauagaaucaagaaaaagcuacaaaaaaauguuaaaagaaaugggagaagucgcaccagaauauagacaugauucaccagacugcggaaugauaauacuaugcauagcagcccuaguaauuacaaaacuagcagcaggagacagaagcggauuaacagcaguaauaagaagagcaaacaacguacuaaaaaacgaaaugaaaagauauaaaggauuauuaccaaaagacauagcaaacucauucuaugaaguauucgaaaaacacccccacuuuauagacgucuucguacacuucggaauagcccaaucauccacaagaggaggaucaagagucgaaggaauauucgcaggauuauucaugaacgcauauggcgcaggacaaguaaugcuaagauggggaguacuagcaaaauccgucaaaaacauaaugcuaggacacgcaucaguucaagcagaaauggaacaaguaguagaaguauacgaauacgcccaaaaacuaggaggagaagcaggauucuaccacauacuaaauaauccaaaagcaucacuacuaagccuaacccaauuuccccacuucucaaguguaguauuaggaaaugcagcuggacuaggaauaaugggagaauacagaggaacaccaagaaaccaagacuuauacgacgcagcaaaagcauacgcagagcaacuuaaagaaaacggaguaauaaacuauagcguacuagacuuaacagcagaagaacuggaagcaauaaaacaucaauuaaacccgaaagacaaugacguagaauuauaaggacuagugaagggaacacccaaauuuaauucagccuuaagcacaauuaauuaagagugaaacguaauuguacaagcaguuggucacccaccauagggcaugaucaacaccgcaaccuuuccuuuuucccccagugauucugaaaaaccccucuucccuucagcuugcuuagauguuccaaauuuaguaagcuuaaggcggccuacagaagaaaaagaaaaaaaaggccacaaaaguucccucucacuuucaguaaauaaaauaaaagcagcaacagaaauaaagaaauaaaugaaauucaaaaugaaauaaauauuguguugugcagcauuaaaaaaucaauaaaaauuaaaaaugagcaagaucuaaaaaaaaaaaaaaaaaaaaaaaaaaaaaaaaaaaaaaaaaaaaaaaaaaaaaaaaaaaaaaaaugcaucccccccccccccccccccccccccccccccaaaggcucuuuucagagccaccagaauu

SEQ ID NO: 10414 - RNA, 1767 nt, Artificial Sequence
  mRNA product Design g-3 comprising derived and/or modified sequence from HRSV(A2)__P03418.1__N (opt11)
gggagaguccgcucagccagguugcagaagcggcuuagcguguguccuaaucuucucucugcguguagguaggccugugccgcaaacaagcuuaccauggcacucucgaaaguaaaacucaacgacacccucaacaaagaccaacuccuuuccagcuccaaauacaccauccaacgauccaccggagacuccaucgacacgcccaacuacgacguccagaaacacaucaacaagcucugcggaaugcuacuaaucaccgaggacgccaaccacaaauucacaggacuuauagggaugcucuacgccaugucccgccucggacgcgaagacacaauaaaaauccuacgagacgccggcuaccacguaaaggcaaacggcgucgacgucaccacacacagacaagacaucaacggaaaggaaaugaaauucgaaguccucacccucgccagccuaaccaccgagauccaaaucaacaucgaaaucgaaucacgcaaauccuacaagaaaaugcucaaagaaaugggagaagucgcccccgaauaccgucacgacucgcccgacugcggcaugauaauccuaugcaucgccgcacucgucauaaccaaacucgccgccggugaccgaucaggacugacagcagucauccgccgagcaaacaacgugcucaaaaacgaaaugaaacgcuacaaaggccuacuccccaaagacaucgccaacuccuucuacgaagucuucgaaaaacacccacacuucaucgacgucuucguccacuucggcaucgcacaaucaucaaccagaggcggcagccgcguugaaggcaucuucgcaggacucuuuaugaacgccuacggcgccggccaagucaugcuccgcuggggcguccuggcaaaaagcgucaaaaacaucaugcuaggccacgcuagcguccaagccgaaauggaacaagucgucgaaguuuacgaguacgcacaaaaacucggcggcgaagcaggcuucuaccacauccuaaacaaccccaaagccucccugcuaucacucacccaauucccccacuucuccagcgucguccucggcaacgccgcaggacuaggcaucaugggagaauaccgcgggacaccgcgcaaccaagaccucuacgacgccgccaaagccuacgccgaacaacucaaagaaaacggcgucauaaacuacucaguccucgaccucaccgccgaagaacucgaagccaucaaacaccaacucaacccaaaagacaacgacgucgaauuauaaggacuagugaagggaacacccaaauuuaauucagccuuaagcacaauuaauuaagagugaaacguaauuguacaagcaguuggucacccaccauagggcaugaucaacaccgcaaccuuuccuuuuucccccagugauucugaaaaaccccucuucccuucagcuugcuuagauguuccaaauuuaguaagcuuaaggcggccuacagaagaaaaagaaaaaaaaggccacaaaaguucccucucacuuucaguaaauaaaauaaaagcagcaacagaaauaaagaaauaaaugaaauucaaaaugaaauaaauauuguguugugcagcauuaaaaaaucaauaaaaauuaaaaaugagcaagaucuaaaaaaaaaaaaaaaaaaaaaaaaaaaaaaaaaaaaaaaaaaaaaaaaaaaaaaaaaaaaaaaaugcaucccccccccccccccccccccccccccccccaaaggcucuuuucagagccaccagaauu

SEQ ID NO: 10415 - RNA, 1562 nt, Artificial Sequence
  mRNA product Design g-4 comprising derived and/or modified sequence from HRSV(A2)__P03418.1__N (wt)
gggagacuccugucgggcggaaguaggaggaguagaguuuaaaaacaguacucuuuuuccgguucgggacguaguugaagcaacgacaagccggauaaccgcucuugagacaggaagcuuaccauggcucuuagcaaagucaaguugaaugauacacucaacaaagaucaacuucugucauccagcaaauacaccauccaacggagcacaggagauaguauugauacuccuaauuaugaugugcagaaacacaucaauaaguuauguggcauguuauuaaucacagaagaugcuaaucauaaauucacuggguuaauagguauguuauaugcgaugucuagguuaggaagagaagacaccauaaaaauacucagagaugcgggauaucauguaaaagcaaauggaguagauguaacaacacaucgucaagacauuaauggaaaagaaaugaaauuugaaguguuaacauuggcaagcuuaacaacugaaauucaaaucaacauugagauagaaucuagaaaauccuacaaaaaaaugcuaaaagaaaugggagagguagcuccagaauacaggcaugacucuccugauugugggaugauaauauuauguauagcagcauuaguaauaacuaaauuagcagcaggggacagaucuggucuuacagccgugauuaggagagcuaauaauguccuaaaaaaugaaaugaaacguuacaaaggcuuacuacccaaggacauagccaacagcuucuaugaaguguuugaaaaacauccccacuuuauagauguuuuuguucauuuugguauagcacaaucuucuaccagagguggcaguagaguugaagggauuuuugcaggauuguuuaugaaugccuauggugcagggcaagugauguuacgguggggagucuuagcaaaaucaguuaaaaauauuauguuaggacaugcuagugugcaagcagaaauggaacaaguuguugagguuuaugaauaugcccaaaaauuggguggugaagcaggauucuaccauauauugaacaacccaaaagcaucauuauuaucuuugacucaauuuccucacuucuccaguguaguauuaggcaaugcugcuggccuaggcauaaugggagaguacagagguacaccgaggaaucaagaucuauaugaugcagcaaaggcauaugcugaacaacucaaagaaaauggugugauuaacuacaguguacuagacuugacagcagaagaacuagaggcuaucaaacaucagcuuaauccaaaagauaaugauguagagcuuugaggacuaguaauaaggaaacuguaugaaugucugugggcaggaagugaagagauccuucuguaaagguuuuuggaauuaugucugcugaauaauaaacuuuuuugaaauaauaaaucugguagaaaaaugagaucuaaaaaaaaaaaaaaaaaaaaaaaaaaaaaaaaaaaaaaaaaaaaaaaaaaaaaaaaaaaaaaaaugcaucccccccccccccccccccccccccccccccaaaggcucuuuucagagccaccagaauu

SEQ ID NO: 10416 - RNA, 1562 nt, Artificial Sequence
  mRNA product Design g-4 comprising derived and/or modified sequence from HRSV(A2)__P03418.1__N (opt1)
gggagacuccugucgggcggaaguaggaggaguagaguuuaaaaacaguacucuuuuuccgguucgggacguaguugaagcaacgacaagccggauaaccgcucuugagacaggaagcuuaccauggcccugagcaaggugaagcucaacgacacccugaacaaggaccagcugcucuccagcuccaaguacaccauccagcgcagcaccggcgacuccaucgacacccccaacuacgacguccagaagcacaucaacaagcugugcgggaugcugcucaucaccgaggacgccaaccacaaguucaccggccugaucgggaugcuguacgcgaugagccggcucggccgcgaggacacgaucaagauccugcgggacgccggguaccacgugaaggccaacggcguggacgucaccacccaccgccaggacaucaacggcaaggagaugaaguucgaggugcugacccucgccucccugacgaccgagauccagaucaacaucgagaucgagagccggaaguccuacaagaagaugcugaaggagaugggggagguggccccggaguaccgccacgacagccccgacugcggcaugaucauccucugcaucgcggcccuggucaucaccaagcuggccgccggggaccgguccggccucaccgcggugauccgccgggccaacaacgugcugaagaacgagaugaagcgcuacaaggggcugcuccccaaggacaucgccaacagcuucuacgaggucuucgagaagcacccccacuucaucgacguguucgugcacuucggcaucgcccaguccagcacgcggggcgggucccgcgucgagggcaucuucgccgggcuguucaugaacgcguacggcgccggccaggugaugcugcgguggggcgugcucgccaagagcgucaagaacaucaugcuggggcacgccuccgugcaggccgagauggagcaggucguggagguguacgaguacgcgcagaagcucgggggcgaggccggguucuaccacauccugaacaacccgaaggccagccugcugucccucacccaguucccccacuucagcagcgugguccugggcaacgccgccggccuggggaucaugggcgaguaccgcgggacgccccggaaccaggaccucuacgacgcggccaaggccuacgccgagcagcugaaggagaacggcgugaucaacuacuccgugcuggaccucaccgccgaggagcuggaggcgaucaagcaccagcugaaccccaaggacaacgacgucgagcucugaggacuaguaauaaggaaacuguaugaaugucugugggcaggaagugaagagauccuucuguaaagguuuuuggaauuaugucugcugaauaauaaacuuuuuugaaauaauaaaucugguagaaaaaugagaucuaaaaaaaaaaaaaaaaaaaaaaaaaaaaaaaaaaaaaaaaaaaaaaaaaaaaaaaaaaaaaaaaugcaucccccccccccccccccccccccccccccccaaaggcucuuuucagagccaccagaauu

SEQ ID NO: 10417 - RNA, 1562 nt, Artificial Sequence
  mRNA product Design g-4 comprising derived and/or modified sequence from HRSV(A2)__P03418.1__N (opt2)
gggagacuccugucgggcggaaguaggaggaguagaguuuaaaaacaguacucuuuuuccgguucgggacguaguugaagcaacgacaagccggauaaccgcucuugagacaggaagcuuaccauggcccucuccaaggucaagcucaacgacacccucaacaaggaccagcuccucuccuccuccaaguacaccauccagcgcuccaccggcgacuccaucgacacccccaacuacgacguccagaagcacaucaacaagcucugcggcaugcuccucaucaccgaggacgccaaccacaaguucaccggccucaucggcaugcucuacgccaugucccgccucggccgcgaggacaccaucaagauccuccgcgacgccggcuaccacgucaaggccaacggcgucgacgucaccacccaccgccaggacaucaacggcaaggagaugaaguucgagguccucacccucgccucccucaccaccgagauccagaucaacaucgagaucgagucccgcaaguccuacaagaagaugcucaaggagaugggcgaggucgcccccgaguaccgccacgacucccccgacugcggcaugaucauccucugcaucgccgcccucgucaucaccaagcucgccgccggcgaccgcuccggccucaccgccgucauccgccgcgccaacaacguccucaagaacgagaugaagcgcuacaagggccuccuccccaaggacaucgccaacuccuucuacgaggucuucgagaagcacccccacuucaucgacgucuucguccacuucggcaucgcccaguccuccacccgcggcggcucccgcgucgagggcaucuucgccggccucuucaugaacgccuacggcgccggccaggucaugcuccgcuggggcguccucgccaaguccgucaagaacaucaugcucggccacgccuccguccaggccgagauggagcaggucgucgaggucuacgaguacgcccagaagcucggcggcgaggccggcuucuaccacauccucaacaaccccaaggccucccuccucucccucacccaguucccccacuucuccuccgucguccucggcaacgccgccggccucggcaucaugggcgaguaccgcggcaccccccgcaaccaggaccucuacgacgccgccaaggccuacgccgagcagcucaaggagaacggcgucaucaacuacuccguccucgaccucaccgccgaggagcucgaggccaucaagcaccagcucaaccccaaggacaacgacgucgagcucugaggacuaguaauaaggaaacuguaugaaugucugugggcaggaagugaagagauccuucuguaaagguuuuuggaauuaugucugcugaauaauaaacuuuuuugaaauaauaaaucugguagaaaaaugagaucuaaaaaaaaaaaaaaaaaaaaaaaaaaaaaaaaaaaaaaaaaaaaaaaaaaaaaaaaaaaaaaaaugcaucccccccccccccccccccccccccccccccaaaggcucuuuucagagccaccagaauu

SEQ ID NO: 10418 - RNA, 1562 nt, Artificial Sequence
  mRNA product Design g-4 comprising derived and/or modified sequence from HRSV(A2)__P03418.1__N (opt3)
gggagacuccugucgggcggaaguaggaggaguagaguuuaaaaacaguacucuuuuuccgguucgggacguaguugaagcaacgacaagccggauaaccgcucuugagacaggaagcuuaccauggcccugagcaaggugaaacucaacgacacccuuaauaaggaucagcuguuguccucuucaaaauacacaauccaaagaaguacuggcgacagcauugauacgcccaacuaugacguccagaagcacauaaauaaauuaugcgggaugcugcuaaucaccgaggaugcuaaccauaaguucacaggacucauugguaugcuguacgcaauguccaggcuuggccgggaagacacuaucaagauucugcgcgaugccggguaucacguuaaagcgaauggaguggacguaaccacacaucgacaggauaucaacggcaaggagaugaaauuugaaguguugacccucgcuucucugacuacagagauacagaucaauauugaaaucgagucgcguaagucauacaaaaagaugcugaaggagaugggugaagucgccccugaguauagacacgacagcccagauugugggaugauuauccucugcauagcagccuuagugauuaccaaacuggcugcaggagacaggaguggccuuacggccguuauccggcgcgcuaacaauguguugaagaacgaaaugaaaagauacaagggccugcuaccgaaagauauugccaauuccuucuaugaggucuuugagaagcauccccacuucaucgacguguuuguacacuucgggaucgcgcaaucuagcacuaggggagguucccggguugaaggcauuuuugcaggacucuucaugaacgccuacggggcuggccaggugaugcugcgcugggguguccuugccaaaucagugaagaauauaaugcuggggcaugcaagugugcaggcugagauggaacaggucguugagguguacgaauaugcccaaaaguugggaggcgaggcgggcuuuuaccacauccucaacaauccuaaagccagccuguuaucucugacccaguucccacauuuuuccucaguagugcucgggaacgcagcuggacuugguauuaugggcgaguaucgagggacacccagaaaccaggaccuguacgaugccgcuaaggccuaugcagaacaguugaaagagaauggagucaucaacuacagcgugcuagaccugacugccgaggaacucgaagcuauaaagcaccaacugaauccuaaagauaacgacguugagcuuugaggacuaguaauaaggaaacuguaugaaugucugugggcaggaagugaagagauccuucuguaaagguuuuuggaauuaugucugcugaauaauaaacuuuuuugaaauaauaaaucugguagaaaaaugagaucuaaaaaaaaaaaaaaaaaaaaaaaaaaaaaaaaaaaaaaaaaaaaaaaaaaaaaaaaaaaaaaaaugcaucccccccccccccccccccccccccccccccaaaggcucuuuucagagccaccagaauu

SEQ ID NO: 10419 - RNA, 1562 nt, Artificial Sequence
  mRNA product Design g-4 comprising derived and/or modified sequence from HRSV(A2)__P03418.1__N (opt4)
gggagacuccugucgggcggaaguaggaggaguagaguuuaaaaacaguacucuuuuuccgguucgggacguaguugaagcaacgacaagccggauaaccgcucuugagacaggaagcuuaccauggcccugagcaaggugaagcugaacgacacccugaacaaggaccagcugcugagcagcagcaaguacaccauccagagaagcaccggcgacagcaucgacacccccaacuacgacgugcagaagcacaucaacaagcugugcggcaugcugcugaucaccgaggacgccaaccacaaguucaccggccugaucggcaugcuguacgccaugagcagacugggcagagaggacaccaucaagauccugagagacgccggcuaccacgugaaggccaacggcguggacgugaccacccacagacaggacaucaacggcaaggagaugaaguucgaggugcugacccuggccagccugaccaccgagauccagaucaacaucgagaucgagagcagaaagagcuacaagaagaugcugaaggagaugggcgagguggcccccgaguacagacacgacagccccgacugcggcaugaucauccugugcaucgccgcccuggugaucaccaagcuggccgccggcgacagaagcggccugaccgccgugaucagaagagccaacaacgugcugaagaacgagaugaagagauacaagggccugcugcccaaggacaucgccaacagcuucuacgagguguucgagaagcacccccacuucaucgacguguucgugcacuucggcaucgcccagagcagcaccagaggcggcagcagaguggagggcaucuucgccggccuguucaugaacgccuacggcgccggccaggugaugcugagauggggcgugcuggccaagagcgugaagaacaucaugcugggccacgccagcgugcaggccgagauggagcaggugguggagguguacgaguacgcccagaagcugggcggcgaggccggcuucuaccacauccugaacaaccccaaggccagccugcugagccugacccaguucccccacuucagcagcguggugcugggcaacgccgccggccugggcaucaugggcgaguacagaggcacccccagaaaccaggaccuguacgacgccgccaaggccuacgccgagcagcugaaggagaacggcgugaucaacuacagcgugcuggaccugaccgccgaggagcuggaggccaucaagcaccagcugaaccccaaggacaacgacguggagcugugaggacuaguaauaaggaaacuguaugaaugucugugggcaggaagugaagagauccuucuguaaagguuuuuggaauuaugucugcugaauaauaaacuuuuuugaaauaauaaaucugguagaaaaaugagaucuaaaaaaaaaaaaaaaaaaaaaaaaaaaaaaaaaaaaaaaaaaaaaaaaaaaaaaaaaaaaaaaaugcaucccccccccccccccccccccccccccccccaaaggcucuuuucagagccaccagaauu

SEQ ID NO: 10420 - RNA, 1562 nt, Artificial Sequence
  mRNA product Design g-4 comprising derived and/or modified sequence from HRSV(A2)__P03418.1__N (opt5)
gggagacuccugucgggcggaaguaggaggaguagaguuuaaaaacaguacucuuuuuccgguucgggacguaguugaagcaacgacaagccggauaaccgcucuugagacaggaagcuuaccauggcccugagcaaggugaaacucaacgacacccugaauaaggaucagcuucuguccucuagcaaauacacaauccaaagauccacgggcgacucuauugauacccccaacuaugacguccagaagcacaucaauaaacucugcgggaugcugcuuauuacagaggaugcuaaccauaaguucaccggacugaucggcaugcucuacgccaugagccggcuggggcgcgaagacacaauuaagauccugagagaugcgggauaucacguuaaagcuaauggcguggacgugaccacacaucggcaggauaucaacgggaaggagaugaaauuugaaguccucacccuggccucccuuacgaccgagauucagaucaauauugaaaucgagucucgcaagagcuacaaaaagaugcugaaggagaugggagaaguggccccugaguauagacacgacuccccggauuguggcaugauuauccucugcauugcugcccugguuaucacaaaacuugcugccggcgaccggagcgggcugaccgcggugauccgcagagccaacaauguccucaagaacgaaaugaaacgguacaagggacugcugcccaaagauauugcuaauucuuucuaugagguguuugagaagcauccucacuucaucgacguuuuugugcacuucggcauugcccaauccagcacacgcgggggaucuagagucgaaggcaucuuugcuggacucuucaugaacgccuacggggcgggccaggugaugcugcgguggggcgugcuugccaaauccgucaagaauauuaugcuggggcaugcuagcguucaggccgagauggaacaggugguggaggucuacgaauaugcucaaaagcucggaggcgaggccggguuuuaccacauccugaacaaucccaaagccucucuucugucccucacccaguucccucauuuuagcuccgugguucugggaaacgcugcgggccuggggaucaugggagaguaucgcggcacgcccagaaaccaggaccucuacgaugccgcuaaggccuaugccgaacagcugaaagagaauggcgugauuaacuacucuguccuugaccugacagcugaggaacucgaagccaucaagcaccaacugaauccuaaagauaacgacguggagcuuugaggacuaguaauaaggaaacuguaugaaugucugugggcaggaagugaagagauccuucuguaaagguuuuuggaauuaugucugcugaauaauaaacuuuuuugaaauaauaaaucugguagaaaaaugagaucuaaaaaaaaaaaaaaaaaaaaaaaaaaaaaaaaaaaaaaaaaaaaaaaaaaaaaaaaaaaaaaaaugcaucccccccccccccccccccccccccccccccaaaggcucuuuucagagccaccagaauu

SEQ ID NO: 10421 - RNA, 1562 nt, Artificial Sequence
  mRNA product Design g-4 comprising derived and/or modified sequence from HRSV(A2)__P03418.1__N (opt6)
gggagacuccugucgggcggaaguaggaggaguagaguuuaaaaacaguacucuuuuuccgguucgggacguaguugaagcaacgacaagccggauaaccgcucuugagacaggaagcuuaccauggcacuaagcaaagucaaauuaaacgacacauuaaacaaagaccaacucuuaucaucaucaaaauacacaauacaaagaagcaccggagacaguaucgacacaccaaacuaugacguccaaaaacauauaaauaaauuaugcggcaugcucuuaaucacagaagacgccaaccauaaauuuacaggauuaauaggaauguuauaugcaaugucacgacuagguagagaagacacaauaaaaauacuaagagacgcaggcuaucacguaaaagcaaauggaguagacguaaccacacacagacaagacauaaauggaaaagaaaugaaauuugaaguauuaacacuagcaucacuaacaacagaaauacaaaucaacauagaaauagaaucaagaaaaagcuacaaaaaaauguuaaaagaaaugggagaagucgcaccagaauauagacaugauucaccagacugcggaaugauaauacuaugcauagcagcccuaguaauuacaaaacuagcagcaggagacagaagcggauuaacagcaguaauaagaagagcaaacaacguacuaaaaaacgaaaugaaaagauauaaaggauuauuaccaaaagacauagcaaacucauucuaugaaguauucgaaaaacacccccacuuuauagacgucuucguacacuucggaauagcccaaucauccacaagaggaggaucaagagucgaaggaauauucgcaggauuauucaugaacgcauauggcgcaggacaaguaaugcuaagauggggaguacuagcaaaauccgucaaaaacauaaugcuaggacacgcaucaguucaagcagaaauggaacaaguaguagaaguauacgaauacgcccaaaaacuaggaggagaagcaggauucuaccacauacuaaauaauccaaaagcaucacuacuaagccuaacccaauuuccccacuucucaaguguaguauuaggaaaugcagcuggacuaggaauaaugggagaauacagaggaacaccaagaaaccaagacuuauacgacgcagcaaaagcauacgcagagcaacuuaaagaaaacggaguaauaaacuauagcguacuagacuuaacagcagaagaacuggaagcaauaaaacaucaauuaaacccgaaagacaaugacguagaauuauaaggacuaguaauaaggaaacuguaugaaugucugugggcaggaagugaagagauccuucuguaaagguuuuuggaauuaugucugcugaauaauaaacuuuuuugaaauaauaaaucugguagaaaaaugagaucuaaaaaaaaaaaaaaaaaaaaaaaaaaaaaaaaaaaaaaaaaaaaaaaaaaaaaaaaaaaaaaaaugcaucccccccccccccccccccccccccccccccaaaggcucuuuucagagccaccagaauu

SEQ ID NO: 10422 - RNA, 1562 nt, Artificial Sequence
  mRNA product Design g-4 comprising derived and/or modified sequence from HRSV(A2)__P03418.1__N (opt11)
gggagacuccugucgggcggaaguaggaggaguagaguuuaaaaacaguacucuuuuuccgguucgggacguaguugaagcaacgacaagccggauaaccgcucuugagacaggaagcuuaccauggcacucucgaaaguaaaacucaacgacacccucaacaaagaccaacuccuuuccagcuccaaauacaccauccaacgauccaccggagacuccaucgacacgcccaacuacgacguccagaaacacaucaacaagcucugcggaaugcuacuaaucaccgaggacgccaaccacaaauucacaggacuuauagggaugcucuacgccaugucccgccucggacgcgaagacacaauaaaaauccuacgagacgccggcuaccacguaaaggcaaacggcgucgacgucaccacacacagacaagacaucaacggaaaggaaaugaaauucgaaguccucacccucgccagccuaaccaccgagauccaaaucaacaucgaaaucgaaucacgcaaauccuacaagaaaaugcucaaagaaaugggagaagucgcccccgaauaccgucacgacucgcccgacugcggcaugauaauccuaugcaucgccgcacucgucauaaccaaacucgccgccggugaccgaucaggacugacagcagucauccgccgagcaaacaacgugcucaaaaacgaaaugaaacgcuacaaaggccuacuccccaaagacaucgccaacuccuucuacgaagucuucgaaaaacacccacacuucaucgacgucuucguccacuucggcaucgcacaaucaucaaccagaggcggcagccgcguugaaggcaucuucgcaggacucuuuaugaacgccuacggcgccggccaagucaugcuccgcuggggcguccuggcaaaaagcgucaaaaacaucaugcuaggccacgcuagcguccaagccgaaauggaacaagucgucgaaguuuacgaguacgcacaaaaacucggcggcgaagcaggcuucuaccacauccuaaacaaccccaaagccucccugcuaucacucacccaauucccccacuucuccagcgucguccucggcaacgccgcaggacuaggcaucaugggagaauaccgcgggacaccgcgcaaccaagaccucuacgacgccgccaaagccuacgccgaacaacucaaagaaaacggcgucauaaacuacucaguccucgaccucaccgccgaagaacucgaagccaucaaacaccaacucaacccaaaagacaacgacgucgaauuauaaggacuaguaauaaggaaacuguaugaaugucugugggcaggaagugaagagauccuucuguaaagguuuuuggaauuaugucugcugaauaauaaacuuuuuugaaauaauaaaucugguagaaaaaugagaucuaaaaaaaaaaaaaaaaaaaaaaaaaaaaaaaaaaaaaaaaaaaaaaaaaaaaaaaaaaaaaaaaugcaucccccccccccccccccccccccccccccccaaaggcucuuuucagagccaccagaauu

SEQ ID NO: 10423 - RNA, 1538 nt, Artificial Sequence
  mRNA product Design g-5 comprising derived and/or modified sequence from HRSV(A2)__P03418.1__N (wt)
gggagacccgugacccggaaguuguacggcuacgcgacuuucccucccacaaacccucgcgcccuuccuuuccuacuugggcccggcagaaagcuuaccauggcucuuagcaaagucaaguugaaugauacacucaacaaagaucaacuucugucauccagcaaauacaccauccaacggagcacaggagauaguauugauacuccuaauuaugaugugcagaaacacaucaauaaguuauguggcauguuauuaaucacagaagaugcuaaucauaaauucacuggguuaauagguauguuauaugcgaugucuagguuaggaagagaagacaccauaaaaauacucagagaugcgggauaucauguaaaagcaaauggaguagauguaacaacacaucgucaagacauuaauggaaaagaaaugaaauuugaaguguuaacauuggcaagcuuaacaacugaaauucaaaucaacauugagauagaaucuagaaaauccuacaaaaaaaugcuaaaagaaaugggagagguagcuccagaauacaggcaugacucuccugauugugggaugauaauauuauguauagcagcauuaguaauaacuaaauuagcagcaggggacagaucuggucuuacagccgugauuaggagagcuaauaauguccuaaaaaaugaaaugaaacguuacaaaggcuuacuacccaaggacauagccaacagcuucuaugaaguguuugaaaaacauccccacuuuauagauguuuuuguucauuuugguauagcacaaucuucuaccagagguggcaguagaguugaagggauuuuugcaggauuguuuaugaaugccuauggugcagggcaagugauguuacgguggggagucuuagcaaaaucaguuaaaaauauuauguuaggacaugcuagugugcaagcagaaauggaacaaguuguugagguuuaugaauaugcccaaaaauuggguggugaagcaggauucuaccauauauugaacaacccaaaagcaucauuauuaucuuugacucaauuuccucacuucuccaguguaguauuaggcaaugcugcuggccuaggcauaaugggagaguacagagguacaccgaggaaucaagaucuauaugaugcagcaaaggcauaugcugaacaacucaaagaaaauggugugauuaacuacaguguacuagacuugacagcagaagaacuagaggcuaucaaacaucagcuuaauccaaaagauaaugauguagagcuuugaggacuaguaauaaggaaacuguaugaaugucugugggcaggaagugaagagauccuucuguaaagguuuuuggaauuaugucugcugaauaauaaacuuuuuugaaauaauaaaucugguagaaaaaugagaucuaaaaaaaaaaaaaaaaaaaaaaaaaaaaaaaaaaaaaaaaaaaaaaaaaaaaaaaaaaaaaaaaugcaucccccccccccccccccccccccccccccccaaaggcucuuuucagagccaccagaauu

SEQ ID NO: 10424 - RNA, 1538 nt, Artificial Sequence
  mRNA product Design g-5 comprising derived and/or modified sequence from HRSV(A2)__P03418.1__N (opt1)
gggagacccgugacccggaaguuguacggcuacgcgacuuucccucccacaaacccucgcgcccuuccuuuccuacuugggcccggcagaaagcuuaccauggcccugagcaaggugaagcucaacgacacccugaacaaggaccagcugcucuccagcuccaaguacaccauccagcgcagcaccggcgacuccaucgacacccccaacuacgacguccagaagcacaucaacaagcugugcgggaugcugcucaucaccgaggacgccaaccacaaguucaccggccugaucgggaugcuguacgcgaugagccggcucggccgcgaggacacgaucaagauccugcgggacgccggguaccacgugaaggccaacggcguggacgucaccacccaccgccaggacaucaacggcaaggagaugaaguucgaggugcugacccucgccucccugacgaccgagauccagaucaacaucgagaucgagagccggaaguccuacaagaagaugcugaaggagaugggggagguggccccggaguaccgccacgacagccccgacugcggcaugaucauccucugcaucgcggcccuggucaucaccaagcuggccgccggggaccgguccggccucaccgcggugauccgccgggccaacaacgugcugaagaacgagaugaagcgcuacaaggggcugcuccccaaggacaucgccaacagcuucuacgaggucuucgagaagcacccccacuucaucgacguguucgugcacuucggcaucgcccaguccagcacgcggggcgggucccgcgucgagggcaucuucgccgggcuguucaugaacgcguacggcgccggccaggugaugcugcgguggggcgugcucgccaagagcgucaagaacaucaugcuggggcacgccuccgugcaggccgagauggagcaggucguggagguguacgaguacgcgcagaagcucgggggcgaggccggguucuaccacauccugaacaacccgaaggccagccugcugucccucacccaguucccccacuucagcagcgugguccugggcaacgccgccggccuggggaucaugggcgaguaccgcgggacgccccggaaccaggaccucuacgacgcggccaaggccuacgccgagcagcugaaggagaacggcgugaucaacuacuccgugcuggaccucaccgccgaggagcuggaggcgaucaagcaccagcugaaccccaaggacaacgacgucgagcucugaggacuaguaauaaggaaacuguaugaaugucugugggcaggaagugaagagauccuucuguaaagguuuuuggaauuaugucugcugaauaauaaacuuuuuugaaauaauaaaucugguagaaaaaugagaucuaaaaaaaaaaaaaaaaaaaaaaaaaaaaaaaaaaaaaaaaaaaaaaaaaaaaaaaaaaaaaaaaugcaucccccccccccccccccccccccccccccccaaaggcucuuuucagagccaccagaauu

SEQ ID NO: 10425 - RNA, 1538 nt, Artificial Sequence
  mRNA product Design g-5 comprising derived and/or modified sequence from HRSV(A2)__P03418.1__N (opt2)
gggagacccgugacccggaaguuguacggcuacgcgacuuucccucccacaaacccucgcgcccuuccuuuccuacuugggcccggcagaaagcuuaccauggcccucuccaaggucaagcucaacgacacccucaacaaggaccagcuccucuccuccuccaaguacaccauccagcgcuccaccggcgacuccaucgacacccccaacuacgacguccagaagcacaucaacaagcucugcggcaugcuccucaucaccgaggacgccaaccacaaguucaccggccucaucggcaugcucuacgccaugucccgccucggccgcgaggacaccaucaagauccuccgcgacgccggcuaccacgucaaggccaacggcgucgacgucaccacccaccgccaggacaucaacggcaaggagaugaaguucgagguccucacccucgccucccucaccaccgagauccagaucaacaucgagaucgagucccgcaaguccuacaagaagaugcucaaggagaugggcgaggucgcccccgaguaccgccacgacucccccgacugcggcaugaucauccucugcaucgccgcccucgucaucaccaagcucgccgccggcgaccgcuccggccucaccgccgucauccgccgcgccaacaacguccucaagaacgagaugaagcgcuacaagggccuccuccccaaggacaucgccaacuccuucuacgaggucuucgagaagcacccccacuucaucgacgucuucguccacuucggcaucgcccaguccuccacccgcggcggcucccgcgucgagggcaucuucgccggccucuucaugaacgccuacggcgccggccaggucaugcuccgcuggggcguccucgccaaguccgucaagaacaucaugcucggccacgccuccguccaggccgagauggagcaggucgucgaggucuacgaguacgcccagaagcucggcggcgaggccggcuucuaccacauccucaacaaccccaaggccucccuccucucccucacccaguucccccacuucuccuccgucguccucggcaacgccgccggccucggcaucaugggcgaguaccgcggcaccccccgcaaccaggaccucuacgacgccgccaaggccuacgccgagcagcucaaggagaacggcgucaucaacuacuccguccucgaccucaccgccgaggagcucgaggccaucaagcaccagcucaaccccaaggacaacgacgucgagcucugaggacuaguaauaaggaaacuguaugaaugucugugggcaggaagugaagagauccuucuguaaagguuuuuggaauuaugucugcugaauaauaaacuuuuuugaaauaauaaaucugguagaaaaaugagaucuaaaaaaaaaaaaaaaaaaaaaaaaaaaaaaaaaaaaaaaaaaaaaaaaaaaaaaaaaaaaaaaaugcaucccccccccccccccccccccccccccccccaaaggcucuuuucagagccaccagaauu

SEQ ID NO: 10426 - RNA, 1538 nt, Artificial Sequence
  mRNA product Design g-5 comprising derived and/or modified sequence from HRSV(A2)__P03418.1__N (opt3)
gggagacccgugacccggaaguuguacggcuacgcgacuuucccucccacaaacccucgcgcccuuccuuuccuacuugggcccggcagaaagcuuaccauggcccugagcaaggugaaacucaacgacacccuuaauaaggaucagcuguuguccucuucaaaauacacaauccaaagaaguacuggcgacagcauugauacgcccaacuaugacguccagaagcacauaaauaaauuaugcgggaugcugcuaaucaccgaggaugcuaaccauaaguucacaggacucauugguaugcuguacgcaauguccaggcuuggccgggaagacacuaucaagauucugcgcgaugccggguaucacguuaaagcgaauggaguggacguaaccacacaucgacaggauaucaacggcaaggagaugaaauuugaaguguugacccucgcuucucugacuacagagauacagaucaauauugaaaucgagucgcguaagucauacaaaaagaugcugaaggagaugggugaagucgccccugaguauagacacgacagcccagauugugggaugauuauccucugcauagcagccuuagugauuaccaaacuggcugcaggagacaggaguggccuuacggccguuauccggcgcgcuaacaauguguugaagaacgaaaugaaaagauacaagggccugcuaccgaaagauauugccaauuccuucuaugaggucuuugagaagcauccccacuucaucgacguguuuguacacuucgggaucgcgcaaucuagcacuaggggagguucccggguugaaggcauuuuugcaggacucuucaugaacgccuacggggcuggccaggugaugcugcgcugggguguccuugccaaaucagugaagaauauaaugcuggggcaugcaagugugcaggcugagauggaacaggucguugagguguacgaauaugcccaaaaguugggaggcgaggcgggcuuuuaccacauccucaacaauccuaaagccagccuguuaucucugacccaguucccacauuuuuccucaguagugcucgggaacgcagcuggacuugguauuaugggcgaguaucgagggacacccagaaaccaggaccuguacgaugccgcuaaggccuaugcagaacaguugaaagagaauggagucaucaacuacagcgugcuagaccugacugccgaggaacucgaagcuauaaagcaccaacugaauccuaaagauaacgacguugagcuuugaggacuaguaauaaggaaacuguaugaaugucugugggcaggaagugaagagauccuucuguaaagguuuuuggaauuaugucugcugaauaauaaacuuuuuugaaauaauaaaucugguagaaaaaugagaucuaaaaaaaaaaaaaaaaaaaaaaaaaaaaaaaaaaaaaaaaaaaaaaaaaaaaaaaaaaaaaaaaugcaucccccccccccccccccccccccccccccccaaaggcucuuuucagagccaccagaauu

SEQ ID NO: 10427 - RNA, 1538 nt, Artificial Sequence
  mRNA product Design g-5 comprising derived and/or modified sequence from HRSV(A2)__P03418.1__N (opt4)
gggagacccgugacccggaaguuguacggcuacgcgacuuucccucccacaaacccucgcgcccuuccuuuccuacuugggcccggcagaaagcuuaccauggcccugagcaaggugaagcugaacgacacccugaacaaggaccagcugcugagcagcagcaaguacaccauccagagaagcaccggcgacagcaucgacacccccaacuacgacgugcagaagcacaucaacaagcugugcggcaugcugcugaucaccgaggacgccaaccacaaguucaccggccugaucggcaugcuguacgccaugagcagacugggcagagaggacaccaucaagauccugagagacgccggcuaccacgugaaggccaacggcguggacgugaccacccacagacaggacaucaacggcaaggagaugaaguucgaggugcugacccuggccagccugaccaccgagauccagaucaacaucgagaucgagagcagaaagagcuacaagaagaugcugaaggagaugggcgagguggcccccgaguacagacacgacagccccgacugcggcaugaucauccugugcaucgccgcccuggugaucaccaagcuggccgccggcgacagaagcggccugaccgccgugaucagaagagccaacaacgugcugaagaacgagaugaagagauacaagggccugcugcccaaggacaucgccaacagcuucuacgagguguucgagaagcacccccacuucaucgacguguucgugcacuucggcaucgcccagagcagcaccagaggcggcagcagaguggagggcaucuucgccggccuguucaugaacgccuacggcgccggccaggugaugcugagauggggcgugcuggccaagagcgugaagaacaucaugcugggccacgccagcgugcaggccgagauggagcaggugguggagguguacgaguacgcccagaagcugggcggcgaggccggcuucuaccacauccugaacaaccccaaggccagccugcugagccugacccaguucccccacuucagcagcguggugcugggcaacgccgccggccugggcaucaugggcgaguacagaggcacccccagaaaccaggaccuguacgacgccgccaaggccuacgccgagcagcugaaggagaacggcgugaucaacuacagcgugcuggaccugaccgccgaggagcuggaggccaucaagcaccagcugaaccccaaggacaacgacguggagcugugaggacuaguaauaaggaaacuguaugaaugucugugggcaggaagugaagagauccuucuguaaagguuuuuggaauuaugucugcugaauaauaaacuuuuuugaaauaauaaaucugguagaaaaaugagaucuaaaaaaaaaaaaaaaaaaaaaaaaaaaaaaaaaaaaaaaaaaaaaaaaaaaaaaaaaaaaaaaaugcaucccccccccccccccccccccccccccccccaaaggcucuuuucagagccaccagaauu

SEQ ID NO: 10428 - RNA, 1538 nt, Artificial Sequence
  mRNA product Design g-5 comprising derived and/or modified sequence from HRSV(A2)__P03418.1__N (opt5)
gggagacccgugacccggaaguuguacggcuacgcgacuuucccucccacaaacccucgcgcccuuccuuuccuacuugggcccggcagaaagcuuaccauggcccugagcaaggugaaacucaacgacacccugaauaaggaucagcuucuguccucuagcaaauacacaauccaaagauccacgggcgacucuauugauacccccaacuaugacguccagaagcacaucaauaaacucugcgggaugcugcuuauuacagaggaugcuaaccauaaguucaccggacugaucggcaugcucuacgccaugagccggcuggggcgcgaagacacaauuaagauccugagagaugcgggauaucacguuaaagcuaauggcguggacgugaccacacaucggcaggauaucaacgggaaggagaugaaauuugaaguccucacccuggccucccuuacgaccgagauucagaucaauauugaaaucgagucucgcaagagcuacaaaaagaugcugaaggagaugggagaaguggccccugaguauagacacgacuccccggauuguggcaugauuauccucugcauugcugcccugguuaucacaaaacuugcugccggcgaccggagcgggcugaccgcggugauccgcagagccaacaauguccucaagaacgaaaugaaacgguacaagggacugcugcccaaagauauugcuaauucuuucuaugagguguuugagaagcauccucacuucaucgacguuuuugugcacuucggcauugcccaauccagcacacgcgggggaucuagagucgaaggcaucuuugcuggacucuucaugaacgccuacggggcgggccaggugaugcugcgguggggcgugcuugccaaauccgucaagaauauuaugcuggggcaugcuagcguucaggccgagauggaacaggugguggaggucuacgaauaugcucaaaagcucggaggcgaggccggguuuuaccacauccugaacaaucccaaagccucucuucugucccucacccaguucccucauuuuagcuccgugguucugggaaacgcugcgggccuggggaucaugggagaguaucgcggcacgcccagaaaccaggaccucuacgaugccgcuaaggccuaugccgaacagcugaaagagaauggcgugauuaacuacucuguccuugaccugacagcugaggaacucgaagccaucaagcaccaacugaauccuaaagauaacgacguggagcuuugaggacuaguaauaaggaaacuguaugaaugucugugggcaggaagugaagagauccuucuguaaagguuuuuggaauuaugucugcugaauaauaaacuuuuuugaaauaauaaaucugguagaaaaaugagaucuaaaaaaaaaaaaaaaaaaaaaaaaaaaaaaaaaaaaaaaaaaaaaaaaaaaaaaaaaaaaaaaaugcaucccccccccccccccccccccccccccccccaaaggcucuuuucagagccaccagaauu

SEQ ID NO: 10429 - RNA, 1538 nt, Artificial Sequence
  mRNA product Design g-5 comprising derived and/or modified sequence from HRSV(A2)__P03418.1__N (opt6)
gggagacccgugacccggaaguuguacggcuacgcgacuuucccucccacaaacccucgcgcccuuccuuuccuacuugggcccggcagaaagcuuaccauggcacuaagcaaagucaaauuaaacgacacauuaaacaaagaccaacucuuaucaucaucaaaauacacaauacaaagaagcaccggagacaguaucgacacaccaaacuaugacguccaaaaacauauaaauaaauuaugcggcaugcucuuaaucacagaagacgccaaccauaaauuuacaggauuaauaggaauguuauaugcaaugucacgacuagguagagaagacacaauaaaaauacuaagagacgcaggcuaucacguaaaagcaaauggaguagacguaaccacacacagacaagacauaaauggaaaagaaaugaaauuugaaguauuaacacuagcaucacuaacaacagaaauacaaaucaacauagaaauagaaucaagaaaaagcuacaaaaaaauguuaaaagaaaugggagaagucgcaccagaauauagacaugauucaccagacugcggaaugauaauacuaugcauagcagcccuaguaauuacaaaacuagcagcaggagacagaagcggauuaacagcaguaauaagaagagcaaacaacguacuaaaaaacgaaaugaaaagauauaaaggauuauuaccaaaagacauagcaaacucauucuaugaaguauucgaaaaacacccccacuuuauagacgucuucguacacuucggaauagcccaaucauccacaagaggaggaucaagagucgaaggaauauucgcaggauuauucaugaacgcauauggcgcaggacaaguaaugcuaagauggggaguacuagcaaaauccgucaaaaacauaaugcuaggacacgcaucaguucaagcagaaauggaacaaguaguagaaguauacgaauacgcccaaaaacuaggaggagaagcaggauucuaccacauacuaaauaauccaaaagcaucacuacuaagccuaacccaauuuccccacuucucaaguguaguauuaggaaaugcagcuggacuaggaauaaugggagaauacagaggaacaccaagaaaccaagacuuauacgacgcagcaaaagcauacgcagagcaacuuaaagaaaacggaguaauaaacuauagcguacuagacuuaacagcagaagaacuggaagcaauaaaacaucaauuaaacccgaaagacaaugacguagaauuauaaggacuaguaauaaggaaacuguaugaaugucugugggcaggaagugaagagauccuucuguaaagguuuuuggaauuaugucugcugaauaauaaacuuuuuugaaauaauaaaucugguagaaaaaugagaucuaaaaaaaaaaaaaaaaaaaaaaaaaaaaaaaaaaaaaaaaaaaaaaaaaaaaaaaaaaaaaaaaugcaucccccccccccccccccccccccccccccccaaaggcucuuuucagagccaccagaauu

SEQ ID NO: 10430 - RNA, 1538 nt, Artificial Sequence
  mRNA product Design g-5 comprising derived and/or modified sequence from HRSV(A2)__P03418.1__N (opt11)
gggagacccgugacccggaaguuguacggcuacgcgacuuucccucccacaaacccucgcgcccuuccuuuccuacuugggcccggcagaaagcuuaccauggcacucucgaaaguaaaacucaacgacacccucaacaaagaccaacuccuuuccagcuccaaauacaccauccaacgauccaccggagacuccaucgacacgcccaacuacgacguccagaaacacaucaacaagcucugcggaaugcuacuaaucaccgaggacgccaaccacaaauucacaggacuuauagggaugcucuacgccaugucccgccucggacgcgaagacacaauaaaaauccuacgagacgccggcuaccacguaaaggcaaacggcgucgacgucaccacacacagacaagacaucaacggaaaggaaaugaaauucgaaguccucacccucgccagccuaaccaccgagauccaaaucaacaucgaaaucgaaucacgcaaauccuacaagaaaaugcucaaagaaaugggagaagucgcccccgaauaccgucacgacucgcccgacugcggcaugauaauccuaugcaucgccgcacucgucauaaccaaacucgccgccggugaccgaucaggacugacagcagucauccgccgagcaaacaacgugcucaaaaacgaaaugaaacgcuacaaaggccuacuccccaaagacaucgccaacuccuucuacgaagucuucgaaaaacacccacacuucaucgacgucuucguccacuucggcaucgcacaaucaucaaccagaggcggcagccgcguugaaggcaucuucgcaggacucuuuaugaacgccuacggcgccggccaagucaugcuccgcuggggcguccuggcaaaaagcgucaaaaacaucaugcuaggccacgcuagcguccaagccgaaauggaacaagucgucgaaguuuacgaguacgcacaaaaacucggcggcgaagcaggcuucuaccacauccuaaacaaccccaaagccucccugcuaucacucacccaauucccccacuucuccagcgucguccucggcaacgccgcaggacuaggcaucaugggagaauaccgcgggacaccgcgcaaccaagaccucuacgacgccgccaaagccuacgccgaacaacucaaagaaaacggcgucauaaacuacucaguccucgaccucaccgccgaagaacucgaagccaucaaacaccaacucaacccaaaagacaacgacgucgaauuauaaggacuaguaauaaggaaacuguaugaaugucugugggcaggaagugaagagauccuucuguaaagguuuuuggaauuaugucugcugaauaauaaacuuuuuugaaauaauaaaucugguagaaaaaugagaucuaaaaaaaaaaaaaaaaaaaaaaaaaaaaaaaaaaaaaaaaaaaaaaaaaaaaaaaaaaaaaaaaugcaucccccccccccccccccccccccccccccccaaaggcucuuuucagagccaccagaauu

SEQ ID NO: 10431 - RNA, 1554 nt, Artificial Sequence
  mRNA product Design h-1 comprising derived and/or modified sequence from HRSV(A2)__P03418.1__N (wt)
gggagacccgugacccggaaguuguacggcuacgcgacuuucccucccacaaacccucgcgcccuuccuuuccuacuugggcccggcagaaagcuuaccauggcucuuagcaaagucaaguugaaugauacacucaacaaagaucaacuucugucauccagcaaauacaccauccaacggagcacaggagauaguauugauacuccuaauuaugaugugcagaaacacaucaauaaguuauguggcauguuauuaaucacagaagaugcuaaucauaaauucacuggguuaauagguauguuauaugcgaugucuagguuaggaagagaagacaccauaaaaauacucagagaugcgggauaucauguaaaagcaaauggaguagauguaacaacacaucgucaagacauuaauggaaaagaaaugaaauuugaaguguuaacauuggcaagcuuaacaacugaaauucaaaucaacauugagauagaaucuagaaaauccuacaaaaaaaugcuaaaagaaaugggagagguagcuccagaauacaggcaugacucuccugauugugggaugauaauauuauguauagcagcauuaguaauaacuaaauuagcagcaggggacagaucuggucuuacagccgugauuaggagagcuaauaauguccuaaaaaaugaaaugaaacguuacaaaggcuuacuacccaaggacauagccaacagcuucuaugaaguguuugaaaaacauccccacuuuauagauguuuuuguucauuuugguauagcacaaucuucuaccagagguggcaguagaguugaagggauuuuugcaggauuguuuaugaaugccuauggugcagggcaagugauguuacgguggggagucuuagcaaaaucaguuaaaaauauuauguuaggacaugcuagugugcaagcagaaauggaacaaguuguugagguuuaugaauaugcccaaaaauuggguggugaagcaggauucuaccauauauugaacaacccaaaagcaucauuauuaucuuugacucaauuuccucacuucuccaguguaguauuaggcaaugcugcuggccuaggcauaaugggagaguacagagguacaccgaggaaucaagaucuauaugaugcagcaaaggcauaugcugaacaacucaaagaaaauggugugauuaacuacaguguacuagacuugacagcagaagaacuagaggcuaucaaacaucagcuuaauccaaaagauaaugauguagagcuuugaggacuaguacuggcugcaucucccuuuccucuguccuccauccuucucccaggauggugaagggggaccugguacccagugauccccaccccaggauccuaaaucaugacuuaccugcuaauaaaaacucauuggaaaagugagaagaucuaaaaaaaaaaaaaaaaaaaaaaaaaaaaaaaaaaaaaaaaaaaaaaaaaaaaaaaaaaaaaaaaugcaucccccccccccccccccccccccccccccccaaaggcucuuuucagagccaccagaauu

SEQ ID NO: 10432 - RNA, 1554 nt, Artificial Sequence
  mRNA product Design h-1 comprising derived and/or modified sequence from HRSV(A2)__P03418.1__N (opt1)
gggagacccgugacccggaaguuguacggcuacgcgacuuucccucccacaaacccucgcgcccuuccuuuccuacuugggcccggcagaaagcuuaccauggcccugagcaaggugaagcucaacgacacccugaacaaggaccagcugcucuccagcuccaaguacaccauccagcgcagcaccggcgacuccaucgacacccccaacuacgacguccagaagcacaucaacaagcugugcgggaugcugcucaucaccgaggacgccaaccacaaguucaccggccugaucgggaugcuguacgcgaugagccggcucggccgcgaggacacgaucaagauccugcgggacgccggguaccacgugaaggccaacggcguggacgucaccacccaccgccaggacaucaacggcaaggagaugaaguucgaggugcugacccucgccucccugacgaccgagauccagaucaacaucgagaucgagagccggaaguccuacaagaagaugcugaaggagaugggggagguggccccggaguaccgccacgacagccccgacugcggcaugaucauccucugcaucgcggcccuggucaucaccaagcuggccgccggggaccgguccggccucaccgcggugauccgccgggccaacaacgugcugaagaacgagaugaagcgcuacaaggggcugcuccccaaggacaucgccaacagcuucuacgaggucuucgagaagcacccccacuucaucgacguguucgugcacuucggcaucgcccaguccagcacgcggggcgggucccgcgucgagggcaucuucgccgggcuguucaugaacgcguacggcgccggccaggugaugcugcgguggggcgugcucgccaagagcgucaagaacaucaugcuggggcacgccuccgugcaggccgagauggagcaggucguggagguguacgaguacgcgcagaagcucgggggcgaggccggguucuaccacauccugaacaacccgaaggccagccugcugucccucacccaguucccccacuucagcagcgugguccugggcaacgccgccggccuggggaucaugggcgaguaccgcgggacgccccggaaccaggaccucuacgacgcggccaaggccuacgccgagcagcugaaggagaacggcgugaucaacuacuccgugcuggaccucaccgccgaggagcuggaggcgaucaagcaccagcugaaccccaaggacaacgacgucgagcucugaggacuaguacuggcugcaucucccuuuccucuguccuccauccuucucccaggauggugaagggggaccugguacccagugauccccaccccaggauccuaaaucaugacuuaccugcuaauaaaaacucauuggaaaagugagaagaucuaaaaaaaaaaaaaaaaaaaaaaaaaaaaaaaaaaaaaaaaaaaaaaaaaaaaaaaaaaaaaaaaugcaucccccccccccccccccccccccccccccccaaaggcucuuuucagagccaccagaauu

SEQ ID NO: 10433 - RNA, 1554 nt, Artificial Sequence
  mRNA product Design h-1 comprising derived and/or modified sequence from HRSV(A2)__P03418.1__N (opt2)
gggagacccgugacccggaaguuguacggcuacgcgacuuucccucccacaaacccucgcgcccuuccuuuccuacuugggcccggcagaaagcuuaccauggcccucuccaaggucaagcucaacgacacccucaacaaggaccagcuccucuccuccuccaaguacaccauccagcgcuccaccggcgacuccaucgacacccccaacuacgacguccagaagcacaucaacaagcucugcggcaugcuccucaucaccgaggacgccaaccacaaguucaccggccucaucggcaugcucuacgccaugucccgccucggccgcgaggacaccaucaagauccuccgcgacgccggcuaccacgucaaggccaacggcgucgacgucaccacccaccgccaggacaucaacggcaaggagaugaaguucgagguccucacccucgccucccucaccaccgagauccagaucaacaucgagaucgagucccgcaaguccuacaagaagaugcucaaggagaugggcgaggucgcccccgaguaccgccacgacucccccgacugcggcaugaucauccucugcaucgccgcccucgucaucaccaagcucgccgccggcgaccgcuccggccucaccgccgucauccgccgcgccaacaacguccucaagaacgagaugaagcgcuacaagggccuccuccccaaggacaucgccaacuccuucuacgaggucuucgagaagcacccccacuucaucgacgucuucguccacuucggcaucgcccaguccuccacccgcggcggcucccgcgucgagggcaucuucgccggccucuucaugaacgccuacggcgccggccaggucaugcuccgcuggggcguccucgccaaguccgucaagaacaucaugcucggccacgccuccguccaggccgagauggagcaggucgucgaggucuacgaguacgcccagaagcucggcggcgaggccggcuucuaccacauccucaacaaccccaaggccucccuccucucccucacccaguucccccacuucuccuccgucguccucggcaacgccgccggccucggcaucaugggcgaguaccgcggcaccccccgcaaccaggaccucuacgacgccgccaaggccuacgccgagcagcucaaggagaacggcgucaucaacuacuccguccucgaccucaccgccgaggagcucgaggccaucaagcaccagcucaaccccaaggacaacgacgucgagcucugaggacuaguacuggcugcaucucccuuuccucuguccuccauccuucucccaggauggugaagggggaccugguacccagugauccccaccccaggauccuaaaucaugacuuaccugcuaauaaaaacucauuggaaaagugagaagaucuaaaaaaaaaaaaaaaaaaaaaaaaaaaaaaaaaaaaaaaaaaaaaaaaaaaaaaaaaaaaaaaaugcaucccccccccccccccccccccccccccccccaaaggcucuuuucagagccaccagaauu

SEQ ID NO: 10434 - RNA, 1554 nt, Artificial Sequence
  mRNA product Design h-1 comprising derived and/or modified sequence from HRSV(A2)__P03418.1__N (opt3)
gggagacccgugacccggaaguuguacggcuacgcgacuuucccucccacaaacccucgcgcccuuccuuuccuacuugggcccggcagaaagcuuaccauggcccugagcaaggugaaacucaacgacacccuuaauaaggaucagcuguuguccucuucaaaauacacaauccaaagaaguacuggcgacagcauugauacgcccaacuaugacguccagaagcacauaaauaaauuaugcgggaugcugcuaaucaccgaggaugcuaaccauaaguucacaggacucauugguaugcuguacgcaauguccaggcuuggccgggaagacacuaucaagauucugcgcgaugccggguaucacguuaaagcgaauggaguggacguaaccacacaucgacaggauaucaacggcaaggagaugaaauuugaaguguugacccucgcuucucugacuacagagauacagaucaauauugaaaucgagucgcguaagucauacaaaaagaugcugaaggagaugggugaagucgccccugaguauagacacgacagcccagauugugggaugauuauccucugcauagcagccuuagugauuaccaaacuggcugcaggagacaggaguggccuuacggccguuauccggcgcgcuaacaauguguugaagaacgaaaugaaaagauacaagggccugcuaccgaaagauauugccaauuccuucuaugaggucuuugagaagcauccccacuucaucgacguguuuguacacuucgggaucgcgcaaucuagcacuaggggagguucccggguugaaggcauuuuugcaggacucuucaugaacgccuacggggcuggccaggugaugcugcgcugggguguccuugccaaaucagugaagaauauaaugcuggggcaugcaagugugcaggcugagauggaacaggucguugagguguacgaauaugcccaaaaguugggaggcgaggcgggcuuuuaccacauccucaacaauccuaaagccagccuguuaucucugacccaguucccacauuuuuccucaguagugcucgggaacgcagcuggacuugguauuaugggcgaguaucgagggacacccagaaaccaggaccuguacgaugccgcuaaggccuaugcagaacaguugaaagagaauggagucaucaacuacagcgugcuagaccugacugccgaggaacucgaagcuauaaagcaccaacugaauccuaaagauaacgacguugagcuuugaggacuaguacuggcugcaucucccuuuccucuguccuccauccuucucccaggauggugaagggggaccugguacccagugauccccaccccaggauccuaaaucaugacuuaccugcuaauaaaaacucauuggaaaagugagaagaucuaaaaaaaaaaaaaaaaaaaaaaaaaaaaaaaaaaaaaaaaaaaaaaaaaaaaaaaaaaaaaaaaugcaucccccccccccccccccccccccccccccccaaaggcucuuuucagagccaccagaauu

SEQ ID NO: 10435 - RNA, 1554 nt, Artificial Sequence
  mRNA product Design h-1 comprising derived and/or modified sequence from HRSV(A2)__P03418.1__N (opt4)
gggagacccgugacccggaaguuguacggcuacgcgacuuucccucccacaaacccucgcgcccuuccuuuccuacuugggcccggcagaaagcuuaccauggcccugagcaaggugaagcugaacgacacccugaacaaggaccagcugcugagcagcagcaaguacaccauccagagaagcaccggcgacagcaucgacacccccaacuacgacgugcagaagcacaucaacaagcugugcggcaugcugcugaucaccgaggacgccaaccacaaguucaccggccugaucggcaugcuguacgccaugagcagacugggcagagaggacaccaucaagauccugagagacgccggcuaccacgugaaggccaacggcguggacgugaccacccacagacaggacaucaacggcaaggagaugaaguucgaggugcugacccuggccagccugaccaccgagauccagaucaacaucgagaucgagagcagaaagagcuacaagaagaugcugaaggagaugggcgagguggcccccgaguacagacacgacagccccgacugcggcaugaucauccugugcaucgccgcccuggugaucaccaagcuggccgccggcgacagaagcggccugaccgccgugaucagaagagccaacaacgugcugaagaacgagaugaagagauacaagggccugcugcccaaggacaucgccaacagcuucuacgagguguucgagaagcacccccacuucaucgacguguucgugcacuucggcaucgcccagagcagcaccagaggcggcagcagaguggagggcaucuucgccggccuguucaugaacgccuacggcgccggccaggugaugcugagauggggcgugcuggccaagagcgugaagaacaucaugcugggccacgccagcgugcaggccgagauggagcaggugguggagguguacgaguacgcccagaagcugggcggcgaggccggcuucuaccacauccugaacaaccccaaggccagccugcugagccugacccaguucccccacuucagcagcguggugcugggcaacgccgccggccugggcaucaugggcgaguacagaggcacccccagaaaccaggaccuguacgacgccgccaaggccuacgccgagcagcugaaggagaacggcgugaucaacuacagcgugcuggaccugaccgccgaggagcuggaggccaucaagcaccagcugaaccccaaggacaacgacguggagcugugaggacuaguacuggcugcaucucccuuuccucuguccuccauccuucucccaggauggugaagggggaccugguacccagugauccccaccccaggauccuaaaucaugacuuaccugcuaauaaaaacucauuggaaaagugagaagaucuaaaaaaaaaaaaaaaaaaaaaaaaaaaaaaaaaaaaaaaaaaaaaaaaaaaaaaaaaaaaaaaaugcaucccccccccccccccccccccccccccccccaaaggcucuuuucagagccaccagaauu

SEQ ID NO: 10436 - RNA, 1554 nt, Artificial Sequence
  mRNA product Design h-1 comprising derived and/or modified sequence from HRSV(A2)__P03418.1__N (opt5)
gggagacccgugacccggaaguuguacggcuacgcgacuuucccucccacaaacccucgcgcccuuccuuuccuacuugggcccggcagaaagcuuaccauggcccugagcaaggugaaacucaacgacacccugaauaaggaucagcuucuguccucuagcaaauacacaauccaaagauccacgggcgacucuauugauacccccaacuaugacguccagaagcacaucaauaaacucugcgggaugcugcuuauuacagaggaugcuaaccauaaguucaccggacugaucggcaugcucuacgccaugagccggcuggggcgcgaagacacaauuaagauccugagagaugcgggauaucacguuaaagcuaauggcguggacgugaccacacaucggcaggauaucaacgggaaggagaugaaauuugaaguccucacccuggccucccuuacgaccgagauucagaucaauauugaaaucgagucucgcaagagcuacaaaaagaugcugaaggagaugggagaaguggccccugaguauagacacgacuccccggauuguggcaugauuauccucugcauugcugcccugguuaucacaaaacuugcugccggcgaccggagcgggcugaccgcggugauccgcagagccaacaauguccucaagaacgaaaugaaacgguacaagggacugcugcccaaagauauugcuaauucuuucuaugagguguuugagaagcauccucacuucaucgacguuuuugugcacuucggcauugcccaauccagcacacgcgggggaucuagagucgaaggcaucuuugcuggacucuucaugaacgccuacggggcgggccaggugaugcugcgguggggcgugcuugccaaauccgucaagaauauuaugcuggggcaugcuagcguucaggccgagauggaacaggugguggaggucuacgaauaugcucaaaagcucggaggcgaggccggguuuuaccacauccugaacaaucccaaagccucucuucugucccucacccaguucccucauuuuagcuccgugguucugggaaacgcugcgggccuggggaucaugggagaguaucgcggcacgcccagaaaccaggaccucuacgaugccgcuaaggccuaugccgaacagcugaaagagaauggcgugauuaacuacucuguccuugaccugacagcugaggaacucgaagccaucaagcaccaacugaauccuaaagauaacgacguggagcuuugaggacuaguacuggcugcaucucccuuuccucuguccuccauccuucucccaggauggugaagggggaccugguacccagugauccccaccccaggauccuaaaucaugacuuaccugcuaauaaaaacucauuggaaaagugagaagaucuaaaaaaaaaaaaaaaaaaaaaaaaaaaaaaaaaaaaaaaaaaaaaaaaaaaaaaaaaaaaaaaaugcaucccccccccccccccccccccccccccccccaaaggcucuuuucagagccaccagaauu

SEQ ID NO: 10437 - RNA, 1554 nt, Artificial Sequence
  mRNA product Design h-1 comprising derived and/or modified sequence from HRSV(A2)__P03418.1__N (opt6)
gggagacccgugacccggaaguuguacggcuacgcgacuuucccucccacaaacccucgcgcccuuccuuuccuacuugggcccggcagaaagcuuaccauggcacuaagcaaagucaaauuaaacgacacauuaaacaaagaccaacucuuaucaucaucaaaauacacaauacaaagaagcaccggagacaguaucgacacaccaaacuaugacguccaaaaacauauaaauaaauuaugcggcaugcucuuaaucacagaagacgccaaccauaaauuuacaggauuaauaggaauguuauaugcaaugucacgacuagguagagaagacacaauaaaaauacuaagagacgcaggcuaucacguaaaagcaaauggaguagacguaaccacacacagacaagacauaaauggaaaagaaaugaaauuugaaguauuaacacuagcaucacuaacaacagaaauacaaaucaacauagaaauagaaucaagaaaaagcuacaaaaaaauguuaaaagaaaugggagaagucgcaccagaauauagacaugauucaccagacugcggaaugauaauacuaugcauagcagcccuaguaauuacaaaacuagcagcaggagacagaagcggauuaacagcaguaauaagaagagcaaacaacguacuaaaaaacgaaaugaaaagauauaaaggauuauuaccaaaagacauagcaaacucauucuaugaaguauucgaaaaacacccccacuuuauagacgucuucguacacuucggaauagcccaaucauccacaagaggaggaucaagagucgaaggaauauucgcaggauuauucaugaacgcauauggcgcaggacaaguaaugcuaagauggggaguacuagcaaaauccgucaaaaacauaaugcuaggacacgcaucaguucaagcagaaauggaacaaguaguagaaguauacgaauacgcccaaaaacuaggaggagaagcaggauucuaccacauacuaaauaauccaaaagcaucacuacuaagccuaacccaauuuccccacuucucaaguguaguauuaggaaaugcagcuggacuaggaauaaugggagaauacagaggaacaccaagaaaccaagacuuauacgacgcagcaaaagcauacgcagagcaacuuaaagaaaacggaguaauaaacuauagcguacuagacuuaacagcagaagaacuggaagcaauaaaacaucaauuaaacccgaaagacaaugacguagaauuauaaggacuaguacuggcugcaucucccuuuccucuguccuccauccuucucccaggauggugaagggggaccugguacccagugauccccaccccaggauccuaaaucaugacuuaccugcuaauaaaaacucauuggaaaagugagaagaucuaaaaaaaaaaaaaaaaaaaaaaaaaaaaaaaaaaaaaaaaaaaaaaaaaaaaaaaaaaaaaaaaugcaucccccccccccccccccccccccccccccccaaaggcucuuuucagagccaccagaauu

SEQ ID NO: 10438 - RNA, 1554 nt, Artificial Sequence
  mRNA product Design h-1 comprising derived and/or modified sequence from HRSV(A2)__P03418.1__N (opt11)
gggagacccgugacccggaaguuguacggcuacgcgacuuucccucccacaaacccucgcgcccuuccuuuccuacuugggcccggcagaaagcuuaccauggcacucucgaaaguaaaacucaacgacacccucaacaaagaccaacuccuuuccagcuccaaauacaccauccaacgauccaccggagacuccaucgacacgcccaacuacgacguccagaaacacaucaacaagcucugcggaaugcuacuaaucaccgaggacgccaaccacaaauucacaggacuuauagggaugcucuacgccaugucccgccucggacgcgaagacacaauaaaaauccuacgagacgccggcuaccacguaaaggcaaacggcgucgacgucaccacacacagacaagacaucaacggaaaggaaaugaaauucgaaguccucacccucgccagccuaaccaccgagauccaaaucaacaucgaaaucgaaucacgcaaauccuacaagaaaaugcucaaagaaaugggagaagucgcccccgaauaccgucacgacucgcccgacugcggcaugauaauccuaugcaucgccgcacucgucauaaccaaacucgccgccggugaccgaucaggacugacagcagucauccgccgagcaaacaacgugcucaaaaacgaaaugaaacgcuacaaaggccuacuccccaaagacaucgccaacuccuucuacgaagucuucgaaaaacacccacacuucaucgacgucuucguccacuucggcaucgcacaaucaucaaccagaggcggcagccgcguugaaggcaucuucgcaggacucuuuaugaacgccuacggcgccggccaagucaugcuccgcuggggcguccuggcaaaaagcgucaaaaacaucaugcuaggccacgcuagcguccaagccgaaauggaacaagucgucgaaguuuacgaguacgcacaaaaacucggcggcgaagcaggcuucuaccacauccuaaacaaccccaaagccucccugcuaucacucacccaauucccccacuucuccagcgucguccucggcaacgccgcaggacuaggcaucaugggagaauaccgcgggacaccgcgcaaccaagaccucuacgacgccgccaaagccuacgccgaacaacucaaagaaaacggcgucauaaacuacucaguccucgaccucaccgccgaagaacucgaagccaucaaacaccaacucaacccaaaagacaacgacgucgaauuauaaggacuaguacuggcugcaucucccuuuccucuguccuccauccuucucccaggauggugaagggggaccugguacccagugauccccaccccaggauccuaaaucaugacuuaccugcuaauaaaaacucauuggaaaagugagaagaucuaaaaaaaaaaaaaaaaaaaaaaaaaaaaaaaaaaaaaaaaaaaaaaaaaaaaaaaaaaaaaaaaugcaucccccccccccccccccccccccccccccccaaaggcucuuuucagagccaccagaauu

SEQ ID NO: 10439 - RNA, 1770 nt, Artificial Sequence
  mRNA product Design h-2 comprising derived and/or modified sequence from HRSV(A2)__P03418.1__N (wt)
gggagacccgugacccggaaguuguacggcuacgcgacuuucccucccacaaacccucgcgcccuuccuuuccuacuugggcccggcagaaagcuuaccauggcucuuagcaaagucaaguugaaugauacacucaacaaagaucaacuucugucauccagcaaauacaccauccaacggagcacaggagauaguauugauacuccuaauuaugaugugcagaaacacaucaauaaguuauguggcauguuauuaaucacagaagaugcuaaucauaaauucacuggguuaauagguauguuauaugcgaugucuagguuaggaagagaagacaccauaaaaauacucagagaugcgggauaucauguaaaagcaaauggaguagauguaacaacacaucgucaagacauuaauggaaaagaaaugaaauuugaaguguuaacauuggcaagcuuaacaacugaaauucaaaucaacauugagauagaaucuagaaaauccuacaaaaaaaugcuaaaagaaaugggagagguagcuccagaauacaggcaugacucuccugauugugggaugauaauauuauguauagcagcauuaguaauaacuaaauuagcagcaggggacagaucuggucuuacagccgugauuaggagagcuaauaauguccuaaaaaaugaaaugaaacguuacaaaggcuuacuacccaaggacauagccaacagcuucuaugaaguguuugaaaaacauccccacuuuauagauguuuuuguucauuuugguauagcacaaucuucuaccagagguggcaguagaguugaagggauuuuugcaggauuguuuaugaaugccuauggugcagggcaagugauguuacgguggggagucuuagcaaaaucaguuaaaaauauuauguuaggacaugcuagugugcaagcagaaauggaacaaguuguugagguuuaugaauaugcccaaaaauuggguggugaagcaggauucuaccauauauugaacaacccaaaagcaucauuauuaucuuugacucaauuuccucacuucuccaguguaguauuaggcaaugcugcuggccuaggcauaaugggagaguacagagguacaccgaggaaucaagaucuauaugaugcagcaaaggcauaugcugaacaacucaaagaaaauggugugauuaacuacaguguacuagacuugacagcagaagaacuagaggcuaucaaacaucagcuuaauccaaaagauaaugauguagagcuuugaggacuagugaagggaacacccaaauuuaauucagccuuaagcacaauuaauuaagagugaaacguaauuguacaagcaguuggucacccaccauagggcaugaucaacaccgcaaccuuuccuuuuucccccagugauucugaaaaaccccucuucccuucagcuugcuuagauguuccaaauuuaguaagcuuaaggcggccuacagaagaaaaagaaaaaaaaggccacaaaaguucccucucacuuucaguaaauaaaauaaaagcagcaacagaaauaaagaaauaaaugaaauucaaaaugaaauaaauauuguguugugcagcauuaaaaaaucaauaaaaauuaaaaaugagcaagaucuaaaaaaaaaaaaaaaaaaaaaaaaaaaaaaaaaaaaaaaaaaaaaaaaaaaaaaaaaaaaaaaaugcaucccccccccccccccccccccccccccccccaaaggcucuuuucagagccaccagaauu

SEQ ID NO: 10440 - RNA, 1770 nt, Artificial Sequence
  mRNA product Design h-2 comprising derived and/or modified sequence from HRSV(A2)__P03418.1__N (opt1)
gggagacccgugacccggaaguuguacggcuacgcgacuuucccucccacaaacccucgcgcccuuccuuuccuacuugggcccggcagaaagcuuaccauggcccugagcaaggugaagcucaacgacacccugaacaaggaccagcugcucuccagcuccaaguacaccauccagcgcagcaccggcgacuccaucgacacccccaacuacgacguccagaagcacaucaacaagcugugcgggaugcugcucaucaccgaggacgccaaccacaaguucaccggccugaucgggaugcuguacgcgaugagccggcucggccgcgaggacacgaucaagauccugcgggacgccggguaccacgugaaggccaacggcguggacgucaccacccaccgccaggacaucaacggcaaggagaugaaguucgaggugcugacccucgccucccugacgaccgagauccagaucaacaucgagaucgagagccggaaguccuacaagaagaugcugaaggagaugggggagguggccccggaguaccgccacgacagccccgacugcggcaugaucauccucugcaucgcggcccuggucaucaccaagcuggccgccggggaccgguccggccucaccgcggugauccgccgggccaacaacgugcugaagaacgagaugaagcgcuacaaggggcugcuccccaaggacaucgccaacagcuucuacgaggucuucgagaagcacccccacuucaucgacguguucgugcacuucggcaucgcccaguccagcacgcggggcgggucccgcgucgagggcaucuucgccgggcuguucaugaacgcguacggcgccggccaggugaugcugcgguggggcgugcucgccaagagcgucaagaacaucaugcuggggcacgccuccgugcaggccgagauggagcaggucguggagguguacgaguacgcgcagaagcucgggggcgaggccggguucuaccacauccugaacaacccgaaggccagccugcugucccucacccaguucccccacuucagcagcgugguccugggcaacgccgccggccuggggaucaugggcgaguaccgcgggacgccccggaaccaggaccucuacgacgcggccaaggccuacgccgagcagcugaaggagaacggcgugaucaacuacuccgugcuggaccucaccgccgaggagcuggaggcgaucaagcaccagcugaaccccaaggacaacgacgucgagcucugaggacuagugaagggaacacccaaauuuaauucagccuuaagcacaauuaauuaagagugaaacguaauuguacaagcaguuggucacccaccauagggcaugaucaacaccgcaaccuuuccuuuuucccccagugauucugaaaaaccccucuucccuucagcuugcuuagauguuccaaauuuaguaagcuuaaggcggccuacagaagaaaaagaaaaaaaaggccacaaaaguucccucucacuuucaguaaauaaaauaaaagcagcaacagaaauaaagaaauaaaugaaauucaaaaugaaauaaauauuguguugugcagcauuaaaaaaucaauaaaaauuaaaaaugagcaagaucuaaaaaaaaaaaaaaaaaaaaaaaaaaaaaaaaaaaaaaaaaaaaaaaaaaaaaaaaaaaaaaaaugcaucccccccccccccccccccccccccccccccaaaggcucuuuucagagccaccagaauu

SEQ ID NO: 10441 - RNA, 1770 nt, Artificial Sequence
  mRNA product Design h-2 comprising derived and/or modified sequence from HRSV(A2)__P03418.1__N (opt2)
gggagacccgugacccggaaguuguacggcuacgcgacuuucccucccacaaacccucgcgcccuuccuuuccuacuugggcccggcagaaagcuuaccauggcccucuccaaggucaagcucaacgacacccucaacaaggaccagcuccucuccuccuccaaguacaccauccagcgcuccaccggcgacuccaucgacacccccaacuacgacguccagaagcacaucaacaagcucugcggcaugcuccucaucaccgaggacgccaaccacaaguucaccggccucaucggcaugcucuacgccaugucccgccucggccgcgaggacaccaucaagauccuccgcgacgccggcuaccacgucaaggccaacggcgucgacgucaccacccaccgccaggacaucaacggcaaggagaugaaguucgagguccucacccucgccucccucaccaccgagauccagaucaacaucgagaucgagucccgcaaguccuacaagaagaugcucaaggagaugggcgaggucgcccccgaguaccgccacgacucccccgacugcggcaugaucauccucugcaucgccgcccucgucaucaccaagcucgccgccggcgaccgcuccggccucaccgccgucauccgccgcgccaacaacguccucaagaacgagaugaagcgcuacaagggccuccuccccaaggacaucgccaacuccuucuacgaggucuucgagaagcacccccacuucaucgacgucuucguccacuucggcaucgcccaguccuccacccgcggcggcucccgcgucgagggcaucuucgccggccucuucaugaacgccuacggcgccggccaggucaugcuccgcuggggcguccucgccaaguccgucaagaacaucaugcucggccacgccuccguccaggccgagauggagcaggucgucgaggucuacgaguacgcccagaagcucggcggcgaggccggcuucuaccacauccucaacaaccccaaggccucccuccucucccucacccaguucccccacuucuccuccgucguccucggcaacgccgccggccucggcaucaugggcgaguaccgcggcaccccccgcaaccaggaccucuacgacgccgccaaggccuacgccgagcagcucaaggagaacggcgucaucaacuacuccguccucgaccucaccgccgaggagcucgaggccaucaagcaccagcucaaccccaaggacaacgacgucgagcucugaggacuagugaagggaacacccaaauuuaauucagccuuaagcacaauuaauuaagagugaaacguaauuguacaagcaguuggucacccaccauagggcaugaucaacaccgcaaccuuuccuuuuucccccagugauucugaaaaaccccucuucccuucagcuugcuuagauguuccaaauuuaguaagcuuaaggcggccuacagaagaaaaagaaaaaaaaggccacaaaaguucccucucacuuucaguaaauaaaauaaaagcagcaacagaaauaaagaaauaaaugaaauucaaaaugaaauaaauauuguguugugcagcauuaaaaaaucaauaaaaauuaaaaaugagcaagaucuaaaaaaaaaaaaaaaaaaaaaaaaaaaaaaaaaaaaaaaaaaaaaaaaaaaaaaaaaaaaaaaaugcaucccccccccccccccccccccccccccccccaaaggcucuuuucagagccaccagaauu

SEQ ID NO: 10442 - RNA, 1770 nt, Artificial Sequence
  mRNA product Design h-2 comprising derived and/or modified sequence from HRSV(A2)__P03418.1__N (opt3)
gggagacccgugacccggaaguuguacggcuacgcgacuuucccucccacaaacccucgcgcccuuccuuuccuacuugggcccggcagaaagcuuaccauggcccugagcaaggugaaacucaacgacacccuuaauaaggaucagcuguuguccucuucaaaauacacaauccaaagaaguacuggcgacagcauugauacgcccaacuaugacguccagaagcacauaaauaaauuaugcgggaugcugcuaaucaccgaggaugcuaaccauaaguucacaggacucauugguaugcuguacgcaauguccaggcuuggccgggaagacacuaucaagauucugcgcgaugccggguaucacguuaaagcgaauggaguggacguaaccacacaucgacaggauaucaacggcaaggagaugaaauuugaaguguugacccucgcuucucugacuacagagauacagaucaauauugaaaucgagucgcguaagucauacaaaaagaugcugaaggagaugggugaagucgccccugaguauagacacgacagcccagauugugggaugauuauccucugcauagcagccuuagugauuaccaaacuggcugcaggagacaggaguggccuuacggccguuauccggcgcgcuaacaauguguugaagaacgaaaugaaaagauacaagggccugcuaccgaaagauauugccaauuccuucuaugaggucuuugagaagcauccccacuucaucgacguguuuguacacuucgggaucgcgcaaucuagcacuaggggagguucccggguugaaggcauuuuugcaggacucuucaugaacgccuacggggcuggccaggugaugcugcgcugggguguccuugccaaaucagugaagaauauaaugcuggggcaugcaagugugcaggcugagauggaacaggucguugagguguacgaauaugcccaaaaguugggaggcgaggcgggcuuuuaccacauccucaacaauccuaaagccagccuguuaucucugacccaguucccacauuuuuccucaguagugcucgggaacgcagcuggacuugguauuaugggcgaguaucgagggacacccagaaaccaggaccuguacgaugccgcuaaggccuaugcagaacaguugaaagagaauggagucaucaacuacagcgugcuagaccugacugccgaggaacucgaagcuauaaagcaccaacugaauccuaaagauaacgacguugagcuuugaggacuagugaagggaacacccaaauuuaauucagccuuaagcacaauuaauuaagagugaaacguaauuguacaagcaguuggucacccaccauagggcaugaucaacaccgcaaccuuuccuuuuucccccagugauucugaaaaaccccucuucccuucagcuugcuuagauguuccaaauuuaguaagcuuaaggcggccuacagaagaaaaagaaaaaaaaggccacaaaaguucccucucacuuucaguaaauaaaauaaaagcagcaacagaaauaaagaaauaaaugaaauucaaaaugaaauaaauauuguguugugcagcauuaaaaaaucaauaaaaauuaaaaaugagcaagaucuaaaaaaaaaaaaaaaaaaaaaaaaaaaaaaaaaaaaaaaaaaaaaaaaaaaaaaaaaaaaaaaaugcaucccccccccccccccccccccccccccccccaaaggcucuuuucagagccaccagaauu

SEQ ID NO: 10443 - RNA, 1770 nt, Artificial Sequence
  mRNA product Design h-2 comprising derived and/or modified sequence from HRSV(A2)__P03418.1__N (opt4)
gggagacccgugacccggaaguuguacggcuacgcgacuuucccucccacaaacccucgcgcccuuccuuuccuacuugggcccggcagaaagcuuaccauggcccugagcaaggugaagcugaacgacacccugaacaaggaccagcugcugagcagcagcaaguacaccauccagagaagcaccggcgacagcaucgacacccccaacuacgacgugcagaagcacaucaacaagcugugcggcaugcugcugaucaccgaggacgccaaccacaaguucaccggccugaucggcaugcuguacgccaugagcagacugggcagagaggacaccaucaagauccugagagacgccggcuaccacgugaaggccaacggcguggacgugaccacccacagacaggacaucaacggcaaggagaugaaguucgaggugcugacccuggccagccugaccaccgagauccagaucaacaucgagaucgagagcagaaagagcuacaagaagaugcugaaggagaugggcgagguggcccccgaguacagacacgacagccccgacugcggcaugaucauccugugcaucgccgcccuggugaucaccaagcuggccgccggcgacagaagcggccugaccgccgugaucagaagagccaacaacgugcugaagaacgagaugaagagauacaagggccugcugcccaaggacaucgccaacagcuucuacgagguguucgagaagcacccccacuucaucgacguguucgugcacuucggcaucgcccagagcagcaccagaggcggcagcagaguggagggcaucuucgccggccuguucaugaacgccuacggcgccggccaggugaugcugagauggggcgugcuggccaagagcgugaagaacaucaugcugggccacgccagcgugcaggccgagauggagcaggugguggagguguacgaguacgcccagaagcugggcggcgaggccggcuucuaccacauccugaacaaccccaaggccagccugcugagccugacccaguucccccacuucagcagcguggugcugggcaacgccgccggccugggcaucaugggcgaguacagaggcacccccagaaaccaggaccuguacgacgccgccaaggccuacgccgagcagcugaaggagaacggcgugaucaacuacagcgugcuggaccugaccgccgaggagcuggaggccaucaagcaccagcugaaccccaaggacaacgacguggagcugugaggacuagugaagggaacacccaaauuuaauucagccuuaagcacaauuaauuaagagugaaacguaauuguacaagcaguuggucacccaccauagggcaugaucaacaccgcaaccuuuccuuuuucccccagugauucugaaaaaccccucuucccuucagcuugcuuagauguuccaaauuuaguaagcuuaaggcggccuacagaagaaaaagaaaaaaaaggccacaaaaguucccucucacuuucaguaaauaaaauaaaagcagcaacagaaauaaagaaauaaaugaaauucaaaaugaaauaaauauuguguugugcagcauuaaaaaaucaauaaaaauuaaaaaugagcaagaucuaaaaaaaaaaaaaaaaaaaaaaaaaaaaaaaaaaaaaaaaaaaaaaaaaaaaaaaaaaaaaaaaugcaucccccccccccccccccccccccccccccccaaaggcucuuuucagagccaccagaauu

SEQ ID NO: 10444 - RNA, 1770 nt, Artificial Sequence
  mRNA product Design h-2 comprising derived and/or modified sequence from HRSV(A2)__P03418.1__N (opt5)
gggagacccgugacccggaaguuguacggcuacgcgacuuucccucccacaaacccucgcgcccuuccuuuccuacuugggcccggcagaaagcuuaccauggcccugagcaaggugaaacucaacgacacccugaauaaggaucagcuucuguccucuagcaaauacacaauccaaagauccacgggcgacucuauugauacccccaacuaugacguccagaagcacaucaauaaacucugcgggaugcugcuuauuacagaggaugcuaaccauaaguucaccggacugaucggcaugcucuacgccaugagccggcuggggcgcgaagacacaauuaagauccugagagaugcgggauaucacguuaaagcuaauggcguggacgugaccacacaucggcaggauaucaacgggaaggagaugaaauuugaaguccucacccuggccucccuuacgaccgagauucagaucaauauugaaaucgagucucgcaagagcuacaaaaagaugcugaaggagaugggagaaguggccccugaguauagacacgacuccccggauuguggcaugauuauccucugcauugcugcccugguuaucacaaaacuugcugccggcgaccggagcgggcugaccgcggugauccgcagagccaacaauguccucaagaacgaaaugaaacgguacaagggacugcugcccaaagauauugcuaauucuuucuaugagguguuugagaagcauccucacuucaucgacguuuuugugcacuucggcauugcccaauccagcacacgcgggggaucuagagucgaaggcaucuuugcuggacucuucaugaacgccuacggggcgggccaggugaugcugcgguggggcgugcuugccaaauccgucaagaauauuaugcuggggcaugcuagcguucaggccgagauggaacaggugguggaggucuacgaauaugcucaaaagcucggaggcgaggccggguuuuaccacauccugaacaaucccaaagccucucuucugucccucacccaguucccucauuuuagcuccgugguucugggaaacgcugcgggccuggggaucaugggagaguaucgcggcacgcccagaaaccaggaccucuacgaugccgcuaaggccuaugccgaacagcugaaagagaauggcgugauuaacuacucuguccuugaccugacagcugaggaacucgaagccaucaagcaccaacugaauccuaaagauaacgacguggagcuuugaggacuagugaagggaacacccaaauuuaauucagccuuaagcacaauuaauuaagagugaaacguaauuguacaagcaguuggucacccaccauagggcaugaucaacaccgcaaccuuuccuuuuucccccagugauucugaaaaaccccucuucccuucagcuugcuuagauguuccaaauuuaguaagcuuaaggcggccuacagaagaaaaagaaaaaaaaggccacaaaaguucccucucacuuucaguaaauaaaauaaaagcagcaacagaaauaaagaaauaaaugaaauucaaaaugaaauaaauauuguguugugcagcauuaaaaaaucaauaaaaauuaaaaaugagcaagaucuaaaaaaaaaaaaaaaaaaaaaaaaaaaaaaaaaaaaaaaaaaaaaaaaaaaaaaaaaaaaaaaaugcaucccccccccccccccccccccccccccccccaaaggcucuuuucagagccaccagaauu

SEQ ID NO: 10445 - RNA, 1770 nt, Artificial Sequence
  mRNA product Design h-2 comprising derived and/or modified sequence from HRSV(A2)__P03418.1__N (opt6)
gggagacccgugacccggaaguuguacggcuacgcgacuuucccucccacaaacccucgcgcccuuccuuuccuacuugggcccggcagaaagcuuaccauggcacuaagcaaagucaaauuaaacgacacauuaaacaaagaccaacucuuaucaucaucaaaauacacaauacaaagaagcaccggagacaguaucgacacaccaaacuaugacguccaaaaacauauaaauaaauuaugcggcaugcucuuaaucacagaagacgccaaccauaaauuuacaggauuaauaggaauguuauaugcaaugucacgacuagguagagaagacacaauaaaaauacuaagagacgcaggcuaucacguaaaagcaaauggaguagacguaaccacacacagacaagacauaaauggaaaagaaaugaaauuugaaguauuaacacuagcaucacuaacaacagaaauacaaaucaacauagaaauagaaucaagaaaaagcuacaaaaaaauguuaaaagaaaugggagaagucgcaccagaauauagacaugauucaccagacugcggaaugauaauacuaugcauagcagcccuaguaauuacaaaacuagcagcaggagacagaagcggauuaacagcaguaauaagaagagcaaacaacguacuaaaaaacgaaaugaaaagauauaaaggauuauuaccaaaagacauagcaaacucauucuaugaaguauucgaaaaacacccccacuuuauagacgucuucguacacuucggaauagcccaaucauccacaagaggaggaucaagagucgaaggaauauucgcaggauuauucaugaacgcauauggcgcaggacaaguaaugcuaagauggggaguacuagcaaaauccgucaaaaacauaaugcuaggacacgcaucaguucaagcagaaauggaacaaguaguagaaguauacgaauacgcccaaaaacuaggaggagaagcaggauucuaccacauacuaaauaauccaaaagcaucacuacuaagccuaacccaauuuccccacuucucaaguguaguauuaggaaaugcagcuggacuaggaauaaugggagaauacagaggaacaccaagaaaccaagacuuauacgacgcagcaaaagcauacgcagagcaacuuaaagaaaacggaguaauaaacuauagcguacuagacuuaacagcagaagaacuggaagcaauaaaacaucaauuaaacccgaaagacaaugacguagaauuauaaggacuagugaagggaacacccaaauuuaauucagccuuaagcacaauuaauuaagagugaaacguaauuguacaagcaguuggucacccaccauagggcaugaucaacaccgcaaccuuuccuuuuucccccagugauucugaaaaaccccucuucccuucagcuugcuuagauguuccaaauuuaguaagcuuaaggcggccuacagaagaaaaagaaaaaaaaggccacaaaaguucccucucacuuucaguaaauaaaauaaaagcagcaacagaaauaaagaaauaaaugaaauucaaaaugaaauaaauauuguguugugcagcauuaaaaaaucaauaaaaauuaaaaaugagcaagaucuaaaaaaaaaaaaaaaaaaaaaaaaaaaaaaaaaaaaaaaaaaaaaaaaaaaaaaaaaaaaaaaaugcaucccccccccccccccccccccccccccccccaaaggcucuuuucagagccaccagaauu

SEQ ID NO: 10446 - RNA, 1770 nt, Artificial Sequence
  mRNA product Design h-2 comprising derived and/or modified sequence from HRSV(A2)__P03418.1__N (opt11)
gggagacccgugacccggaaguuguacggcuacgcgacuuucccucccacaaacccucgcgcccuuccuuuccuacuugggcccggcagaaagcuuaccauggcacucucgaaaguaaaacucaacgacacccucaacaaagaccaacuccuuuccagcuccaaauacaccauccaacgauccaccggagacuccaucgacacgcccaacuacgacguccagaaacacaucaacaagcucugcggaaugcuacuaaucaccgaggacgccaaccacaaauucacaggacuuauagggaugcucuacgccaugucccgccucggacgcgaagacacaauaaaaauccuacgagacgccggcuaccacguaaaggcaaacggcgucgacgucaccacacacagacaagacaucaacggaaaggaaaugaaauucgaaguccucacccucgccagccuaaccaccgagauccaaaucaacaucgaaaucgaaucacgcaaauccuacaagaaaaugcucaaagaaaugggagaagucgcccccgaauaccgucacgacucgcccgacugcggcaugauaauccuaugcaucgccgcacucgucauaaccaaacucgccgccggugaccgaucaggacugacagcagucauccgccgagcaaacaacgugcucaaaaacgaaaugaaacgcuacaaaggccuacuccccaaagacaucgccaacuccuucuacgaagucuucgaaaaacacccacacuucaucgacgucuucguccacuucggcaucgcacaaucaucaaccagaggcggcagccgcguugaaggcaucuucgcaggacucuuuaugaacgccuacggcgccggccaagucaugcuccgcuggggcguccuggcaaaaagcgucaaaaacaucaugcuaggccacgcuagcguccaagccgaaauggaacaagucgucgaaguuuacgaguacgcacaaaaacucggcggcgaagcaggcuucuaccacauccuaaacaaccccaaagccucccugcuaucacucacccaauucccccacuucuccagcgucguccucggcaacgccgcaggacuaggcaucaugggagaauaccgcgggacaccgcgcaaccaagaccucuacgacgccgccaaagccuacgccgaacaacucaaagaaaacggcgucauaaacuacucaguccucgaccucaccgccgaagaacucgaagccaucaaacaccaacucaacccaaaagacaacgacgucgaauuauaaggacuagugaagggaacacccaaauuuaauucagccuuaagcacaauuaauuaagagugaaacguaauuguacaagcaguuggucacccaccauagggcaugaucaacaccgcaaccuuuccuuuuucccccagugauucugaaaaaccccucuucccuucagcuugcuuagauguuccaaauuuaguaagcuuaaggcggccuacagaagaaaaagaaaaaaaaggccacaaaaguucccucucacuuucaguaaauaaaauaaaagcagcaacagaaauaaagaaauaaaugaaauucaaaaugaaauaaauauuguguugugcagcauuaaaaaaucaauaaaaauuaaaaaugagcaagaucuaaaaaaaaaaaaaaaaaaaaaaaaaaaaaaaaaaaaaaaaaaaaaaaaaaaaaaaaaaaaaaaaugcaucccccccccccccccccccccccccccccccaaaggcucuuuucagagccaccagaauu

SEQ ID NO: 10447 - RNA, 1550 nt, Artificial Sequence
  mRNA product Design h-3 comprising derived and/or modified sequence from HRSV(A2)__P03418.1__N (wt)
gggagacccgugacccggaaguuguacggcuacgcgacuuucccucccacaaacccucgcgcccuuccuuuccuacuugggcccggcagaaagcuuaccauggcucuuagcaaagucaaguugaaugauacacucaacaaagaucaacuucugucauccagcaaauacaccauccaacggagcacaggagauaguauugauacuccuaauuaugaugugcagaaacacaucaauaaguuauguggcauguuauuaaucacagaagaugcuaaucauaaauucacuggguuaauagguauguuauaugcgaugucuagguuaggaagagaagacaccauaaaaauacucagagaugcgggauaucauguaaaagcaaauggaguagauguaacaacacaucgucaagacauuaauggaaaagaaaugaaauuugaaguguuaacauuggcaagcuuaacaacugaaauucaaaucaacauugagauagaaucuagaaaauccuacaaaaaaaugcuaaaagaaaugggagagguagcuccagaauacaggcaugacucuccugauugugggaugauaauauuauguauagcagcauuaguaauaacuaaauuagcagcaggggacagaucuggucuuacagccgugauuaggagagcuaauaauguccuaaaaaaugaaaugaaacguuacaaaggcuuacuacccaaggacauagccaacagcuucuaugaaguguuugaaaaacauccccacuuuauagauguuuuuguucauuuugguauagcacaaucuucuaccagagguggcaguagaguugaagggauuuuugcaggauuguuuaugaaugccuauggugcagggcaagugauguuacgguggggagucuuagcaaaaucaguuaaaaauauuauguuaggacaugcuagugugcaagcagaaauggaacaaguuguugagguuuaugaauaugcccaaaaauuggguggugaagcaggauucuaccauauauugaacaacccaaaagcaucauuauuaucuuugacucaauuuccucacuucuccaguguaguauuaggcaaugcugcuggccuaggcauaaugggagaguacagagguacaccgaggaaucaagaucuauaugaugcagcaaaggcauaugcugaacaacucaaagaaaauggugugauuaacuacaguguacuagacuugacagcagaagaacuagaggcuaucaaacaucagcuuaauccaaaagauaaugauguagagcuuugaggacuaguggaagcauuuuccuggcugauuaaaagaaauuacucagcuauggucaucuguuccuguuagaaggcuaugcagcauauuauauacuaugcgcauguuaugaaaugcauaauaaaaaauuuuaaaaaaucuaaaagaucuaaaaaaaaaaaaaaaaaaaaaaaaaaaaaaaaaaaaaaaaaaaaaaaaaaaaaaaaaaaaaaaaugcaucccccccccccccccccccccccccccccccaaaggcucuuuucagagccaccagaauu

SEQ ID NO: 10448 - RNA, 1550 nt, Artificial Sequence
  mRNA product Design h-3 comprising derived and/or modified sequence from HRSV(A2)__P03418.1__N (opt1)
gggagacccgugacccggaaguuguacggcuacgcgacuuucccucccacaaacccucgcgcccuuccuuuccuacuugggcccggcagaaagcuuaccauggcccugagcaaggugaagcucaacgacacccugaacaaggaccagcugcucuccagcuccaaguacaccauccagcgcagcaccggcgacuccaucgacacccccaacuacgacguccagaagcacaucaacaagcugugcgggaugcugcucaucaccgaggacgccaaccacaaguucaccggccugaucgggaugcuguacgcgaugagccggcucggccgcgaggacacgaucaagauccugcgggacgccggguaccacgugaaggccaacggcguggacgucaccacccaccgccaggacaucaacggcaaggagaugaaguucgaggugcugacccucgccucccugacgaccgagauccagaucaacaucgagaucgagagccggaaguccuacaagaagaugcugaaggagaugggggagguggccccggaguaccgccacgacagccccgacugcggcaugaucauccucugcaucgcggcccuggucaucaccaagcuggccgccggggaccgguccggccucaccgcggugauccgccgggccaacaacgugcugaagaacgagaugaagcgcuacaaggggcugcuccccaaggacaucgccaacagcuucuacgaggucuucgagaagcacccccacuucaucgacguguucgugcacuucggcaucgcccaguccagcacgcggggcgggucccgcgucgagggcaucuucgccgggcuguucaugaacgcguacggcgccggccaggugaugcugcgguggggcgugcucgccaagagcgucaagaacaucaugcuggggcacgccuccgugcaggccgagauggagcaggucguggagguguacgaguacgcgcagaagcucgggggcgaggccggguucuaccacauccugaacaacccgaaggccagccugcugucccucacccaguucccccacuucagcagcgugguccugggcaacgccgccggccuggggaucaugggcgaguaccgcgggacgccccggaaccaggaccucuacgacgcggccaaggccuacgccgagcagcugaaggagaacggcgugaucaacuacuccgugcuggaccucaccgccgaggagcuggaggcgaucaagcaccagcugaaccccaaggacaacgacgucgagcucugaggacuaguggaagcauuuuccuggcugauuaaaagaaauuacucagcuauggucaucuguuccuguuagaaggcuaugcagcauauuauauacuaugcgcauguuaugaaaugcauaauaaaaaauuuuaaaaaaucuaaaagaucuaaaaaaaaaaaaaaaaaaaaaaaaaaaaaaaaaaaaaaaaaaaaaaaaaaaaaaaaaaaaaaaaugcaucccccccccccccccccccccccccccccccaaaggcucuuuucagagccaccagaauu

SEQ ID NO: 10449 - RNA, 1550 nt, Artificial Sequence
  mRNA product Design h-3 comprising derived and/or modified sequence from HRSV(A2)__P03418.1__N (opt2)
gggagacccgugacccggaaguuguacggcuacgcgacuuucccucccacaaacccucgcgcccuuccuuuccuacuugggcccggcagaaagcuuaccauggcccucuccaaggucaagcucaacgacacccucaacaaggaccagcuccucuccuccuccaaguacaccauccagcgcuccaccggcgacuccaucgacacccccaacuacgacguccagaagcacaucaacaagcucugcggcaugcuccucaucaccgaggacgccaaccacaaguucaccggccucaucggcaugcucuacgccaugucccgccucggccgcgaggacaccaucaagauccuccgcgacgccggcuaccacgucaaggccaacggcgucgacgucaccacccaccgccaggacaucaacggcaaggagaugaaguucgagguccucacccucgccucccucaccaccgagauccagaucaacaucgagaucgagucccgcaaguccuacaagaagaugcucaaggagaugggcgaggucgcccccgaguaccgccacgacucccccgacugcggcaugaucauccucugcaucgccgcccucgucaucaccaagcucgccgccggcgaccgcuccggccucaccgccgucauccgccgcgccaacaacguccucaagaacgagaugaagcgcuacaagggccuccuccccaaggacaucgccaacuccuucuacgaggucuucgagaagcacccccacuucaucgacgucuucguccacuucggcaucgcccaguccuccacccgcggcggcucccgcgucgagggcaucuucgccggccucuucaugaacgccuacggcgccggccaggucaugcuccgcuggggcguccucgccaaguccgucaagaacaucaugcucggccacgccuccguccaggccgagauggagcaggucgucgaggucuacgaguacgcccagaagcucggcggcgaggccggcuucuaccacauccucaacaaccccaaggccucccuccucucccucacccaguucccccacuucuccuccgucguccucggcaacgccgccggccucggcaucaugggcgaguaccgcggcaccccccgcaaccaggaccucuacgacgccgccaaggccuacgccgagcagcucaaggagaacggcgucaucaacuacuccguccucgaccucaccgccgaggagcucgaggccaucaagcaccagcucaaccccaaggacaacgacgucgagcucugaggacuaguggaagcauuuuccuggcugauuaaaagaaauuacucagcuauggucaucuguuccuguuagaaggcuaugcagcauauuauauacuaugcgcauguuaugaaaugcauaauaaaaaauuuuaaaaaaucuaaaagaucuaaaaaaaaaaaaaaaaaaaaaaaaaaaaaaaaaaaaaaaaaaaaaaaaaaaaaaaaaaaaaaaaugcaucccccccccccccccccccccccccccccccaaaggcucuuuucagagccaccagaauu

SEQ ID NO: 10450 - RNA, 1550 nt, Artificial Sequence
  mRNA product Design h-3 comprising derived and/or modified sequence from HRSV(A2)__P03418.1__N (opt3)
gggagacccgugacccggaaguuguacggcuacgcgacuuucccucccacaaacccucgcgcccuuccuuuccuacuugggcccggcagaaagcuuaccauggcccugagcaaggugaaacucaacgacacccuuaauaaggaucagcuguuguccucuucaaaauacacaauccaaagaaguacuggcgacagcauugauacgcccaacuaugacguccagaagcacauaaauaaauuaugcgggaugcugcuaaucaccgaggaugcuaaccauaaguucacaggacucauugguaugcuguacgcaauguccaggcuuggccgggaagacacuaucaagauucugcgcgaugccggguaucacguuaaagcgaauggaguggacguaaccacacaucgacaggauaucaacggcaaggagaugaaauuugaaguguugacccucgcuucucugacuacagagauacagaucaauauugaaaucgagucgcguaagucauacaaaaagaugcugaaggagaugggugaagucgccccugaguauagacacgacagcccagauugugggaugauuauccucugcauagcagccuuagugauuaccaaacuggcugcaggagacaggaguggccuuacggccguuauccggcgcgcuaacaauguguugaagaacgaaaugaaaagauacaagggccugcuaccgaaagauauugccaauuccuucuaugaggucuuugagaagcauccccacuucaucgacguguuuguacacuucgggaucgcgcaaucuagcacuaggggagguucccggguugaaggcauuuuugcaggacucuucaugaacgccuacggggcuggccaggugaugcugcgcugggguguccuugccaaaucagugaagaauauaaugcuggggcaugcaagugugcaggcugagauggaacaggucguugagguguacgaauaugcccaaaaguugggaggcgaggcgggcuuuuaccacauccucaacaauccuaaagccagccuguuaucucugacccaguucccacauuuuuccucaguagugcucgggaacgcagcuggacuugguauuaugggcgaguaucgagggacacccagaaaccaggaccuguacgaugccgcuaaggccuaugcagaacaguugaaagagaauggagucaucaacuacagcgugcuagaccugacugccgaggaacucgaagcuauaaagcaccaacugaauccuaaagauaacgacguugagcuuugaggacuaguggaagcauuuuccuggcugauuaaaagaaauuacucagcuauggucaucuguuccuguuagaaggcuaugcagcauauuauauacuaugcgcauguuaugaaaugcauaauaaaaaauuuuaaaaaaucuaaaagaucuaaaaaaaaaaaaaaaaaaaaaaaaaaaaaaaaaaaaaaaaaaaaaaaaaaaaaaaaaaaaaaaaugcaucccccccccccccccccccccccccccccccaaaggcucuuuucagagccaccagaauu

SEQ ID NO: 10451 - RNA, 1550 nt, Artificial Sequence
  mRNA product Design h-3 comprising derived and/or modified sequence from HRSV(A2)__P03418.1__N (opt4)
gggagacccgugacccggaaguuguacggcuacgcgacuuucccucccacaaacccucgcgcccuuccuuuccuacuugggcccggcagaaagcuuaccauggcccugagcaaggugaagcugaacgacacccugaacaaggaccagcugcugagcagcagcaaguacaccauccagagaagcaccggcgacagcaucgacacccccaacuacgacgugcagaagcacaucaacaagcugugcggcaugcugcugaucaccgaggacgccaaccacaaguucaccggccugaucggcaugcuguacgccaugagcagacugggcagagaggacaccaucaagauccugagagacgccggcuaccacgugaaggccaacggcguggacgugaccacccacagacaggacaucaacggcaaggagaugaaguucgaggugcugacccuggccagccugaccaccgagauccagaucaacaucgagaucgagagcagaaagagcuacaagaagaugcugaaggagaugggcgagguggcccccgaguacagacacgacagccccgacugcggcaugaucauccugugcaucgccgcccuggugaucaccaagcuggccgccggcgacagaagcggccugaccgccgugaucagaagagccaacaacgugcugaagaacgagaugaagagauacaagggccugcugcccaaggacaucgccaacagcuucuacgagguguucgagaagcacccccacuucaucgacguguucgugcacuucggcaucgcccagagcagcaccagaggcggcagcagaguggagggcaucuucgccggccuguucaugaacgccuacggcgccggccaggugaugcugagauggggcgugcuggccaagagcgugaagaacaucaugcugggccacgccagcgugcaggccgagauggagcaggugguggagguguacgaguacgcccagaagcugggcggcgaggccggcuucuaccacauccugaacaaccccaaggccagccugcugagccugacccaguucccccacuucagcagcguggugcugggcaacgccgccggccugggcaucaugggcgaguacagaggcacccccagaaaccaggaccuguacgacgccgccaaggccuacgccgagcagcugaaggagaacggcgugaucaacuacagcgugcuggaccugaccgccgaggagcuggaggccaucaagcaccagcugaaccccaaggacaacgacguggagcugugaggacuaguggaagcauuuuccuggcugauuaaaagaaauuacucagcuauggucaucuguuccuguuagaaggcuaugcagcauauuauauacuaugcgcauguuaugaaaugcauaauaaaaaauuuuaaaaaaucuaaaagaucuaaaaaaaaaaaaaaaaaaaaaaaaaaaaaaaaaaaaaaaaaaaaaaaaaaaaaaaaaaaaaaaaugcaucccccccccccccccccccccccccccccccaaaggcucuuuucagagccaccagaauu

SEQ ID NO: 10452 - RNA, 1550 nt, Artificial Sequence
  mRNA product Design h-3 comprising derived and/or modified sequence from HRSV(A2)__P03418.1__N (opt5)
gggagacccgugacccggaaguuguacggcuacgcgacuuucccucccacaaacccucgcgcccuuccuuuccuacuugggcccggcagaaagcuuaccauggcccugagcaaggugaaacucaacgacacccugaauaaggaucagcuucuguccucuagcaaauacacaauccaaagauccacgggcgacucuauugauacccccaacuaugacguccagaagcacaucaauaaacucugcgggaugcugcuuauuacagaggaugcuaaccauaaguucaccggacugaucggcaugcucuacgccaugagccggcuggggcgcgaagacacaauuaagauccugagagaugcgggauaucacguuaaagcuaauggcguggacgugaccacacaucggcaggauaucaacgggaaggagaugaaauuugaaguccucacccuggccucccuuacgaccgagauucagaucaauauugaaaucgagucucgcaagagcuacaaaaagaugcugaaggagaugggagaaguggccccugaguauagacacgacuccccggauuguggcaugauuauccucugcauugcugcccugguuaucacaaaacuugcugccggcgaccggagcgggcugaccgcggugauccgcagagccaacaauguccucaagaacgaaaugaaacgguacaagggacugcugcccaaagauauugcuaauucuuucuaugagguguuugagaagcauccucacuucaucgacguuuuugugcacuucggcauugcccaauccagcacacgcgggggaucuagagucgaaggcaucuuugcuggacucuucaugaacgccuacggggcgggccaggugaugcugcgguggggcgugcuugccaaauccgucaagaauauuaugcuggggcaugcuagcguucaggccgagauggaacaggugguggaggucuacgaauaugcucaaaagcucggaggcgaggccggguuuuaccacauccugaacaaucccaaagccucucuucugucccucacccaguucccucauuuuagcuccgugguucugggaaacgcugcgggccuggggaucaugggagaguaucgcggcacgcccagaaaccaggaccucuacgaugccgcuaaggccuaugccgaacagcugaaagagaauggcgugauuaacuacucuguccuugaccugacagcugaggaacucgaagccaucaagcaccaacugaauccuaaagauaacgacguggagcuuugaggacuaguggaagcauuuuccuggcugauuaaaagaaauuacucagcuauggucaucuguuccuguuagaaggcuaugcagcauauuauauacuaugcgcauguuaugaaaugcauaauaaaaaauuuuaaaaaaucuaaaagaucuaaaaaaaaaaaaaaaaaaaaaaaaaaaaaaaaaaaaaaaaaaaaaaaaaaaaaaaaaaaaaaaaugcaucccccccccccccccccccccccccccccccaaaggcucuuuucagagccaccagaauu

SEQ ID NO: 10453 - RNA, 1550 nt, Artificial Sequence
  mRNA product Design h-3 comprising derived and/or modified sequence from HRSV(A2)__P03418.1__N (opt6)
gggagacccgugacccggaaguuguacggcuacgcgacuuucccucccacaaacccucgcgcccuuccuuuccuacuugggcccggcagaaagcuuaccauggcacuaagcaaagucaaauuaaacgacacauuaaacaaagaccaacucuuaucaucaucaaaauacacaauacaaagaagcaccggagacaguaucgacacaccaaacuaugacguccaaaaacauauaaauaaauuaugcggcaugcucuuaaucacagaagacgccaaccauaaauuuacaggauuaauaggaauguuauaugcaaugucacgacuagguagagaagacacaauaaaaauacuaagagacgcaggcuaucacguaaaagcaaauggaguagacguaaccacacacagacaagacauaaauggaaaagaaaugaaauuugaaguauuaacacuagcaucacuaacaacagaaauacaaaucaacauagaaauagaaucaagaaaaagcuacaaaaaaauguuaaaagaaaugggagaagucgcaccagaauauagacaugauucaccagacugcggaaugauaauacuaugcauagcagcccuaguaauuacaaaacuagcagcaggagacagaagcggauuaacagcaguaauaagaagagcaaacaacguacuaaaaaacgaaaugaaaagauauaaaggauuauuaccaaaagacauagcaaacucauucuaugaaguauucgaaaaacacccccacuuuauagacgucuucguacacuucggaauagcccaaucauccacaagaggaggaucaagagucgaaggaauauucgcaggauuauucaugaacgcauauggcgcaggacaaguaaugcuaagauggggaguacuagcaaaauccgucaaaaacauaaugcuaggacacgcaucaguucaagcagaaauggaacaaguaguagaaguauacgaauacgcccaaaaacuaggaggagaagcaggauucuaccacauacuaaauaauccaaaagcaucacuacuaagccuaacccaauuuccccacuucucaaguguaguauuaggaaaugcagcuggacuaggaauaaugggagaauacagaggaacaccaagaaaccaagacuuauacgacgcagcaaaagcauacgcagagcaacuuaaagaaaacggaguaauaaacuauagcguacuagacuuaacagcagaagaacuggaagcaauaaaacaucaauuaaacccgaaagacaaugacguagaauuauaaggacuaguggaagcauuuuccuggcugauuaaaagaaauuacucagcuauggucaucuguuccuguuagaaggcuaugcagcauauuauauacuaugcgcauguuaugaaaugcauaauaaaaaauuuuaaaaaaucuaaaagaucuaaaaaaaaaaaaaaaaaaaaaaaaaaaaaaaaaaaaaaaaaaaaaaaaaaaaaaaaaaaaaaaaugcaucccccccccccccccccccccccccccccccaaaggcucuuuucagagccaccagaauu

SEQ ID NO: 10454 - RNA, 1550 nt, Artificial Sequence
  mRNA product Design h-3 comprising derived and/or modified sequence from HRSV(A2)__P03418.1__N (opt11)
gggagacccgugacccggaaguuguacggcuacgcgacuuucccucccacaaacccucgcgcccuuccuuuccuacuugggcccggcagaaagcuuaccauggcacucucgaaaguaaaacucaacgacacccucaacaaagaccaacuccuuuccagcuccaaauacaccauccaacgauccaccggagacuccaucgacacgcccaacuacgacguccagaaacacaucaacaagcucugcggaaugcuacuaaucaccgaggacgccaaccacaaauucacaggacuuauagggaugcucuacgccaugucccgccucggacgcgaagacacaauaaaaauccuacgagacgccggcuaccacguaaaggcaaacggcgucgacgucaccacacacagacaagacaucaacggaaaggaaaugaaauucgaaguccucacccucgccagccuaaccaccgagauccaaaucaacaucgaaaucgaaucacgcaaauccuacaagaaaaugcucaaagaaaugggagaagucgcccccgaauaccgucacgacucgcccgacugcggcaugauaauccuaugcaucgccgcacucgucauaaccaaacucgccgccggugaccgaucaggacugacagcagucauccgccgagcaaacaacgugcucaaaaacgaaaugaaacgcuacaaaggccuacuccccaaagacaucgccaacuccuucuacgaagucuucgaaaaacacccacacuucaucgacgucuucguccacuucggcaucgcacaaucaucaaccagaggcggcagccgcguugaaggcaucuucgcaggacucuuuaugaacgccuacggcgccggccaagucaugcuccgcuggggcguccuggcaaaaagcgucaaaaacaucaugcuaggccacgcuagcguccaagccgaaauggaacaagucgucgaaguuuacgaguacgcacaaaaacucggcggcgaagcaggcuucuaccacauccuaaacaaccccaaagccucccugcuaucacucacccaauucccccacuucuccagcgucguccucggcaacgccgcaggacuaggcaucaugggagaauaccgcgggacaccgcgcaaccaagaccucuacgacgccgccaaagccuacgccgaacaacucaaagaaaacggcgucauaaacuacucaguccucgaccucaccgccgaagaacucgaagccaucaaacaccaacucaacccaaaagacaacgacgucgaauuauaaggacuaguggaagcauuuuccuggcugauuaaaagaaauuacucagcuauggucaucuguuccuguuagaaggcuaugcagcauauuauauacuaugcgcauguuaugaaaugcauaauaaaaaauuuuaaaaaaucuaaaagaucuaaaaaaaaaaaaaaaaaaaaaaaaaaaaaaaaaaaaaaaaaaaaaaaaaaaaaaaaaaaaaaaaugcaucccccccccccccccccccccccccccccccaaaggcucuuuucagagccaccagaauu

SEQ ID NO: 10455 - RNA, 1613 nt, Artificial Sequence
  mRNA product Design h-4 comprising derived and/or modified sequence from HRSV(A2)__P03418.1__N (wt)
gggagagggcgcuuggcuugcaaggacccugagcugcggcauugaagcacacccaacccaacucgacugaagucagccucacugaaccggaucugagaaucuucucucucugggcuugccagggcucuccgaaccuagcuagcauccucuucaauuccaacuagaaagcuuaccauggcucuuagcaaagucaaguugaaugauacacucaacaaagaucaacuucugucauccagcaaauacaccauccaacggagcacaggagauaguauugauacuccuaauuaugaugugcagaaacacaucaauaaguuauguggcauguuauuaaucacagaagaugcuaaucauaaauucacuggguuaauagguauguuauaugcgaugucuagguuaggaagagaagacaccauaaaaauacucagagaugcgggauaucauguaaaagcaaauggaguagauguaacaacacaucgucaagacauuaauggaaaagaaaugaaauuugaaguguuaacauuggcaagcuuaacaacugaaauucaaaucaacauugagauagaaucuagaaaauccuacaaaaaaaugcuaaaagaaaugggagagguagcuccagaauacaggcaugacucuccugauugugggaugauaauauuauguauagcagcauuaguaauaacuaaauuagcagcaggggacagaucuggucuuacagccgugauuaggagagcuaauaauguccuaaaaaaugaaaugaaacguuacaaaggcuuacuacccaaggacauagccaacagcuucuaugaaguguuugaaaaacauccccacuuuauagauguuuuuguucauuuugguauagcacaaucuucuaccagagguggcaguagaguugaagggauuuuugcaggauuguuuaugaaugccuauggugcagggcaagugauguuacgguggggagucuuagcaaaaucaguuaaaaauauuauguuaggacaugcuagugugcaagcagaaauggaacaaguuguugagguuuaugaauaugcccaaaaauuggguggugaagcaggauucuaccauauauugaacaacccaaaagcaucauuauuaucuuugacucaauuuccucacuucuccaguguaguauuaggcaaugcugcuggccuaggcauaaugggagaguacagagguacaccgaggaaucaagaucuauaugaugcagcaaaggcauaugcugaacaacucaaagaaaauggugugauuaacuacaguguacuagacuugacagcagaagaacuagaggcuaucaaacaucagcuuaauccaaaagauaaugauguagagcuuugaggacuaguaauaaggaaacuguaugaaugucugugggcaggaagugaagagauccuucuguaaagguuuuuggaauuaugucugcugaauaauaaacuuuuuugaaauaauaaaucugguagaaaaaugagaucuaaaaaaaaaaaaaaaaaaaaaaaaaaaaaaaaaaaaaaaaaaaaaaaaaaaaaaaaaaaaaaaaugcaucccccccccccccccccccccccccccccccaaaggcucuuuucagagccaccagaauu

SEQ ID NO: 10456 - RNA, 1613 nt, Artificial Sequence
  mRNA product Design h-4 comprising derived and/or modified sequence from HRSV(A2)__P03418.1__N (opt1)
gggagagggcgcuuggcuugcaaggacccugagcugcggcauugaagcacacccaacccaacucgacugaagucagccucacugaaccggaucugagaaucuucucucucugggcuugccagggcucuccgaaccuagcuagcauccucuucaauuccaacuagaaagcuuaccauggcccugagcaaggugaagcucaacgacacccugaacaaggaccagcugcucuccagcuccaaguacaccauccagcgcagcaccggcgacuccaucgacacccccaacuacgacguccagaagcacaucaacaagcugugcgggaugcugcucaucaccgaggacgccaaccacaaguucaccggccugaucgggaugcuguacgcgaugagccggcucggccgcgaggacacgaucaagauccugcgggacgccggguaccacgugaaggccaacggcguggacgucaccacccaccgccaggacaucaacggcaaggagaugaaguucgaggugcugacccucgccucccugacgaccgagauccagaucaacaucgagaucgagagccggaaguccuacaagaagaugcugaaggagaugggggagguggccccggaguaccgccacgacagccccgacugcggcaugaucauccucugcaucgcggcccuggucaucaccaagcuggccgccggggaccgguccggccucaccgcggugauccgccgggccaacaacgugcugaagaacgagaugaagcgcuacaaggggcugcuccccaaggacaucgccaacagcuucuacgaggucuucgagaagcacccccacuucaucgacguguucgugcacuucggcaucgcccaguccagcacgcggggcgggucccgcgucgagggcaucuucgccgggcuguucaugaacgcguacggcgccggccaggugaugcugcgguggggcgugcucgccaagagcgucaagaacaucaugcuggggcacgccuccgugcaggccgagauggagcaggucguggagguguacgaguacgcgcagaagcucgggggcgaggccggguucuaccacauccugaacaacccgaaggccagccugcugucccucacccaguucccccacuucagcagcgugguccugggcaacgccgccggccuggggaucaugggcgaguaccgcgggacgccccggaaccaggaccucuacgacgcggccaaggccuacgccgagcagcugaaggagaacggcgugaucaacuacuccgugcuggaccucaccgccgaggagcuggaggcgaucaagcaccagcugaaccccaaggacaacgacgucgagcucugaggacuaguaauaaggaaacuguaugaaugucugugggcaggaagugaagagauccuucuguaaagguuuuuggaauuaugucugcugaauaauaaacuuuuuugaaauaauaaaucugguagaaaaaugagaucuaaaaaaaaaaaaaaaaaaaaaaaaaaaaaaaaaaaaaaaaaaaaaaaaaaaaaaaaaaaaaaaaugcaucccccccccccccccccccccccccccccccaaaggcucuuuucagagccaccagaauu

SEQ ID NO: 10457 - RNA, 1613 nt, Artificial Sequence
  mRNA product Design h-4 comprising derived and/or modified sequence from HRSV(A2)__P03418.1__N (opt2)
gggagagggcgcuuggcuugcaaggacccugagcugcggcauugaagcacacccaacccaacucgacugaagucagccucacugaaccggaucugagaaucuucucucucugggcuugccagggcucuccgaaccuagcuagcauccucuucaauuccaacuagaaagcuuaccauggcccucuccaaggucaagcucaacgacacccucaacaaggaccagcuccucuccuccuccaaguacaccauccagcgcuccaccggcgacuccaucgacacccccaacuacgacguccagaagcacaucaacaagcucugcggcaugcuccucaucaccgaggacgccaaccacaaguucaccggccucaucggcaugcucuacgccaugucccgccucggccgcgaggacaccaucaagauccuccgcgacgccggcuaccacgucaaggccaacggcgucgacgucaccacccaccgccaggacaucaacggcaaggagaugaaguucgagguccucacccucgccucccucaccaccgagauccagaucaacaucgagaucgagucccgcaaguccuacaagaagaugcucaaggagaugggcgaggucgcccccgaguaccgccacgacucccccgacugcggcaugaucauccucugcaucgccgcccucgucaucaccaagcucgccgccggcgaccgcuccggccucaccgccgucauccgccgcgccaacaacguccucaagaacgagaugaagcgcuacaagggccuccuccccaaggacaucgccaacuccuucuacgaggucuucgagaagcacccccacuucaucgacgucuucguccacuucggcaucgcccaguccuccacccgcggcggcucccgcgucgagggcaucuucgccggccucuucaugaacgccuacggcgccggccaggucaugcuccgcuggggcguccucgccaaguccgucaagaacaucaugcucggccacgccuccguccaggccgagauggagcaggucgucgaggucuacgaguacgcccagaagcucggcggcgaggccggcuucuaccacauccucaacaaccccaaggccucccuccucucccucacccaguucccccacuucuccuccgucguccucggcaacgccgccggccucggcaucaugggcgaguaccgcggcaccccccgcaaccaggaccucuacgacgccgccaaggccuacgccgagcagcucaaggagaacggcgucaucaacuacuccguccucgaccucaccgccgaggagcucgaggccaucaagcaccagcucaaccccaaggacaacgacgucgagcucugaggacuaguaauaaggaaacuguaugaaugucugugggcaggaagugaagagauccuucuguaaagguuuuuggaauuaugucugcugaauaauaaacuuuuuugaaauaauaaaucugguagaaaaaugagaucuaaaaaaaaaaaaaaaaaaaaaaaaaaaaaaaaaaaaaaaaaaaaaaaaaaaaaaaaaaaaaaaaugcaucccccccccccccccccccccccccccccccaaaggcucuuuucagagccaccagaauu

SEQ ID NO: 10458 - RNA, 1613 nt, Artificial Sequence
  mRNA product Design h-4 comprising derived and/or modified sequence from HRSV(A2)__P03418.1__N (opt3)
gggagagggcgcuuggcuugcaaggacccugagcugcggcauugaagcacacccaacccaacucgacugaagucagccucacugaaccggaucugagaaucuucucucucugggcuugccagggcucuccgaaccuagcuagcauccucuucaauuccaacuagaaagcuuaccauggcccugagcaaggugaaacucaacgacacccuuaauaaggaucagcuguuguccucuucaaaauacacaauccaaagaaguacuggcgacagcauugauacgcccaacuaugacguccagaagcacauaaauaaauuaugcgggaugcugcuaaucaccgaggaugcuaaccauaaguucacaggacucauugguaugcuguacgcaauguccaggcuuggccgggaagacacuaucaagauucugcgcgaugccggguaucacguuaaagcgaauggaguggacguaaccacacaucgacaggauaucaacggcaaggagaugaaauuugaaguguugacccucgcuucucugacuacagagauacagaucaauauugaaaucgagucgcguaagucauacaaaaagaugcugaaggagaugggugaagucgccccugaguauagacacgacagcccagauugugggaugauuauccucugcauagcagccuuagugauuaccaaacuggcugcaggagacaggaguggccuuacggccguuauccggcgcgcuaacaauguguugaagaacgaaaugaaaagauacaagggccugcuaccgaaagauauugccaauuccuucuaugaggucuuugagaagcauccccacuucaucgacguguuuguacacuucgggaucgcgcaaucuagcacuaggggagguucccggguugaaggcauuuuugcaggacucuucaugaacgccuacggggcuggccaggugaugcugcgcugggguguccuugccaaaucagugaagaauauaaugcuggggcaugcaagugugcaggcugagauggaacaggucguugagguguacgaauaugcccaaaaguugggaggcgaggcgggcuuuuaccacauccucaacaauccuaaagccagccuguuaucucugacccaguucccacauuuuuccucaguagugcucgggaacgcagcuggacuugguauuaugggcgaguaucgagggacacccagaaaccaggaccuguacgaugccgcuaaggccuaugcagaacaguugaaagagaauggagucaucaacuacagcgugcuagaccugacugccgaggaacucgaagcuauaaagcaccaacugaauccuaaagauaacgacguugagcuuugaggacuaguaauaaggaaacuguaugaaugucugugggcaggaagugaagagauccuucuguaaagguuuuuggaauuaugucugcugaauaauaaacuuuuuugaaauaauaaaucugguagaaaaaugagaucuaaaaaaaaaaaaaaaaaaaaaaaaaaaaaaaaaaaaaaaaaaaaaaaaaaaaaaaaaaaaaaaaugcaucccccccccccccccccccccccccccccccaaaggcucuuuucagagccaccagaauu

SEQ ID NO: 10459 - RNA, 1613 nt, Artificial Sequence
  mRNA product Design h-4 comprising derived and/or modified sequence from HRSV(A2)__P03418.1__N (opt4)
gggagagggcgcuuggcuugcaaggacccugagcugcggcauugaagcacacccaacccaacucgacugaagucagccucacugaaccggaucugagaaucuucucucucugggcuugccagggcucuccgaaccuagcuagcauccucuucaauuccaacuagaaagcuuaccauggcccugagcaaggugaagcugaacgacacccugaacaaggaccagcugcugagcagcagcaaguacaccauccagagaagcaccggcgacagcaucgacacccccaacuacgacgugcagaagcacaucaacaagcugugcggcaugcugcugaucaccgaggacgccaaccacaaguucaccggccugaucggcaugcuguacgccaugagcagacugggcagagaggacaccaucaagauccugagagacgccggcuaccacgugaaggccaacggcguggacgugaccacccacagacaggacaucaacggcaaggagaugaaguucgaggugcugacccuggccagccugaccaccgagauccagaucaacaucgagaucgagagcagaaagagcuacaagaagaugcugaaggagaugggcgagguggcccccgaguacagacacgacagccccgacugcggcaugaucauccugugcaucgccgcccuggugaucaccaagcuggccgccggcgacagaagcggccugaccgccgugaucagaagagccaacaacgugcugaagaacgagaugaagagauacaagggccugcugcccaaggacaucgccaacagcuucuacgagguguucgagaagcacccccacuucaucgacguguucgugcacuucggcaucgcccagagcagcaccagaggcggcagcagaguggagggcaucuucgccggccuguucaugaacgccuacggcgccggccaggugaugcugagauggggcgugcuggccaagagcgugaagaacaucaugcugggccacgccagcgugcaggccgagauggagcaggugguggagguguacgaguacgcccagaagcugggcggcgaggccggcuucuaccacauccugaacaaccccaaggccagccugcugagccugacccaguucccccacuucagcagcguggugcugggcaacgccgccggccugggcaucaugggcgaguacagaggcacccccagaaaccaggaccuguacgacgccgccaaggccuacgccgagcagcugaaggagaacggcgugaucaacuacagcgugcuggaccugaccgccgaggagcuggaggccaucaagcaccagcugaaccccaaggacaacgacguggagcugugaggacuaguaauaaggaaacuguaugaaugucugugggcaggaagugaagagauccuucuguaaagguuuuuggaauuaugucugcugaauaauaaacuuuuuugaaauaauaaaucugguagaaaaaugagaucuaaaaaaaaaaaaaaaaaaaaaaaaaaaaaaaaaaaaaaaaaaaaaaaaaaaaaaaaaaaaaaaaugcaucccccccccccccccccccccccccccccccaaaggcucuuuucagagccaccagaauu

SEQ ID NO: 10460 - RNA, 1613 nt, Artificial Sequence
  mRNA product Design h-4 comprising derived and/or modified sequence from HRSV(A2)__P03418.1__N (opt5)
gggagagggcgcuuggcuugcaaggacccugagcugcggcauugaagcacacccaacccaacucgacugaagucagccucacugaaccggaucugagaaucuucucucucugggcuugccagggcucuccgaaccuagcuagcauccucuucaauuccaacuagaaagcuuaccauggcccugagcaaggugaaacucaacgacacccugaauaaggaucagcuucuguccucuagcaaauacacaauccaaagauccacgggcgacucuauugauacccccaacuaugacguccagaagcacaucaauaaacucugcgggaugcugcuuauuacagaggaugcuaaccauaaguucaccggacugaucggcaugcucuacgccaugagccggcuggggcgcgaagacacaauuaagauccugagagaugcgggauaucacguuaaagcuaauggcguggacgugaccacacaucggcaggauaucaacgggaaggagaugaaauuugaaguccucacccuggccucccuuacgaccgagauucagaucaauauugaaaucgagucucgcaagagcuacaaaaagaugcugaaggagaugggagaaguggccccugaguauagacacgacuccccggauuguggcaugauuauccucugcauugcugcccugguuaucacaaaacuugcugccggcgaccggagcgggcugaccgcggugauccgcagagccaacaauguccucaagaacgaaaugaaacgguacaagggacugcugcccaaagauauugcuaauucuuucuaugagguguuugagaagcauccucacuucaucgacguuuuugugcacuucggcauugcccaauccagcacacgcgggggaucuagagucgaaggcaucuuugcuggacucuucaugaacgccuacggggcgggccaggugaugcugcgguggggcgugcuugccaaauccgucaagaauauuaugcuggggcaugcuagcguucaggccgagauggaacaggugguggaggucuacgaauaugcucaaaagcucggaggcgaggccggguuuuaccacauccugaacaaucccaaagccucucuucugucccucacccaguucccucauuuuagcuccgugguucugggaaacgcugcgggccuggggaucaugggagaguaucgcggcacgcccagaaaccaggaccucuacgaugccgcuaaggccuaugccgaacagcugaaagagaauggcgugauuaacuacucuguccuugaccugacagcugaggaacucgaagccaucaagcaccaacugaauccuaaagauaacgacguggagcuuugaggacuaguaauaaggaaacuguaugaaugucugugggcaggaagugaagagauccuucuguaaagguuuuuggaauuaugucugcugaauaauaaacuuuuuugaaauaauaaaucugguagaaaaaugagaucuaaaaaaaaaaaaaaaaaaaaaaaaaaaaaaaaaaaaaaaaaaaaaaaaaaaaaaaaaaaaaaaaugcaucccccccccccccccccccccccccccccccaaaggcucuuuucagagccaccagaauu

SEQ ID NO: 10461 - RNA, 1613 nt, Artificial Sequence
  mRNA product Design h-4 comprising derived and/or modified sequence from HRSV(A2)__P03418.1__N (opt6)
gggagagggcgcuuggcuugcaaggacccugagcugcggcauugaagcacacccaacccaacucgacugaagucagccucacugaaccggaucugagaaucuucucucucugggcuugccagggcucuccgaaccuagcuagcauccucuucaauuccaacuagaaagcuuaccauggcacuaagcaaagucaaauuaaacgacacauuaaacaaagaccaacucuuaucaucaucaaaauacacaauacaaagaagcaccggagacaguaucgacacaccaaacuaugacguccaaaaacauauaaauaaauuaugcggcaugcucuuaaucacagaagacgccaaccauaaauuuacaggauuaauaggaauguuauaugcaaugucacgacuagguagagaagacacaauaaaaauacuaagagacgcaggcuaucacguaaaagcaaauggaguagacguaaccacacacagacaagacauaaauggaaaagaaaugaaauuugaaguauuaacacuagcaucacuaacaacagaaauacaaaucaacauagaaauagaaucaagaaaaagcuacaaaaaaauguuaaaagaaaugggagaagucgcaccagaauauagacaugauucaccagacugcggaaugauaauacuaugcauagcagcccuaguaauuacaaaacuagcagcaggagacagaagcggauuaacagcaguaauaagaagagcaaacaacguacuaaaaaacgaaaugaaaagauauaaaggauuauuaccaaaagacauagcaaacucauucuaugaaguauucgaaaaacacccccacuuuauagacgucuucguacacuucggaauagcccaaucauccacaagaggaggaucaagagucgaaggaauauucgcaggauuauucaugaacgcauauggcgcaggacaaguaaugcuaagauggggaguacuagcaaaauccgucaaaaacauaaugcuaggacacgcaucaguucaagcagaaauggaacaaguaguagaaguauacgaauacgcccaaaaacuaggaggagaagcaggauucuaccacauacuaaauaauccaaaagcaucacuacuaagccuaacccaauuuccccacuucucaaguguaguauuaggaaaugcagcuggacuaggaauaaugggagaauacagaggaacaccaagaaaccaagacuuauacgacgcagcaaaagcauacgcagagcaacuuaaagaaaacggaguaauaaacuauagcguacuagacuuaacagcagaagaacuggaagcaauaaaacaucaauuaaacccgaaagacaaugacguagaauuauaaggacuaguaauaaggaaacuguaugaaugucugugggcaggaagugaagagauccuucuguaaagguuuuuggaauuaugucugcugaauaauaaacuuuuuugaaauaauaaaucugguagaaaaaugagaucuaaaaaaaaaaaaaaaaaaaaaaaaaaaaaaaaaaaaaaaaaaaaaaaaaaaaaaaaaaaaaaaaugcaucccccccccccccccccccccccccccccccaaaggcucuuuucagagccaccagaauu

SEQ ID NO: 10462 - RNA, 1613 nt, Artificial Sequence
  mRNA product Design h-4 comprising derived and/or modified sequence from HRSV(A2)__P03418.1__N (opt11)
gggagagggcgcuuggcuugcaaggacccugagcugcggcauugaagcacacccaacccaacucgacugaagucagccucacugaaccggaucugagaaucuucucucucugggcuugccagggcucuccgaaccuagcuagcauccucuucaauuccaacuagaaagcuuaccauggcacucucgaaaguaaaacucaacgacacccucaacaaagaccaacuccuuuccagcuccaaauacaccauccaacgauccaccggagacuccaucgacacgcccaacuacgacguccagaaacacaucaacaagcucugcggaaugcuacuaaucaccgaggacgccaaccacaaauucacaggacuuauagggaugcucuacgccaugucccgccucggacgcgaagacacaauaaaaauccuacgagacgccggcuaccacguaaaggcaaacggcgucgacgucaccacacacagacaagacaucaacggaaaggaaaugaaauucgaaguccucacccucgccagccuaaccaccgagauccaaaucaacaucgaaaucgaaucacgcaaauccuacaagaaaaugcucaaagaaaugggagaagucgcccccgaauaccgucacgacucgcccgacugcggcaugauaauccuaugcaucgccgcacucgucauaaccaaacucgccgccggugaccgaucaggacugacagcagucauccgccgagcaaacaacgugcucaaaaacgaaaugaaacgcuacaaaggccuacuccccaaagacaucgccaacuccuucuacgaagucuucgaaaaacacccacacuucaucgacgucuucguccacuucggcaucgcacaaucaucaaccagaggcggcagccgcguugaaggcaucuucgcaggacucuuuaugaacgccuacggcgccggccaagucaugcuccgcuggggcguccuggcaaaaagcgucaaaaacaucaugcuaggccacgcuagcguccaagccgaaauggaacaagucgucgaaguuuacgaguacgcacaaaaacucggcggcgaagcaggcuucuaccacauccuaaacaaccccaaagccucccugcuaucacucacccaauucccccacuucuccagcgucguccucggcaacgccgcaggacuaggcaucaugggagaauaccgcgggacaccgcgcaaccaagaccucuacgacgccgccaaagccuacgccgaacaacucaaagaaaacggcgucauaaacuacucaguccucgaccucaccgccgaagaacucgaagccaucaaacaccaacucaacccaaaagacaacgacgucgaauuauaaggacuaguaauaaggaaacuguaugaaugucugugggcaggaagugaagagauccuucuguaaagguuuuuggaauuaugucugcugaauaauaaacuuuuuugaaauaauaaaucugguagaaaaaugagaucuaaaaaaaaaaaaaaaaaaaaaaaaaaaaaaaaaaaaaaaaaaaaaaaaaaaaaaaaaaaaaaaaugcaucccccccccccccccccccccccccccccccaaaggcucuuuucagagccaccagaauu

SEQ ID NO: 10463 - RNA, 1629 nt, Artificial Sequence
  mRNA product Design h-5 comprising derived and/or modified sequence from HRSV(A2)__P03418.1__N (wt)
gggagagggcgcuuggcuugcaaggacccugagcugcggcauugaagcacacccaacccaacucgacugaagucagccucacugaaccggaucugagaaucuucucucucugggcuugccagggcucuccgaaccuagcuagcauccucuucaauuccaacuagaaagcuuaccauggcucuuagcaaagucaaguugaaugauacacucaacaaagaucaacuucugucauccagcaaauacaccauccaacggagcacaggagauaguauugauacuccuaauuaugaugugcagaaacacaucaauaaguuauguggcauguuauuaaucacagaagaugcuaaucauaaauucacuggguuaauagguauguuauaugcgaugucuagguuaggaagagaagacaccauaaaaauacucagagaugcgggauaucauguaaaagcaaauggaguagauguaacaacacaucgucaagacauuaauggaaaagaaaugaaauuugaaguguuaacauuggcaagcuuaacaacugaaauucaaaucaacauugagauagaaucuagaaaauccuacaaaaaaaugcuaaaagaaaugggagagguagcuccagaauacaggcaugacucuccugauugugggaugauaauauuauguauagcagcauuaguaauaacuaaauuagcagcaggggacagaucuggucuuacagccgugauuaggagagcuaauaauguccuaaaaaaugaaaugaaacguuacaaaggcuuacuacccaaggacauagccaacagcuucuaugaaguguuugaaaaacauccccacuuuauagauguuuuuguucauuuugguauagcacaaucuucuaccagagguggcaguagaguugaagggauuuuugcaggauuguuuaugaaugccuauggugcagggcaagugauguuacgguggggagucuuagcaaaaucaguuaaaaauauuauguuaggacaugcuagugugcaagcagaaauggaacaaguuguugagguuuaugaauaugcccaaaaauuggguggugaagcaggauucuaccauauauugaacaacccaaaagcaucauuauuaucuuugacucaauuuccucacuucuccaguguaguauuaggcaaugcugcuggccuaggcauaaugggagaguacagagguacaccgaggaaucaagaucuauaugaugcagcaaaggcauaugcugaacaacucaaagaaaauggugugauuaacuacaguguacuagacuugacagcagaagaacuagaggcuaucaaacaucagcuuaauccaaaagauaaugauguagagcuuugaggacuaguacuggcugcaucucccuuuccucuguccuccauccuucucccaggauggugaagggggaccugguacccagugauccccaccccaggauccuaaaucaugacuuaccugcuaauaaaaacucauuggaaaagugagaagaucuaaaaaaaaaaaaaaaaaaaaaaaaaaaaaaaaaaaaaaaaaaaaaaaaaaaaaaaaaaaaaaaaugcaucccccccccccccccccccccccccccccccaaaggcucuuuucagagccaccagaauu

SEQ ID NO: 10464 - RNA, 1629 nt, Artificial Sequence
  mRNA product Design h-5 comprising derived and/or modified sequence from HRSV(A2)__P03418.1__N (opt1)
gggagagggcgcuuggcuugcaaggacccugagcugcggcauugaagcacacccaacccaacucgacugaagucagccucacugaaccggaucugagaaucuucucucucugggcuugccagggcucuccgaaccuagcuagcauccucuucaauuccaacuagaaagcuuaccauggcccugagcaaggugaagcucaacgacacccugaacaaggaccagcugcucuccagcuccaaguacaccauccagcgcagcaccggcgacuccaucgacacccccaacuacgacguccagaagcacaucaacaagcugugcgggaugcugcucaucaccgaggacgccaaccacaaguucaccggccugaucgggaugcuguacgcgaugagccggcucggccgcgaggacacgaucaagauccugcgggacgccggguaccacgugaaggccaacggcguggacgucaccacccaccgccaggacaucaacggcaaggagaugaaguucgaggugcugacccucgccucccugacgaccgagauccagaucaacaucgagaucgagagccggaaguccuacaagaagaugcugaaggagaugggggagguggccccggaguaccgccacgacagccccgacugcggcaugaucauccucugcaucgcggcccuggucaucaccaagcuggccgccggggaccgguccggccucaccgcggugauccgccgggccaacaacgugcugaagaacgagaugaagcgcuacaaggggcugcuccccaaggacaucgccaacagcuucuacgaggucuucgagaagcacccccacuucaucgacguguucgugcacuucggcaucgcccaguccagcacgcggggcgggucccgcgucgagggcaucuucgccgggcuguucaugaacgcguacggcgccggccaggugaugcugcgguggggcgugcucgccaagagcgucaagaacaucaugcuggggcacgccuccgugcaggccgagauggagcaggucguggagguguacgaguacgcgcagaagcucgggggcgaggccggguucuaccacauccugaacaacccgaaggccagccugcugucccucacccaguucccccacuucagcagcgugguccugggcaacgccgccggccuggggaucaugggcgaguaccgcgggacgccccggaaccaggaccucuacgacgcggccaaggccuacgccgagcagcugaaggagaacggcgugaucaacuacuccgugcuggaccucaccgccgaggagcuggaggcgaucaagcaccagcugaaccccaaggacaacgacgucgagcucugaggacuaguacuggcugcaucucccuuuccucuguccuccauccuucucccaggauggugaagggggaccugguacccagugauccccaccccaggauccuaaaucaugacuuaccugcuaauaaaaacucauuggaaaagugagaagaucuaaaaaaaaaaaaaaaaaaaaaaaaaaaaaaaaaaaaaaaaaaaaaaaaaaaaaaaaaaaaaaaaugcaucccccccccccccccccccccccccccccccaaaggcucuuuucagagccaccagaauu

SEQ ID NO: 10465 - RNA, 1629 nt, Artificial Sequence
  mRNA product Design h-5 comprising derived and/or modified sequence from HRSV(A2)__P03418.1__N (opt2)
gggagagggcgcuuggcuugcaaggacccugagcugcggcauugaagcacacccaacccaacucgacugaagucagccucacugaaccggaucugagaaucuucucucucugggcuugccagggcucuccgaaccuagcuagcauccucuucaauuccaacuagaaagcuuaccauggcccucuccaaggucaagcucaacgacacccucaacaaggaccagcuccucuccuccuccaaguacaccauccagcgcuccaccggcgacuccaucgacacccccaacuacgacguccagaagcacaucaacaagcucugcggcaugcuccucaucaccgaggacgccaaccacaaguucaccggccucaucggcaugcucuacgccaugucccgccucggccgcgaggacaccaucaagauccuccgcgacgccggcuaccacgucaaggccaacggcgucgacgucaccacccaccgccaggacaucaacggcaaggagaugaaguucgagguccucacccucgccucccucaccaccgagauccagaucaacaucgagaucgagucccgcaaguccuacaagaagaugcucaaggagaugggcgaggucgcccccgaguaccgccacgacucccccgacugcggcaugaucauccucugcaucgccgcccucgucaucaccaagcucgccgccggcgaccgcuccggccucaccgccgucauccgccgcgccaacaacguccucaagaacgagaugaagcgcuacaagggccuccuccccaaggacaucgccaacuccuucuacgaggucuucgagaagcacccccacuucaucgacgucuucguccacuucggcaucgcccaguccuccacccgcggcggcucccgcgucgagggcaucuucgccggccucuucaugaacgccuacggcgccggccaggucaugcuccgcuggggcguccucgccaaguccgucaagaacaucaugcucggccacgccuccguccaggccgagauggagcaggucgucgaggucuacgaguacgcccagaagcucggcggcgaggccggcuucuaccacauccucaacaaccccaaggccucccuccucucccucacccaguucccccacuucuccuccgucguccucggcaacgccgccggccucggcaucaugggcgaguaccgcggcaccccccgcaaccaggaccucuacgacgccgccaaggccuacgccgagcagcucaaggagaacggcgucaucaacuacuccguccucgaccucaccgccgaggagcucgaggccaucaagcaccagcucaaccccaaggacaacgacgucgagcucugaggacuaguacuggcugcaucucccuuuccucuguccuccauccuucucccaggauggugaagggggaccugguacccagugauccccaccccaggauccuaaaucaugacuuaccugcuaauaaaaacucauuggaaaagugagaagaucuaaaaaaaaaaaaaaaaaaaaaaaaaaaaaaaaaaaaaaaaaaaaaaaaaaaaaaaaaaaaaaaaugcaucccccccccccccccccccccccccccccccaaaggcucuuuucagagccaccagaauu

SEQ ID NO: 10466 - RNA, 1629 nt, Artificial Sequence
  mRNA product Design h-5 comprising derived and/or modified sequence from HRSV(A2)__P03418.1__N (opt3)
gggagagggcgcuuggcuugcaaggacccugagcugcggcauugaagcacacccaacccaacucgacugaagucagccucacugaaccggaucugagaaucuucucucucugggcuugccagggcucuccgaaccuagcuagcauccucuucaauuccaacuagaaagcuuaccauggcccugagcaaggugaaacucaacgacacccuuaauaaggaucagcuguuguccucuucaaaauacacaauccaaagaaguacuggcgacagcauugauacgcccaacuaugacguccagaagcacauaaauaaauuaugcgggaugcugcuaaucaccgaggaugcuaaccauaaguucacaggacucauugguaugcuguacgcaauguccaggcuuggccgggaagacacuaucaagauucugcgcgaugccggguaucacguuaaagcgaauggaguggacguaaccacacaucgacaggauaucaacggcaaggagaugaaauuugaaguguugacccucgcuucucugacuacagagauacagaucaauauugaaaucgagucgcguaagucauacaaaaagaugcugaaggagaugggugaagucgccccugaguauagacacgacagcccagauugugggaugauuauccucugcauagcagccuuagugauuaccaaacuggcugcaggagacaggaguggccuuacggccguuauccggcgcgcuaacaauguguugaagaacgaaaugaaaagauacaagggccugcuaccgaaagauauugccaauuccuucuaugaggucuuugagaagcauccccacuucaucgacguguuuguacacuucgggaucgcgcaaucuagcacuaggggagguucccggguugaaggcauuuuugcaggacucuucaugaacgccuacggggcuggccaggugaugcugcgcugggguguccuugccaaaucagugaagaauauaaugcuggggcaugcaagugugcaggcugagauggaacaggucguugagguguacgaauaugcccaaaaguugggaggcgaggcgggcuuuuaccacauccucaacaauccuaaagccagccuguuaucucugacccaguucccacauuuuuccucaguagugcucgggaacgcagcuggacuugguauuaugggcgaguaucgagggacacccagaaaccaggaccuguacgaugccgcuaaggccuaugcagaacaguugaaagagaauggagucaucaacuacagcgugcuagaccugacugccgaggaacucgaagcuauaaagcaccaacugaauccuaaagauaacgacguugagcuuugaggacuaguacuggcugcaucucccuuuccucuguccuccauccuucucccaggauggugaagggggaccugguacccagugauccccaccccaggauccuaaaucaugacuuaccugcuaauaaaaacucauuggaaaagugagaagaucuaaaaaaaaaaaaaaaaaaaaaaaaaaaaaaaaaaaaaaaaaaaaaaaaaaaaaaaaaaaaaaaaugcaucccccccccccccccccccccccccccccccaaaggcucuuuucagagccaccagaauu

SEQ ID NO: 10467 - RNA, 1629 nt, Artificial Sequence
  mRNA product Design h-5 comprising derived and/or modified sequence from HRSV(A2)__P03418.1__N (opt4)
gggagagggcgcuuggcuugcaaggacccugagcugcggcauugaagcacacccaacccaacucgacugaagucagccucacugaaccggaucugagaaucuucucucucugggcuugccagggcucuccgaaccuagcuagcauccucuucaauuccaacuagaaagcuuaccauggcccugagcaaggugaagcugaacgacacccugaacaaggaccagcugcugagcagcagcaaguacaccauccagagaagcaccggcgacagcaucgacacccccaacuacgacgugcagaagcacaucaacaagcugugcggcaugcugcugaucaccgaggacgccaaccacaaguucaccggccugaucggcaugcuguacgccaugagcagacugggcagagaggacaccaucaagauccugagagacgccggcuaccacgugaaggccaacggcguggacgugaccacccacagacaggacaucaacggcaaggagaugaaguucgaggugcugacccuggccagccugaccaccgagauccagaucaacaucgagaucgagagcagaaagagcuacaagaagaugcugaaggagaugggcgagguggcccccgaguacagacacgacagccccgacugcggcaugaucauccugugcaucgccgcccuggugaucaccaagcuggccgccggcgacagaagcggccugaccgccgugaucagaagagccaacaacgugcugaagaacgagaugaagagauacaagggccugcugcccaaggacaucgccaacagcuucuacgagguguucgagaagcacccccacuucaucgacguguucgugcacuucggcaucgcccagagcagcaccagaggcggcagcagaguggagggcaucuucgccggccuguucaugaacgccuacggcgccggccaggugaugcugagauggggcgugcuggccaagagcgugaagaacaucaugcugggccacgccagcgugcaggccgagauggagcaggugguggagguguacgaguacgcccagaagcugggcggcgaggccggcuucuaccacauccugaacaaccccaaggccagccugcugagccugacccaguucccccacuucagcagcguggugcugggcaacgccgccggccugggcaucaugggcgaguacagaggcacccccagaaaccaggaccuguacgacgccgccaaggccuacgccgagcagcugaaggagaacggcgugaucaacuacagcgugcuggaccugaccgccgaggagcuggaggccaucaagcaccagcugaaccccaaggacaacgacguggagcugugaggacuaguacuggcugcaucucccuuuccucuguccuccauccuucucccaggauggugaagggggaccugguacccagugauccccaccccaggauccuaaaucaugacuuaccugcuaauaaaaacucauuggaaaagugagaagaucuaaaaaaaaaaaaaaaaaaaaaaaaaaaaaaaaaaaaaaaaaaaaaaaaaaaaaaaaaaaaaaaaugcaucccccccccccccccccccccccccccccccaaaggcucuuuucagagccaccagaauu

SEQ ID NO: 10468 - RNA, 1629 nt, Artificial Sequence
  mRNA product Design h-5 comprising derived and/or modified sequence from HRSV(A2)__P03418.1__N (opt5)
gggagagggcgcuuggcuugcaaggacccugagcugcggcauugaagcacacccaacccaacucgacugaagucagccucacugaaccggaucugagaaucuucucucucugggcuugccagggcucuccgaaccuagcuagcauccucuucaauuccaacuagaaagcuuaccauggcccugagcaaggugaaacucaacgacacccugaauaaggaucagcuucuguccucuagcaaauacacaauccaaagauccacgggcgacucuauugauacccccaacuaugacguccagaagcacaucaauaaacucugcgggaugcugcuuauuacagaggaugcuaaccauaaguucaccggacugaucggcaugcucuacgccaugagccggcuggggcgcgaagacacaauuaagauccugagagaugcgggauaucacguuaaagcuaauggcguggacgugaccacacaucggcaggauaucaacgggaaggagaugaaauuugaaguccucacccuggccucccuuacgaccgagauucagaucaauauugaaaucgagucucgcaagagcuacaaaaagaugcugaaggagaugggagaaguggccccugaguauagacacgacuccccggauuguggcaugauuauccucugcauugcugcccugguuaucacaaaacuugcugccggcgaccggagcgggcugaccgcggugauccgcagagccaacaauguccucaagaacgaaaugaaacgguacaagggacugcugcccaaagauauugcuaauucuuucuaugagguguuugagaagcauccucacuucaucgacguuuuugugcacuucggcauugcccaauccagcacacgcgggggaucuagagucgaaggcaucuuugcuggacucuucaugaacgccuacggggcgggccaggugaugcugcgguggggcgugcuugccaaauccgucaagaauauuaugcuggggcaugcuagcguucaggccgagauggaacaggugguggaggucuacgaauaugcucaaaagcucggaggcgaggccggguuuuaccacauccugaacaaucccaaagccucucuucugucccucacccaguucccucauuuuagcuccgugguucugggaaacgcugcgggccuggggaucaugggagaguaucgcggcacgcccagaaaccaggaccucuacgaugccgcuaaggccuaugccgaacagcugaaagagaauggcgugauuaacuacucuguccuugaccugacagcugaggaacucgaagccaucaagcaccaacugaauccuaaagauaacgacguggagcuuugaggacuaguacuggcugcaucucccuuuccucuguccuccauccuucucccaggauggugaagggggaccugguacccagugauccccaccccaggauccuaaaucaugacuuaccugcuaauaaaaacucauuggaaaagugagaagaucuaaaaaaaaaaaaaaaaaaaaaaaaaaaaaaaaaaaaaaaaaaaaaaaaaaaaaaaaaaaaaaaaugcaucccccccccccccccccccccccccccccccaaaggcucuuuucagagccaccagaauu

SEQ ID NO: 10469 - RNA, 1629 nt, Artificial Sequence
  mRNA product Design h-5 comprising derived and/or modified sequence from HRSV(A2)__P03418.1__N (opt6)
gggagagggcgcuuggcuugcaaggacccugagcugcggcauugaagcacacccaacccaacucgacugaagucagccucacugaaccggaucugagaaucuucucucucugggcuugccagggcucuccgaaccuagcuagcauccucuucaauuccaacuagaaagcuuaccauggcacuaagcaaagucaaauuaaacgacacauuaaacaaagaccaacucuuaucaucaucaaaauacacaauacaaagaagcaccggagacaguaucgacacaccaaacuaugacguccaaaaacauauaaauaaauuaugcggcaugcucuuaaucacagaagacgccaaccauaaauuuacaggauuaauaggaauguuauaugcaaugucacgacuagguagagaagacacaauaaaaauacuaagagacgcaggcuaucacguaaaagcaaauggaguagacguaaccacacacagacaagacauaaauggaaaagaaaugaaauuugaaguauuaacacuagcaucacuaacaacagaaauacaaaucaacauagaaauagaaucaagaaaaagcuacaaaaaaauguuaaaagaaaugggagaagucgcaccagaauauagacaugauucaccagacugcggaaugauaauacuaugcauagcagcccuaguaauuacaaaacuagcagcaggagacagaagcggauuaacagcaguaauaagaagagcaaacaacguacuaaaaaacgaaaugaaaagauauaaaggauuauuaccaaaagacauagcaaacucauucuaugaaguauucgaaaaacacccccacuuuauagacgucuucguacacuucggaauagcccaaucauccacaagaggaggaucaagagucgaaggaauauucgcaggauuauucaugaacgcauauggcgcaggacaaguaaugcuaagauggggaguacuagcaaaauccgucaaaaacauaaugcuaggacacgcaucaguucaagcagaaauggaacaaguaguagaaguauacgaauacgcccaaaaacuaggaggagaagcaggauucuaccacauacuaaauaauccaaaagcaucacuacuaagccuaacccaauuuccccacuucucaaguguaguauuaggaaaugcagcuggacuaggaauaaugggagaauacagaggaacaccaagaaaccaagacuuauacgacgcagcaaaagcauacgcagagcaacuuaaagaaaacggaguaauaaacuauagcguacuagacuuaacagcagaagaacuggaagcaauaaaacaucaauuaaacccgaaagacaaugacguagaauuauaaggacuaguacuggcugcaucucccuuuccucuguccuccauccuucucccaggauggugaagggggaccugguacccagugauccccaccccaggauccuaaaucaugacuuaccugcuaauaaaaacucauuggaaaagugagaagaucuaaaaaaaaaaaaaaaaaaaaaaaaaaaaaaaaaaaaaaaaaaaaaaaaaaaaaaaaaaaaaaaaugcaucccccccccccccccccccccccccccccccaaaggcucuuuucagagccaccagaauu

SEQ ID NO: 10470 - RNA, 1629 nt, Artificial Sequence
  mRNA product Design h-5 comprising derived and/or modified sequence from HRSV(A2)__P03418.1__N (opt11)
gggagagggcgcuuggcuugcaaggacccugagcugcggcauugaagcacacccaacccaacucgacugaagucagccucacugaaccggaucugagaaucuucucucucugggcuugccagggcucuccgaaccuagcuagcauccucuucaauuccaacuagaaagcuuaccauggcacucucgaaaguaaaacucaacgacacccucaacaaagaccaacuccuuuccagcuccaaauacaccauccaacgauccaccggagacuccaucgacacgcccaacuacgacguccagaaacacaucaacaagcucugcggaaugcuacuaaucaccgaggacgccaaccacaaauucacaggacuuauagggaugcucuacgccaugucccgccucggacgcgaagacacaauaaaaauccuacgagacgccggcuaccacguaaaggcaaacggcgucgacgucaccacacacagacaagacaucaacggaaaggaaaugaaauucgaaguccucacccucgccagccuaaccaccgagauccaaaucaacaucgaaaucgaaucacgcaaauccuacaagaaaaugcucaaagaaaugggagaagucgcccccgaauaccgucacgacucgcccgacugcggcaugauaauccuaugcaucgccgcacucgucauaaccaaacucgccgccggugaccgaucaggacugacagcagucauccgccgagcaaacaacgugcucaaaaacgaaaugaaacgcuacaaaggccuacuccccaaagacaucgccaacuccuucuacgaagucuucgaaaaacacccacacuucaucgacgucuucguccacuucggcaucgcacaaucaucaaccagaggcggcagccgcguugaaggcaucuucgcaggacucuuuaugaacgccuacggcgccggccaagucaugcuccgcuggggcguccuggcaaaaagcgucaaaaacaucaugcuaggccacgcuagcguccaagccgaaauggaacaagucgucgaaguuuacgaguacgcacaaaaacucggcggcgaagcaggcuucuaccacauccuaaacaaccccaaagccucccugcuaucacucacccaauucccccacuucuccagcgucguccucggcaacgccgcaggacuaggcaucaugggagaauaccgcgggacaccgcgcaaccaagaccucuacgacgccgccaaagccuacgccgaacaacucaaagaaaacggcgucauaaacuacucaguccucgaccucaccgccgaagaacucgaagccaucaaacaccaacucaacccaaaagacaacgacgucgaauuauaaggacuaguacuggcugcaucucccuuuccucuguccuccauccuucucccaggauggugaagggggaccugguacccagugauccccaccccaggauccuaaaucaugacuuaccugcuaauaaaaacucauuggaaaagugagaagaucuaaaaaaaaaaaaaaaaaaaaaaaaaaaaaaaaaaaaaaaaaaaaaaaaaaaaaaaaaaaaaaaaugcaucccccccccccccccccccccccccccccccaaaggcucuuuucagagccaccagaauu

SEQ ID NO: 10471 - RNA, 1562 nt, Artificial Sequence
  mRNA product Design i-1 comprising derived and/or modified sequence from HRSV(A2)__P03418.1__N (wt)
gggagagggcgcuuggcuugcaaggacccugagcugcggcauugaagcacacccaacccaacucgacugaagucagccucacugaaccggaucugagaaucuucucucucugggcuugccagggcucuccgaaccuagcuagcauccucuucaauuccaacuagaaagcuuaccauggcucuuagcaaagucaaguugaaugauacacucaacaaagaucaacuucugucauccagcaaauacaccauccaacggagcacaggagauaguauugauacuccuaauuaugaugugcagaaacacaucaauaaguuauguggcauguuauuaaucacagaagaugcuaaucauaaauucacuggguuaauagguauguuauaugcgaugucuagguuaggaagagaagacaccauaaaaauacucagagaugcgggauaucauguaaaagcaaauggaguagauguaacaacacaucgucaagacauuaauggaaaagaaaugaaauuugaaguguuaacauuggcaagcuuaacaacugaaauucaaaucaacauugagauagaaucuagaaaauccuacaaaaaaaugcuaaaagaaaugggagagguagcuccagaauacaggcaugacucuccugauugugggaugauaauauuauguauagcagcauuaguaauaacuaaauuagcagcaggggacagaucuggucuuacagccgugauuaggagagcuaauaauguccuaaaaaaugaaaugaaacguuacaaaggcuuacuacccaaggacauagccaacagcuucuaugaaguguuugaaaaacauccccacuuuauagauguuuuuguucauuuugguauagcacaaucuucuaccagagguggcaguagaguugaagggauuuuugcaggauuguuuaugaaugccuauggugcagggcaagugauguuacgguggggagucuuagcaaaaucaguuaaaaauauuauguuaggacaugcuagugugcaagcagaaauggaacaaguuguugagguuuaugaauaugcccaaaaauuggguggugaagcaggauucuaccauauauugaacaacccaaaagcaucauuauuaucuuugacucaauuuccucacuucuccaguguaguauuaggcaaugcugcuggccuaggcauaaugggagaguacagagguacaccgaggaaucaagaucuauaugaugcagcaaaggcauaugcugaacaacucaaagaaaauggugugauuaacuacaguguacuagacuugacagcagaagaacuagaggcuaucaaacaucagcuuaauccaaaagauaaugauguagagcuuugaggacuaguguccaccugucccuccugggcugcuggauugucucguuuuccugccaaauaaacaggaucagcgcuuuacagaucuaaaaaaaaaaaaaaaaaaaaaaaaaaaaaaaaaaaaaaaaaaaaaaaaaaaaaaaaaaaaaaaaugcaucccccccccccccccccccccccccccccccaaaggcucuuuucagagccaccagaauu

SEQ ID NO: 10472 - RNA, 1562 nt, Artificial Sequence
  mRNA product Design i-1 comprising derived and/or modified sequence from HRSV(A2)__P03418.1__N (opt1)
gggagagggcgcuuggcuugcaaggacccugagcugcggcauugaagcacacccaacccaacucgacugaagucagccucacugaaccggaucugagaaucuucucucucugggcuugccagggcucuccgaaccuagcuagcauccucuucaauuccaacuagaaagcuuaccauggcccugagcaaggugaagcucaacgacacccugaacaaggaccagcugcucuccagcuccaaguacaccauccagcgcagcaccggcgacuccaucgacacccccaacuacgacguccagaagcacaucaacaagcugugcgggaugcugcucaucaccgaggacgccaaccacaaguucaccggccugaucgggaugcuguacgcgaugagccggcucggccgcgaggacacgaucaagauccugcgggacgccggguaccacgugaaggccaacggcguggacgucaccacccaccgccaggacaucaacggcaaggagaugaaguucgaggugcugacccucgccucccugacgaccgagauccagaucaacaucgagaucgagagccggaaguccuacaagaagaugcugaaggagaugggggagguggccccggaguaccgccacgacagccccgacugcggcaugaucauccucugcaucgcggcccuggucaucaccaagcuggccgccggggaccgguccggccucaccgcggugauccgccgggccaacaacgugcugaagaacgagaugaagcgcuacaaggggcugcuccccaaggacaucgccaacagcuucuacgaggucuucgagaagcacccccacuucaucgacguguucgugcacuucggcaucgcccaguccagcacgcggggcgggucccgcgucgagggcaucuucgccgggcuguucaugaacgcguacggcgccggccaggugaugcugcgguggggcgugcucgccaagagcgucaagaacaucaugcuggggcacgccuccgugcaggccgagauggagcaggucguggagguguacgaguacgcgcagaagcucgggggcgaggccggguucuaccacauccugaacaacccgaaggccagccugcugucccucacccaguucccccacuucagcagcgugguccugggcaacgccgccggccuggggaucaugggcgaguaccgcgggacgccccggaaccaggaccucuacgacgcggccaaggccuacgccgagcagcugaaggagaacggcgugaucaacuacuccgugcuggaccucaccgccgaggagcuggaggcgaucaagcaccagcugaaccccaaggacaacgacgucgagcucugaggacuaguguccaccugucccuccugggcugcuggauugucucguuuuccugccaaauaaacaggaucagcgcuuuacagaucuaaaaaaaaaaaaaaaaaaaaaaaaaaaaaaaaaaaaaaaaaaaaaaaaaaaaaaaaaaaaaaaaugcaucccccccccccccccccccccccccccccccaaaggcucuuuucagagccaccagaauu

SEQ ID NO: 10473 - RNA, 1562 nt, Artificial Sequence
  mRNA product Design i-1 comprising derived and/or modified sequence from HRSV(A2)__P03418.1__N (opt2)
gggagagggcgcuuggcuugcaaggacccugagcugcggcauugaagcacacccaacccaacucgacugaagucagccucacugaaccggaucugagaaucuucucucucugggcuugccagggcucuccgaaccuagcuagcauccucuucaauuccaacuagaaagcuuaccauggcccucuccaaggucaagcucaacgacacccucaacaaggaccagcuccucuccuccuccaaguacaccauccagcgcuccaccggcgacuccaucgacacccccaacuacgacguccagaagcacaucaacaagcucugcggcaugcuccucaucaccgaggacgccaaccacaaguucaccggccucaucggcaugcucuacgccaugucccgccucggccgcgaggacaccaucaagauccuccgcgacgccggcuaccacgucaaggccaacggcgucgacgucaccacccaccgccaggacaucaacggcaaggagaugaaguucgagguccucacccucgccucccucaccaccgagauccagaucaacaucgagaucgagucccgcaaguccuacaagaagaugcucaaggagaugggcgaggucgcccccgaguaccgccacgacucccccgacugcggcaugaucauccucugcaucgccgcccucgucaucaccaagcucgccgccggcgaccgcuccggccucaccgccgucauccgccgcgccaacaacguccucaagaacgagaugaagcgcuacaagggccuccuccccaaggacaucgccaacuccuucuacgaggucuucgagaagcacccccacuucaucgacgucuucguccacuucggcaucgcccaguccuccacccgcggcggcucccgcgucgagggcaucuucgccggccucuucaugaacgccuacggcgccggccaggucaugcuccgcuggggcguccucgccaaguccgucaagaacaucaugcucggccacgccuccguccaggccgagauggagcaggucgucgaggucuacgaguacgcccagaagcucggcggcgaggccggcuucuaccacauccucaacaaccccaaggccucccuccucucccucacccaguucccccacuucuccuccgucguccucggcaacgccgccggccucggcaucaugggcgaguaccgcggcaccccccgcaaccaggaccucuacgacgccgccaaggccuacgccgagcagcucaaggagaacggcgucaucaacuacuccguccucgaccucaccgccgaggagcucgaggccaucaagcaccagcucaaccccaaggacaacgacgucgagcucugaggacuaguguccaccugucccuccugggcugcuggauugucucguuuuccugccaaauaaacaggaucagcgcuuuacagaucuaaaaaaaaaaaaaaaaaaaaaaaaaaaaaaaaaaaaaaaaaaaaaaaaaaaaaaaaaaaaaaaaugcaucccccccccccccccccccccccccccccccaaaggcucuuuucagagccaccagaauu

SEQ ID NO: 10474 - RNA, 1562 nt, Artificial Sequence
  mRNA product Design i-1 comprising derived and/or modified sequence from HRSV(A2)__P03418.1__N (opt3)
gggagagggcgcuuggcuugcaaggacccugagcugcggcauugaagcacacccaacccaacucgacugaagucagccucacugaaccggaucugagaaucuucucucucugggcuugccagggcucuccgaaccuagcuagcauccucuucaauuccaacuagaaagcuuaccauggcccugagcaaggugaaacucaacgacacccuuaauaaggaucagcuguuguccucuucaaaauacacaauccaaagaaguacuggcgacagcauugauacgcccaacuaugacguccagaagcacauaaauaaauuaugcgggaugcugcuaaucaccgaggaugcuaaccauaaguucacaggacucauugguaugcuguacgcaauguccaggcuuggccgggaagacacuaucaagauucugcgcgaugccggguaucacguuaaagcgaauggaguggacguaaccacacaucgacaggauaucaacggcaaggagaugaaauuugaaguguugacccucgcuucucugacuacagagauacagaucaauauugaaaucgagucgcguaagucauacaaaaagaugcugaaggagaugggugaagucgccccugaguauagacacgacagcccagauugugggaugauuauccucugcauagcagccuuagugauuaccaaacuggcugcaggagacaggaguggccuuacggccguuauccggcgcgcuaacaauguguugaagaacgaaaugaaaagauacaagggccugcuaccgaaagauauugccaauuccuucuaugaggucuuugagaagcauccccacuucaucgacguguuuguacacuucgggaucgcgcaaucuagcacuaggggagguucccggguugaaggcauuuuugcaggacucuucaugaacgccuacggggcuggccaggugaugcugcgcugggguguccuugccaaaucagugaagaauauaaugcuggggcaugcaagugugcaggcugagauggaacaggucguugagguguacgaauaugcccaaaaguugggaggcgaggcgggcuuuuaccacauccucaacaauccuaaagccagccuguuaucucugacccaguucccacauuuuuccucaguagugcucgggaacgcagcuggacuugguauuaugggcgaguaucgagggacacccagaaaccaggaccuguacgaugccgcuaaggccuaugcagaacaguugaaagagaauggagucaucaacuacagcgugcuagaccugacugccgaggaacucgaagcuauaaagcaccaacugaauccuaaagauaacgacguugagcuuugaggacuaguguccaccugucccuccugggcugcuggauugucucguuuuccugccaaauaaacaggaucagcgcuuuacagaucuaaaaaaaaaaaaaaaaaaaaaaaaaaaaaaaaaaaaaaaaaaaaaaaaaaaaaaaaaaaaaaaaugcaucccccccccccccccccccccccccccccccaaaggcucuuuucagagccaccagaauu

SEQ ID NO: 10475 - RNA, 1562 nt, Artificial Sequence
  mRNA product Design i-1 comprising derived and/or modified sequence from HRSV(A2)__P03418.1__N (opt4)
gggagagggcgcuuggcuugcaaggacccugagcugcggcauugaagcacacccaacccaacucgacugaagucagccucacugaaccggaucugagaaucuucucucucugggcuugccagggcucuccgaaccuagcuagcauccucuucaauuccaacuagaaagcuuaccauggcccugagcaaggugaagcugaacgacacccugaacaaggaccagcugcugagcagcagcaaguacaccauccagagaagcaccggcgacagcaucgacacccccaacuacgacgugcagaagcacaucaacaagcugugcggcaugcugcugaucaccgaggacgccaaccacaaguucaccggccugaucggcaugcuguacgccaugagcagacugggcagagaggacaccaucaagauccugagagacgccggcuaccacgugaaggccaacggcguggacgugaccacccacagacaggacaucaacggcaaggagaugaaguucgaggugcugacccuggccagccugaccaccgagauccagaucaacaucgagaucgagagcagaaagagcuacaagaagaugcugaaggagaugggcgagguggcccccgaguacagacacgacagccccgacugcggcaugaucauccugugcaucgccgcccuggugaucaccaagcuggccgccggcgacagaagcggccugaccgccgugaucagaagagccaacaacgugcugaagaacgagaugaagagauacaagggccugcugcccaaggacaucgccaacagcuucuacgagguguucgagaagcacccccacuucaucgacguguucgugcacuucggcaucgcccagagcagcaccagaggcggcagcagaguggagggcaucuucgccggccuguucaugaacgccuacggcgccggccaggugaugcugagauggggcgugcuggccaagagcgugaagaacaucaugcugggccacgccagcgugcaggccgagauggagcaggugguggagguguacgaguacgcccagaagcugggcggcgaggccggcuucuaccacauccugaacaaccccaaggccagccugcugagccugacccaguucccccacuucagcagcguggugcugggcaacgccgccggccugggcaucaugggcgaguacagaggcacccccagaaaccaggaccuguacgacgccgccaaggccuacgccgagcagcugaaggagaacggcgugaucaacuacagcgugcuggaccugaccgccgaggagcuggaggccaucaagcaccagcugaaccccaaggacaacgacguggagcugugaggacuaguguccaccugucccuccugggcugcuggauugucucguuuuccugccaaauaaacaggaucagcgcuuuacagaucuaaaaaaaaaaaaaaaaaaaaaaaaaaaaaaaaaaaaaaaaaaaaaaaaaaaaaaaaaaaaaaaaugcaucccccccccccccccccccccccccccccccaaaggcucuuuucagagccaccagaauu

SEQ ID NO: 10476 - RNA, 1562 nt, Artificial Sequence
  mRNA product Design i-1 comprising derived and/or modified sequence from HRSV(A2)__P03418.1__N (opt5)
gggagagggcgcuuggcuugcaaggacccugagcugcggcauugaagcacacccaacccaacucgacugaagucagccucacugaaccggaucugagaaucuucucucucugggcuugccagggcucuccgaaccuagcuagcauccucuucaauuccaacuagaaagcuuaccauggcccugagcaaggugaaacucaacgacacccugaauaaggaucagcuucuguccucuagcaaauacacaauccaaagauccacgggcgacucuauugauacccccaacuaugacguccagaagcacaucaauaaacucugcgggaugcugcuuauuacagaggaugcuaaccauaaguucaccggacugaucggcaugcucuacgccaugagccggcuggggcgcgaagacacaauuaagauccugagagaugcgggauaucacguuaaagcuaauggcguggacgugaccacacaucggcaggauaucaacgggaaggagaugaaauuugaaguccucacccuggccucccuuacgaccgagauucagaucaauauugaaaucgagucucgcaagagcuacaaaaagaugcugaaggagaugggagaaguggccccugaguauagacacgacuccccggauuguggcaugauuauccucugcauugcugcccugguuaucacaaaacuugcugccggcgaccggagcgggcugaccgcggugauccgcagagccaacaauguccucaagaacgaaaugaaacgguacaagggacugcugcccaaagauauugcuaauucuuucuaugagguguuugagaagcauccucacuucaucgacguuuuugugcacuucggcauugcccaauccagcacacgcgggggaucuagagucgaaggcaucuuugcuggacucuucaugaacgccuacggggcgggccaggugaugcugcgguggggcgugcuugccaaauccgucaagaauauuaugcuggggcaugcuagcguucaggccgagauggaacaggugguggaggucuacgaauaugcucaaaagcucggaggcgaggccggguuuuaccacauccugaacaaucccaaagccucucuucugucccucacccaguucccucauuuuagcuccgugguucugggaaacgcugcgggccuggggaucaugggagaguaucgcggcacgcccagaaaccaggaccucuacgaugccgcuaaggccuaugccgaacagcugaaagagaauggcgugauuaacuacucuguccuugaccugacagcugaggaacucgaagccaucaagcaccaacugaauccuaaagauaacgacguggagcuuugaggacuaguguccaccugucccuccugggcugcuggauugucucguuuuccugccaaauaaacaggaucagcgcuuuacagaucuaaaaaaaaaaaaaaaaaaaaaaaaaaaaaaaaaaaaaaaaaaaaaaaaaaaaaaaaaaaaaaaaugcaucccccccccccccccccccccccccccccccaaaggcucuuuucagagccaccagaauu

SEQ ID NO: 10477 - RNA, 1562 nt, Artificial Sequence
  mRNA product Design i-1 comprising derived and/or modified sequence from HRSV(A2)__P03418.1__N (opt6)
gggagagggcgcuuggcuugcaaggacccugagcugcggcauugaagcacacccaacccaacucgacugaagucagccucacugaaccggaucugagaaucuucucucucugggcuugccagggcucuccgaaccuagcuagcauccucuucaauuccaacuagaaagcuuaccauggcacuaagcaaagucaaauuaaacgacacauuaaacaaagaccaacucuuaucaucaucaaaauacacaauacaaagaagcaccggagacaguaucgacacaccaaacuaugacguccaaaaacauauaaauaaauuaugcggcaugcucuuaaucacagaagacgccaaccauaaauuuacaggauuaauaggaauguuauaugcaaugucacgacuagguagagaagacacaauaaaaauacuaagagacgcaggcuaucacguaaaagcaaauggaguagacguaaccacacacagacaagacauaaauggaaaagaaaugaaauuugaaguauuaacacuagcaucacuaacaacagaaauacaaaucaacauagaaauagaaucaagaaaaagcuacaaaaaaauguuaaaagaaaugggagaagucgcaccagaauauagacaugauucaccagacugcggaaugauaauacuaugcauagcagcccuaguaauuacaaaacuagcagcaggagacagaagcggauuaacagcaguaauaagaagagcaaacaacguacuaaaaaacgaaaugaaaagauauaaaggauuauuaccaaaagacauagcaaacucauucuaugaaguauucgaaaaacacccccacuuuauagacgucuucguacacuucggaauagcccaaucauccacaagaggaggaucaagagucgaaggaauauucgcaggauuauucaugaacgcauauggcgcaggacaaguaaugcuaagauggggaguacuagcaaaauccgucaaaaacauaaugcuaggacacgcaucaguucaagcagaaauggaacaaguaguagaaguauacgaauacgcccaaaaacuaggaggagaagcaggauucuaccacauacuaaauaauccaaaagcaucacuacuaagccuaacccaauuuccccacuucucaaguguaguauuaggaaaugcagcuggacuaggaauaaugggagaauacagaggaacaccaagaaaccaagacuuauacgacgcagcaaaagcauacgcagagcaacuuaaagaaaacggaguaauaaacuauagcguacuagacuuaacagcagaagaacuggaagcaauaaaacaucaauuaaacccgaaagacaaugacguagaauuauaaggacuaguguccaccugucccuccugggcugcuggauugucucguuuuccugccaaauaaacaggaucagcgcuuuacagaucuaaaaaaaaaaaaaaaaaaaaaaaaaaaaaaaaaaaaaaaaaaaaaaaaaaaaaaaaaaaaaaaaugcaucccccccccccccccccccccccccccccccaaaggcucuuuucagagccaccagaauu

SEQ ID NO: 10478 - RNA, 1562 nt, Artificial Sequence
  mRNA product Design i-1 comprising derived and/or modified sequence from HRSV(A2)__P03418.1__N (opt11)
gggagagggcgcuuggcuugcaaggacccugagcugcggcauugaagcacacccaacccaacucgacugaagucagccucacugaaccggaucugagaaucuucucucucugggcuugccagggcucuccgaaccuagcuagcauccucuucaauuccaacuagaaagcuuaccauggcacucucgaaaguaaaacucaacgacacccucaacaaagaccaacuccuuuccagcuccaaauacaccauccaacgauccaccggagacuccaucgacacgcccaacuacgacguccagaaacacaucaacaagcucugcggaaugcuacuaaucaccgaggacgccaaccacaaauucacaggacuuauagggaugcucuacgccaugucccgccucggacgcgaagacacaauaaaaauccuacgagacgccggcuaccacguaaaggcaaacggcgucgacgucaccacacacagacaagacaucaacggaaaggaaaugaaauucgaaguccucacccucgccagccuaaccaccgagauccaaaucaacaucgaaaucgaaucacgcaaauccuacaagaaaaugcucaaagaaaugggagaagucgcccccgaauaccgucacgacucgcccgacugcggcaugauaauccuaugcaucgccgcacucgucauaaccaaacucgccgccggugaccgaucaggacugacagcagucauccgccgagcaaacaacgugcucaaaaacgaaaugaaacgcuacaaaggccuacuccccaaagacaucgccaacuccuucuacgaagucuucgaaaaacacccacacuucaucgacgucuucguccacuucggcaucgcacaaucaucaaccagaggcggcagccgcguugaaggcaucuucgcaggacucuuuaugaacgccuacggcgccggccaagucaugcuccgcuggggcguccuggcaaaaagcgucaaaaacaucaugcuaggccacgcuagcguccaagccgaaauggaacaagucgucgaaguuuacgaguacgcacaaaaacucggcggcgaagcaggcuucuaccacauccuaaacaaccccaaagccucccugcuaucacucacccaauucccccacuucuccagcgucguccucggcaacgccgcaggacuaggcaucaugggagaauaccgcgggacaccgcgcaaccaagaccucuacgacgccgccaaagccuacgccgaacaacucaaagaaaacggcgucauaaacuacucaguccucgaccucaccgccgaagaacucgaagccaucaaacaccaacucaacccaaaagacaacgacgucgaauuauaaggacuaguguccaccugucccuccugggcugcuggauugucucguuuuccugccaaauaaacaggaucagcgcuuuacagaucuaaaaaaaaaaaaaaaaaaaaaaaaaaaaaaaaaaaaaaaaaaaaaaaaaaaaaaaaaaaaaaaaugcaucccccccccccccccccccccccccccccccaaaggcucuuuucagagccaccagaauu

SEQ ID NO: 10479 - RNA, 1562 nt, Artificial Sequence
  mRNA product Design i-2 comprising derived and/or modified sequence from HRSV(A2)__P03418.1__N (wt)
gggagaggcgcugccuacggagguggcagccaucuccuucucggcaucaagcuuaccauggcucuuagcaaagucaaguugaaugauacacucaacaaagaucaacuucugucauccagcaaauacaccauccaacggagcacaggagauaguauugauacuccuaauuaugaugugcagaaacacaucaauaaguuauguggcauguuauuaaucacagaagaugcuaaucauaaauucacuggguuaauagguauguuauaugcgaugucuagguuaggaagagaagacaccauaaaaauacucagagaugcgggauaucauguaaaagcaaauggaguagauguaacaacacaucgucaagacauuaauggaaaagaaaugaaauuugaaguguuaacauuggcaagcuuaacaacugaaauucaaaucaacauugagauagaaucuagaaaauccuacaaaaaaaugcuaaaagaaaugggagagguagcuccagaauacaggcaugacucuccugauugugggaugauaauauuauguauagcagcauuaguaauaacuaaauuagcagcaggggacagaucuggucuuacagccgugauuaggagagcuaauaauguccuaaaaaaugaaaugaaacguuacaaaggcuuacuacccaaggacauagccaacagcuucuaugaaguguuugaaaaacauccccacuuuauagauguuuuuguucauuuugguauagcacaaucuucuaccagagguggcaguagaguugaagggauuuuugcaggauuguuuaugaaugccuauggugcagggcaagugauguuacgguggggagucuuagcaaaaucaguuaaaaauauuauguuaggacaugcuagugugcaagcagaaauggaacaaguuguugagguuuaugaauaugcccaaaaauuggguggugaagcaggauucuaccauauauugaacaacccaaaagcaucauuauuaucuuugacucaauuuccucacuucuccaguguaguauuaggcaaugcugcuggccuaggcauaaugggagaguacagagguacaccgaggaaucaagaucuauaugaugcagcaaaggcauaugcugaacaacucaaagaaaauggugugauuaacuacaguguacuagacuugacagcagaagaacuagaggcuaucaaacaucagcuuaauccaaaagauaaugauguagagcuuugaggacuagugcaucacauuuaaaagcaucucagccuaccaugagaauaagagaaagaaaaugaagaucaauagcuuauucaucucuuuuucuuuuucguugguguaaagccaacacccugucuaaaaaacauaaauuucuuuaaucauuuugccucuuuucucugugcuucaauuaauaaaaaauggaaagaaccuagaucuaaaaaaaaaaaaaaaaaaaaaaaaaaaaaaaaaaaaaaaaaaaaaaaaaaaaaaaaaaaaaaaaugcaucccccccccccccccccccccccccccccccaaaggcucuuuucagagccaccagaauu

SEQ ID NO: 10480 - RNA, 1562 nt, Artificial Sequence
  mRNA product Design i-2 comprising derived and/or modified sequence from HRSV(A2)__P03418.1__N (opt1)
gggagaggcgcugccuacggagguggcagccaucuccuucucggcaucaagcuuaccauggcccugagcaaggugaagcucaacgacacccugaacaaggaccagcugcucuccagcuccaaguacaccauccagcgcagcaccggcgacuccaucgacacccccaacuacgacguccagaagcacaucaacaagcugugcgggaugcugcucaucaccgaggacgccaaccacaaguucaccggccugaucgggaugcuguacgcgaugagccggcucggccgcgaggacacgaucaagauccugcgggacgccggguaccacgugaaggccaacggcguggacgucaccacccaccgccaggacaucaacggcaaggagaugaaguucgaggugcugacccucgccucccugacgaccgagauccagaucaacaucgagaucgagagccggaaguccuacaagaagaugcugaaggagaugggggagguggccccggaguaccgccacgacagccccgacugcggcaugaucauccucugcaucgcggcccuggucaucaccaagcuggccgccggggaccgguccggccucaccgcggugauccgccgggccaacaacgugcugaagaacgagaugaagcgcuacaaggggcugcuccccaaggacaucgccaacagcuucuacgaggucuucgagaagcacccccacuucaucgacguguucgugcacuucggcaucgcccaguccagcacgcggggcgggucccgcgucgagggcaucuucgccgggcuguucaugaacgcguacggcgccggccaggugaugcugcgguggggcgugcucgccaagagcgucaagaacaucaugcuggggcacgccuccgugcaggccgagauggagcaggucguggagguguacgaguacgcgcagaagcucgggggcgaggccggguucuaccacauccugaacaacccgaaggccagccugcugucccucacccaguucccccacuucagcagcgugguccugggcaacgccgccggccuggggaucaugggcgaguaccgcgggacgccccggaaccaggaccucuacgacgcggccaaggccuacgccgagcagcugaaggagaacggcgugaucaacuacuccgugcuggaccucaccgccgaggagcuggaggcgaucaagcaccagcugaaccccaaggacaacgacgucgagcucugaggacuagugcaucacauuuaaaagcaucucagccuaccaugagaauaagagaaagaaaaugaagaucaauagcuuauucaucucuuuuucuuuuucguugguguaaagccaacacccugucuaaaaaacauaaauuucuuuaaucauuuugccucuuuucucugugcuucaauuaauaaaaaauggaaagaaccuagaucuaaaaaaaaaaaaaaaaaaaaaaaaaaaaaaaaaaaaaaaaaaaaaaaaaaaaaaaaaaaaaaaaugcaucccccccccccccccccccccccccccccccaaaggcucuuuucagagccaccagaauu

SEQ ID NO: 10481 - RNA, 1562 nt, Artificial Sequence
  mRNA product Design i-2 comprising derived and/or modified sequence from HRSV(A2)__P03418.1__N (opt2)
gggagaggcgcugccuacggagguggcagccaucuccuucucggcaucaagcuuaccauggcccucuccaaggucaagcucaacgacacccucaacaaggaccagcuccucuccuccuccaaguacaccauccagcgcuccaccggcgacuccaucgacacccccaacuacgacguccagaagcacaucaacaagcucugcggcaugcuccucaucaccgaggacgccaaccacaaguucaccggccucaucggcaugcucuacgccaugucccgccucggccgcgaggacaccaucaagauccuccgcgacgccggcuaccacgucaaggccaacggcgucgacgucaccacccaccgccaggacaucaacggcaaggagaugaaguucgagguccucacccucgccucccucaccaccgagauccagaucaacaucgagaucgagucccgcaaguccuacaagaagaugcucaaggagaugggcgaggucgcccccgaguaccgccacgacucccccgacugcggcaugaucauccucugcaucgccgcccucgucaucaccaagcucgccgccggcgaccgcuccggccucaccgccgucauccgccgcgccaacaacguccucaagaacgagaugaagcgcuacaagggccuccuccccaaggacaucgccaacuccuucuacgaggucuucgagaagcacccccacuucaucgacgucuucguccacuucggcaucgcccaguccuccacccgcggcggcucccgcgucgagggcaucuucgccggccucuucaugaacgccuacggcgccggccaggucaugcuccgcuggggcguccucgccaaguccgucaagaacaucaugcucggccacgccuccguccaggccgagauggagcaggucgucgaggucuacgaguacgcccagaagcucggcggcgaggccggcuucuaccacauccucaacaaccccaaggccucccuccucucccucacccaguucccccacuucuccuccgucguccucggcaacgccgccggccucggcaucaugggcgaguaccgcggcaccccccgcaaccaggaccucuacgacgccgccaaggccuacgccgagcagcucaaggagaacggcgucaucaacuacuccguccucgaccucaccgccgaggagcucgaggccaucaagcaccagcucaaccccaaggacaacgacgucgagcucugaggacuagugcaucacauuuaaaagcaucucagccuaccaugagaauaagagaaagaaaaugaagaucaauagcuuauucaucucuuuuucuuuuucguugguguaaagccaacacccugucuaaaaaacauaaauuucuuuaaucauuuugccucuuuucucugugcuucaauuaauaaaaaauggaaagaaccuagaucuaaaaaaaaaaaaaaaaaaaaaaaaaaaaaaaaaaaaaaaaaaaaaaaaaaaaaaaaaaaaaaaaugcaucccccccccccccccccccccccccccccccaaaggcucuuuucagagccaccagaauu

SEQ ID NO: 10482 - RNA, 1562 nt, Artificial Sequence
  mRNA product Design i-2 comprising derived and/or modified sequence from HRSV(A2)__P03418.1__N (opt3)
gggagaggcgcugccuacggagguggcagccaucuccuucucggcaucaagcuuaccauggcccugagcaaggugaaacucaacgacacccuuaauaaggaucagcuguuguccucuucaaaauacacaauccaaagaaguacuggcgacagcauugauacgcccaacuaugacguccagaagcacauaaauaaauuaugcgggaugcugcuaaucaccgaggaugcuaaccauaaguucacaggacucauugguaugcuguacgcaauguccaggcuuggccgggaagacacuaucaagauucugcgcgaugccggguaucacguuaaagcgaauggaguggacguaaccacacaucgacaggauaucaacggcaaggagaugaaauuugaaguguugacccucgcuucucugacuacagagauacagaucaauauugaaaucgagucgcguaagucauacaaaaagaugcugaaggagaugggugaagucgccccugaguauagacacgacagcccagauugugggaugauuauccucugcauagcagccuuagugauuaccaaacuggcugcaggagacaggaguggccuuacggccguuauccggcgcgcuaacaauguguugaagaacgaaaugaaaagauacaagggccugcuaccgaaagauauugccaauuccuucuaugaggucuuugagaagcauccccacuucaucgacguguuuguacacuucgggaucgcgcaaucuagcacuaggggagguucccggguugaaggcauuuuugcaggacucuucaugaacgccuacggggcuggccaggugaugcugcgcugggguguccuugccaaaucagugaagaauauaaugcuggggcaugcaagugugcaggcugagauggaacaggucguugagguguacgaauaugcccaaaaguugggaggcgaggcgggcuuuuaccacauccucaacaauccuaaagccagccuguuaucucugacccaguucccacauuuuuccucaguagugcucgggaacgcagcuggacuugguauuaugggcgaguaucgagggacacccagaaaccaggaccuguacgaugccgcuaaggccuaugcagaacaguugaaagagaauggagucaucaacuacagcgugcuagaccugacugccgaggaacucgaagcuauaaagcaccaacugaauccuaaagauaacgacguugagcuuugaggacuagugcaucacauuuaaaagcaucucagccuaccaugagaauaagagaaagaaaaugaagaucaauagcuuauucaucucuuuuucuuuuucguugguguaaagccaacacccugucuaaaaaacauaaauuucuuuaaucauuuugccucuuuucucugugcuucaauuaauaaaaaauggaaagaaccuagaucuaaaaaaaaaaaaaaaaaaaaaaaaaaaaaaaaaaaaaaaaaaaaaaaaaaaaaaaaaaaaaaaaugcaucccccccccccccccccccccccccccccccaaaggcucuuuucagagccaccagaauu

SEQ ID NO: 10483 - RNA, 1562 nt, Artificial Sequence
  mRNA product Design i-2 comprising derived and/or modified sequence from HRSV(A2)__P03418.1__N (opt4)
gggagaggcgcugccuacggagguggcagccaucuccuucucggcaucaagcuuaccauggcccugagcaaggugaagcugaacgacacccugaacaaggaccagcugcugagcagcagcaaguacaccauccagagaagcaccggcgacagcaucgacacccccaacuacgacgugcagaagcacaucaacaagcugugcggcaugcugcugaucaccgaggacgccaaccacaaguucaccggccugaucggcaugcuguacgccaugagcagacugggcagagaggacaccaucaagauccugagagacgccggcuaccacgugaaggccaacggcguggacgugaccacccacagacaggacaucaacggcaaggagaugaaguucgaggugcugacccuggccagccugaccaccgagauccagaucaacaucgagaucgagagcagaaagagcuacaagaagaugcugaaggagaugggcgagguggcccccgaguacagacacgacagccccgacugcggcaugaucauccugugcaucgccgcccuggugaucaccaagcuggccgccggcgacagaagcggccugaccgccgugaucagaagagccaacaacgugcugaagaacgagaugaagagauacaagggccugcugcccaaggacaucgccaacagcuucuacgagguguucgagaagcacccccacuucaucgacguguucgugcacuucggcaucgcccagagcagcaccagaggcggcagcagaguggagggcaucuucgccggccuguucaugaacgccuacggcgccggccaggugaugcugagauggggcgugcuggccaagagcgugaagaacaucaugcugggccacgccagcgugcaggccgagauggagcaggugguggagguguacgaguacgcccagaagcugggcggcgaggccggcuucuaccacauccugaacaaccccaaggccagccugcugagccugacccaguucccccacuucagcagcguggugcugggcaacgccgccggccugggcaucaugggcgaguacagaggcacccccagaaaccaggaccuguacgacgccgccaaggccuacgccgagcagcugaaggagaacggcgugaucaacuacagcgugcuggaccugaccgccgaggagcuggaggccaucaagcaccagcugaaccccaaggacaacgacguggagcugugaggacuagugcaucacauuuaaaagcaucucagccuaccaugagaauaagagaaagaaaaugaagaucaauagcuuauucaucucuuuuucuuuuucguugguguaaagccaacacccugucuaaaaaacauaaauuucuuuaaucauuuugccucuuuucucugugcuucaauuaauaaaaaauggaaagaaccuagaucuaaaaaaaaaaaaaaaaaaaaaaaaaaaaaaaaaaaaaaaaaaaaaaaaaaaaaaaaaaaaaaaaugcaucccccccccccccccccccccccccccccccaaaggcucuuuucagagccaccagaauu

SEQ ID NO: 10484 - RNA, 1562 nt, Artificial Sequence
  mRNA product Design i-2 comprising derived and/or modified sequence from HRSV(A2)__P03418.1__N (opt5)
gggagaggcgcugccuacggagguggcagccaucuccuucucggcaucaagcuuaccauggcccugagcaaggugaaacucaacgacacccugaauaaggaucagcuucuguccucuagcaaauacacaauccaaagauccacgggcgacucuauugauacccccaacuaugacguccagaagcacaucaauaaacucugcgggaugcugcuuauuacagaggaugcuaaccauaaguucaccggacugaucggcaugcucuacgccaugagccggcuggggcgcgaagacacaauuaagauccugagagaugcgggauaucacguuaaagcuaauggcguggacgugaccacacaucggcaggauaucaacgggaaggagaugaaauuugaaguccucacccuggccucccuuacgaccgagauucagaucaauauugaaaucgagucucgcaagagcuacaaaaagaugcugaaggagaugggagaaguggccccugaguauagacacgacuccccggauuguggcaugauuauccucugcauugcugcccugguuaucacaaaacuugcugccggcgaccggagcgggcugaccgcggugauccgcagagccaacaauguccucaagaacgaaaugaaacgguacaagggacugcugcccaaagauauugcuaauucuuucuaugagguguuugagaagcauccucacuucaucgacguuuuugugcacuucggcauugcccaauccagcacacgcgggggaucuagagucgaaggcaucuuugcuggacucuucaugaacgccuacggggcgggccaggugaugcugcgguggggcgugcuugccaaauccgucaagaauauuaugcuggggcaugcuagcguucaggccgagauggaacaggugguggaggucuacgaauaugcucaaaagcucggaggcgaggccggguuuuaccacauccugaacaaucccaaagccucucuucugucccucacccaguucccucauuuuagcuccgugguucugggaaacgcugcgggccuggggaucaugggagaguaucgcggcacgcccagaaaccaggaccucuacgaugccgcuaaggccuaugccgaacagcugaaagagaauggcgugauuaacuacucuguccuugaccugacagcugaggaacucgaagccaucaagcaccaacugaauccuaaagauaacgacguggagcuuugaggacuagugcaucacauuuaaaagcaucucagccuaccaugagaauaagagaaagaaaaugaagaucaauagcuuauucaucucuuuuucuuuuucguugguguaaagccaacacccugucuaaaaaacauaaauuucuuuaaucauuuugccucuuuucucugugcuucaauuaauaaaaaauggaaagaaccuagaucuaaaaaaaaaaaaaaaaaaaaaaaaaaaaaaaaaaaaaaaaaaaaaaaaaaaaaaaaaaaaaaaaugcaucccccccccccccccccccccccccccccccaaaggcucuuuucagagccaccagaauu

SEQ ID NO: 10485 - RNA, 1562 nt, Artificial Sequence
  mRNA product Design i-2 comprising derived and/or modified sequence from HRSV(A2)__P03418.1__N (opt6)
gggagaggcgcugccuacggagguggcagccaucuccuucucggcaucaagcuuaccauggcacuaagcaaagucaaauuaaacgacacauuaaacaaagaccaacucuuaucaucaucaaaauacacaauacaaagaagcaccggagacaguaucgacacaccaaacuaugacguccaaaaacauauaaauaaauuaugcggcaugcucuuaaucacagaagacgccaaccauaaauuuacaggauuaauaggaauguuauaugcaaugucacgacuagguagagaagacacaauaaaaauacuaagagacgcaggcuaucacguaaaagcaaauggaguagacguaaccacacacagacaagacauaaauggaaaagaaaugaaauuugaaguauuaacacuagcaucacuaacaacagaaauacaaaucaacauagaaauagaaucaagaaaaagcuacaaaaaaauguuaaaagaaaugggagaagucgcaccagaauauagacaugauucaccagacugcggaaugauaauacuaugcauagcagcccuaguaauuacaaaacuagcagcaggagacagaagcggauuaacagcaguaauaagaagagcaaacaacguacuaaaaaacgaaaugaaaagauauaaaggauuauuaccaaaagacauagcaaacucauucuaugaaguauucgaaaaacacccccacuuuauagacgucuucguacacuucggaauagcccaaucauccacaagaggaggaucaagagucgaaggaauauucgcaggauuauucaugaacgcauauggcgcaggacaaguaaugcuaagauggggaguacuagcaaaauccgucaaaaacauaaugcuaggacacgcaucaguucaagcagaaauggaacaaguaguagaaguauacgaauacgcccaaaaacuaggaggagaagcaggauucuaccacauacuaaauaauccaaaagcaucacuacuaagccuaacccaauuuccccacuucucaaguguaguauuaggaaaugcagcuggacuaggaauaaugggagaauacagaggaacaccaagaaaccaagacuuauacgacgcagcaaaagcauacgcagagcaacuuaaagaaaacggaguaauaaacuauagcguacuagacuuaacagcagaagaacuggaagcaauaaaacaucaauuaaacccgaaagacaaugacguagaauuauaaggacuagugcaucacauuuaaaagcaucucagccuaccaugagaauaagagaaagaaaaugaagaucaauagcuuauucaucucuuuuucuuuuucguugguguaaagccaacacccugucuaaaaaacauaaauuucuuuaaucauuuugccucuuuucucugugcuucaauuaauaaaaaauggaaagaaccuagaucuaaaaaaaaaaaaaaaaaaaaaaaaaaaaaaaaaaaaaaaaaaaaaaaaaaaaaaaaaaaaaaaaugcaucccccccccccccccccccccccccccccccaaaggcucuuuucagagccaccagaauu

SEQ ID NO: 10486 - RNA, 1562 nt, Artificial Sequence
  mRNA product Design i-2 comprising derived and/or modified sequence from HRSV(A2)__P03418.1__N (opt11)
gggagaggcgcugccuacggagguggcagccaucuccuucucggcaucaagcuuaccauggcacucucgaaaguaaaacucaacgacacccucaacaaagaccaacuccuuuccagcuccaaauacaccauccaacgauccaccggagacuccaucgacacgcccaacuacgacguccagaaacacaucaacaagcucugcggaaugcuacuaaucaccgaggacgccaaccacaaauucacaggacuuauagggaugcucuacgccaugucccgccucggacgcgaagacacaauaaaaauccuacgagacgccggcuaccacguaaaggcaaacggcgucgacgucaccacacacagacaagacaucaacggaaaggaaaugaaauucgaaguccucacccucgccagccuaaccaccgagauccaaaucaacaucgaaaucgaaucacgcaaauccuacaagaaaaugcucaaagaaaugggagaagucgcccccgaauaccgucacgacucgcccgacugcggcaugauaauccuaugcaucgccgcacucgucauaaccaaacucgccgccggugaccgaucaggacugacagcagucauccgccgagcaaacaacgugcucaaaaacgaaaugaaacgcuacaaaggccuacuccccaaagacaucgccaacuccuucuacgaagucuucgaaaaacacccacacuucaucgacgucuucguccacuucggcaucgcacaaucaucaaccagaggcggcagccgcguugaaggcaucuucgcaggacucuuuaugaacgccuacggcgccggccaagucaugcuccgcuggggcguccuggcaaaaagcgucaaaaacaucaugcuaggccacgcuagcguccaagccgaaauggaacaagucgucgaaguuuacgaguacgcacaaaaacucggcggcgaagcaggcuucuaccacauccuaaacaaccccaaagccucccugcuaucacucacccaauucccccacuucuccagcgucguccucggcaacgccgcaggacuaggcaucaugggagaauaccgcgggacaccgcgcaaccaagaccucuacgacgccgccaaagccuacgccgaacaacucaaagaaaacggcgucauaaacuacucaguccucgaccucaccgccgaagaacucgaagccaucaaacaccaacucaacccaaaagacaacgacgucgaauuauaaggacuagugcaucacauuuaaaagcaucucagccuaccaugagaauaagagaaagaaaaugaagaucaauagcuuauucaucucuuuuucuuuuucguugguguaaagccaacacccugucuaaaaaacauaaauuucuuuaaucauuuugccucuuuucucugugcuucaauuaauaaaaaauggaaagaaccuagaucuaaaaaaaaaaaaaaaaaaaaaaaaaaaaaaaaaaaaaaaaaaaaaaaaaaaaaaaaaaaaaaaaugcaucccccccccccccccccccccccccccccccaaaggcucuuuucagagccaccagaauu

SEQ ID NO: 10487 - RNA, 1558 nt, Artificial Sequence
  mRNA product Design i-2 comprising derived and/or modified sequence from HRSV(A2)__P03418.1__N (wt)
ggggcgcugccuacggagguggcagccaucuccuucucggcaucaagcuuaccauggcucuuagcaaagucaaguugaaugauacacucaacaaagaucaacuucugucauccagcaaauacaccauccaacggagcacaggagauaguauugauacuccuaauuaugaugugcagaaacacaucaauaaguuauguggcauguuauuaaucacagaagaugcuaaucauaaauucacuggguuaauagguauguuauaugcgaugucuagguuaggaagagaagacaccauaaaaauacucagagaugcgggauaucauguaaaagcaaauggaguagauguaacaacacaucgucaagacauuaauggaaaagaaaugaaauuugaaguguuaacauuggcaagcuuaacaacugaaauucaaaucaacauugagauagaaucuagaaaauccuacaaaaaaaugcuaaaagaaaugggagagguagcuccagaauacaggcaugacucuccugauugugggaugauaauauuauguauagcagcauuaguaauaacuaaauuagcagcaggggacagaucuggucuuacagccgugauuaggagagcuaauaauguccuaaaaaaugaaaugaaacguuacaaaggcuuacuacccaaggacauagccaacagcuucuaugaaguguuugaaaaacauccccacuuuauagauguuuuuguucauuuugguauagcacaaucuucuaccagagguggcaguagaguugaagggauuuuugcaggauuguuuaugaaugccuauggugcagggcaagugauguuacgguggggagucuuagcaaaaucaguuaaaaauauuauguuaggacaugcuagugugcaagcagaaauggaacaaguuguugagguuuaugaauaugcccaaaaauuggguggugaagcaggauucuaccauauauugaacaacccaaaagcaucauuauuaucuuugacucaauuuccucacuucuccaguguaguauuaggcaaugcugcuggccuaggcauaaugggagaguacagagguacaccgaggaaucaagaucuauaugaugcagcaaaggcauaugcugaacaacucaaagaaaauggugugauuaacuacaguguacuagacuugacagcagaagaacuagaggcuaucaaacaucagcuuaauccaaaagauaaugauguagagcuuugaggacuagugcaucacauuuaaaagcaucucagccuaccaugagaauaagagaaagaaaaugaagaucaauagcuuauucaucucuuuuucuuuuucguugguguaaagccaacacccugucuaaaaaacauaaauuucuuuaaucauuuugccucuuuucucugugcuucaauuaauaaaaaauggaaagaaccuagaucuaaaaaaaaaaaaaaaaaaaaaaaaaaaaaaaaaaaaaaaaaaaaaaaaaaaaaaaaaaaaaaaaugcaucccccccccccccccccccccccccccccccaaaggcucuuuucagagccaccagaauu

SEQ ID NO: 10488 - RNA, 1558 nt, Artificial Sequence
  mRNA product Design i-2 comprising derived and/or modified sequence from HRSV(A2)__P03418.1__N (opt1)
ggggcgcugccuacggagguggcagccaucuccuucucggcaucaagcuuaccauggcccugagcaaggugaagcucaacgacacccugaacaaggaccagcugcucuccagcuccaaguacaccauccagcgcagcaccggcgacuccaucgacacccccaacuacgacguccagaagcacaucaacaagcugugcgggaugcugcucaucaccgaggacgccaaccacaaguucaccggccugaucgggaugcuguacgcgaugagccggcucggccgcgaggacacgaucaagauccugcgggacgccggguaccacgugaaggccaacggcguggacgucaccacccaccgccaggacaucaacggcaaggagaugaaguucgaggugcugacccucgccucccugacgaccgagauccagaucaacaucgagaucgagagccggaaguccuacaagaagaugcugaaggagaugggggagguggccccggaguaccgccacgacagccccgacugcggcaugaucauccucugcaucgcggcccuggucaucaccaagcuggccgccggggaccgguccggccucaccgcggugauccgccgggccaacaacgugcugaagaacgagaugaagcgcuacaaggggcugcuccccaaggacaucgccaacagcuucuacgaggucuucgagaagcacccccacuucaucgacguguucgugcacuucggcaucgcccaguccagcacgcggggcgggucccgcgucgagggcaucuucgccgggcuguucaugaacgcguacggcgccggccaggugaugcugcgguggggcgugcucgccaagagcgucaagaacaucaugcuggggcacgccuccgugcaggccgagauggagcaggucguggagguguacgaguacgcgcagaagcucgggggcgaggccggguucuaccacauccugaacaacccgaaggccagccugcugucccucacccaguucccccacuucagcagcgugguccugggcaacgccgccggccuggggaucaugggcgaguaccgcgggacgccccggaaccaggaccucuacgacgcggccaaggccuacgccgagcagcugaaggagaacggcgugaucaacuacuccgugcuggaccucaccgccgaggagcuggaggcgaucaagcaccagcugaaccccaaggacaacgacgucgagcucugaggacuagugcaucacauuuaaaagcaucucagccuaccaugagaauaagagaaagaaaaugaagaucaauagcuuauucaucucuuuuucuuuuucguugguguaaagccaacacccugucuaaaaaacauaaauuucuuuaaucauuuugccucuuuucucugugcuucaauuaauaaaaaauggaaagaaccuagaucuaaaaaaaaaaaaaaaaaaaaaaaaaaaaaaaaaaaaaaaaaaaaaaaaaaaaaaaaaaaaaaaaugcaucccccccccccccccccccccccccccccccaaaggcucuuuucagagccaccagaauu

SEQ ID NO: 10489 - RNA, 1558 nt, Artificial Sequence
  mRNA product Design i-2 comprising derived and/or modified sequence from HRSV(A2)__P03418.1__N (opt2)
ggggcgcugccuacggagguggcagccaucuccuucucggcaucaagcuuaccauggcccucuccaaggucaagcucaacgacacccucaacaaggaccagcuccucuccuccuccaaguacaccauccagcgcuccaccggcgacuccaucgacacccccaacuacgacguccagaagcacaucaacaagcucugcggcaugcuccucaucaccgaggacgccaaccacaaguucaccggccucaucggcaugcucuacgccaugucccgccucggccgcgaggacaccaucaagauccuccgcgacgccggcuaccacgucaaggccaacggcgucgacgucaccacccaccgccaggacaucaacggcaaggagaugaaguucgagguccucacccucgccucccucaccaccgagauccagaucaacaucgagaucgagucccgcaaguccuacaagaagaugcucaaggagaugggcgaggucgcccccgaguaccgccacgacucccccgacugcggcaugaucauccucugcaucgccgcccucgucaucaccaagcucgccgccggcgaccgcuccggccucaccgccgucauccgccgcgccaacaacguccucaagaacgagaugaagcgcuacaagggccuccuccccaaggacaucgccaacuccuucuacgaggucuucgagaagcacccccacuucaucgacgucuucguccacuucggcaucgcccaguccuccacccgcggcggcucccgcgucgagggcaucuucgccggccucuucaugaacgccuacggcgccggccaggucaugcuccgcuggggcguccucgccaaguccgucaagaacaucaugcucggccacgccuccguccaggccgagauggagcaggucgucgaggucuacgaguacgcccagaagcucggcggcgaggccggcuucuaccacauccucaacaaccccaaggccucccuccucucccucacccaguucccccacuucuccuccgucguccucggcaacgccgccggccucggcaucaugggcgaguaccgcggcaccccccgcaaccaggaccucuacgacgccgccaaggccuacgccgagcagcucaaggagaacggcgucaucaacuacuccguccucgaccucaccgccgaggagcucgaggccaucaagcaccagcucaaccccaaggacaacgacgucgagcucugaggacuagugcaucacauuuaaaagcaucucagccuaccaugagaauaagagaaagaaaaugaagaucaauagcuuauucaucucuuuuucuuuuucguugguguaaagccaacacccugucuaaaaaacauaaauuucuuuaaucauuuugccucuuuucucugugcuucaauuaauaaaaaauggaaagaaccuagaucuaaaaaaaaaaaaaaaaaaaaaaaaaaaaaaaaaaaaaaaaaaaaaaaaaaaaaaaaaaaaaaaaugcaucccccccccccccccccccccccccccccccaaaggcucuuuucagagccaccagaauu

SEQ ID NO: 10490 - RNA, 1558 nt, Artificial Sequence
  mRNA product Design i-2 comprising derived and/or modified sequence from HRSV(A2)__P03418.1__N (opt3)
ggggcgcugccuacggagguggcagccaucuccuucucggcaucaagcuuaccauggcccugagcaaggugaaacucaacgacacccuuaauaaggaucagcuguuguccucuucaaaauacacaauccaaagaaguacuggcgacagcauugauacgcccaacuaugacguccagaagcacauaaauaaauuaugcgggaugcugcuaaucaccgaggaugcuaaccauaaguucacaggacucauugguaugcuguacgcaauguccaggcuuggccgggaagacacuaucaagauucugcgcgaugccggguaucacguuaaagcgaauggaguggacguaaccacacaucgacaggauaucaacggcaaggagaugaaauuugaaguguugacccucgcuucucugacuacagagauacagaucaauauugaaaucgagucgcguaagucauacaaaaagaugcugaaggagaugggugaagucgccccugaguauagacacgacagcccagauugugggaugauuauccucugcauagcagccuuagugauuaccaaacuggcugcaggagacaggaguggccuuacggccguuauccggcgcgcuaacaauguguugaagaacgaaaugaaaagauacaagggccugcuaccgaaagauauugccaauuccuucuaugaggucuuugagaagcauccccacuucaucgacguguuuguacacuucgggaucgcgcaaucuagcacuaggggagguucccggguugaaggcauuuuugcaggacucuucaugaacgccuacggggcuggccaggugaugcugcgcugggguguccuugccaaaucagugaagaauauaaugcuggggcaugcaagugugcaggcugagauggaacaggucguugagguguacgaauaugcccaaaaguugggaggcgaggcgggcuuuuaccacauccucaacaauccuaaagccagccuguuaucucugacccaguucccacauuuuuccucaguagugcucgggaacgcagcuggacuugguauuaugggcgaguaucgagggacacccagaaaccaggaccuguacgaugccgcuaaggccuaugcagaacaguugaaagagaauggagucaucaacuacagcgugcuagaccugacugccgaggaacucgaagcuauaaagcaccaacugaauccuaaagauaacgacguugagcuuugaggacuagugcaucacauuuaaaagcaucucagccuaccaugagaauaagagaaagaaaaugaagaucaauagcuuauucaucucuuuuucuuuuucguugguguaaagccaacacccugucuaaaaaacauaaauuucuuuaaucauuuugccucuuuucucugugcuucaauuaauaaaaaauggaaagaaccuagaucuaaaaaaaaaaaaaaaaaaaaaaaaaaaaaaaaaaaaaaaaaaaaaaaaaaaaaaaaaaaaaaaaugcaucccccccccccccccccccccccccccccccaaaggcucuuuucagagccaccagaauu

SEQ ID NO: 10491 - RNA, 1558 nt, Artificial Sequence
  mRNA product Design i-2 comprising derived and/or modified sequence from HRSV(A2)__P03418.1__N (opt4)
ggggcgcugccuacggagguggcagccaucuccuucucggcaucaagcuuaccauggcccugagcaaggugaagcugaacgacacccugaacaaggaccagcugcugagcagcagcaaguacaccauccagagaagcaccggcgacagcaucgacacccccaacuacgacgugcagaagcacaucaacaagcugugcggcaugcugcugaucaccgaggacgccaaccacaaguucaccggccugaucggcaugcuguacgccaugagcagacugggcagagaggacaccaucaagauccugagagacgccggcuaccacgugaaggccaacggcguggacgugaccacccacagacaggacaucaacggcaaggagaugaaguucgaggugcugacccuggccagccugaccaccgagauccagaucaacaucgagaucgagagcagaaagagcuacaagaagaugcugaaggagaugggcgagguggcccccgaguacagacacgacagccccgacugcggcaugaucauccugugcaucgccgcccuggugaucaccaagcuggccgccggcgacagaagcggccugaccgccgugaucagaagagccaacaacgugcugaagaacgagaugaagagauacaagggccugcugcccaaggacaucgccaacagcuucuacgagguguucgagaagcacccccacuucaucgacguguucgugcacuucggcaucgcccagagcagcaccagaggcggcagcagaguggagggcaucuucgccggccuguucaugaacgccuacggcgccggccaggugaugcugagauggggcgugcuggccaagagcgugaagaacaucaugcugggccacgccagcgugcaggccgagauggagcaggugguggagguguacgaguacgcccagaagcugggcggcgaggccggcuucuaccacauccugaacaaccccaaggccagccugcugagccugacccaguucccccacuucagcagcguggugcugggcaacgccgccggccugggcaucaugggcgaguacagaggcacccccagaaaccaggaccuguacgacgccgccaaggccuacgccgagcagcugaaggagaacggcgugaucaacuacagcgugcuggaccugaccgccgaggagcuggaggccaucaagcaccagcugaaccccaaggacaacgacguggagcugugaggacuagugcaucacauuuaaaagcaucucagccuaccaugagaauaagagaaagaaaaugaagaucaauagcuuauucaucucuuuuucuuuuucguugguguaaagccaacacccugucuaaaaaacauaaauuucuuuaaucauuuugccucuuuucucugugcuucaauuaauaaaaaauggaaagaaccuagaucuaaaaaaaaaaaaaaaaaaaaaaaaaaaaaaaaaaaaaaaaaaaaaaaaaaaaaaaaaaaaaaaaugcaucccccccccccccccccccccccccccccccaaaggcucuuuucagagccaccagaauu

SEQ ID NO: 10492 - RNA, 1558 nt, Artificial Sequence
  mRNA product Design i-2 comprising derived and/or modified sequence from HRSV(A2)__P03418.1__N (opt5)
ggggcgcugccuacggagguggcagccaucuccuucucggcaucaagcuuaccauggcccugagcaaggugaaacucaacgacacccugaauaaggaucagcuucuguccucuagcaaauacacaauccaaagauccacgggcgacucuauugauacccccaacuaugacguccagaagcacaucaauaaacucugcgggaugcugcuuauuacagaggaugcuaaccauaaguucaccggacugaucggcaugcucuacgccaugagccggcuggggcgcgaagacacaauuaagauccugagagaugcgggauaucacguuaaagcuaauggcguggacgugaccacacaucggcaggauaucaacgggaaggagaugaaauuugaaguccucacccuggccucccuuacgaccgagauucagaucaauauugaaaucgagucucgcaagagcuacaaaaagaugcugaaggagaugggagaaguggccccugaguauagacacgacuccccggauuguggcaugauuauccucugcauugcugcccugguuaucacaaaacuugcugccggcgaccggagcgggcugaccgcggugauccgcagagccaacaauguccucaagaacgaaaugaaacgguacaagggacugcugcccaaagauauugcuaauucuuucuaugagguguuugagaagcauccucacuucaucgacguuuuugugcacuucggcauugcccaauccagcacacgcgggggaucuagagucgaaggcaucuuugcuggacucuucaugaacgccuacggggcgggccaggugaugcugcgguggggcgugcuugccaaauccgucaagaauauuaugcuggggcaugcuagcguucaggccgagauggaacaggugguggaggucuacgaauaugcucaaaagcucggaggcgaggccggguuuuaccacauccugaacaaucccaaagccucucuucugucccucacccaguucccucauuuuagcuccgugguucugggaaacgcugcgggccuggggaucaugggagaguaucgcggcacgcccagaaaccaggaccucuacgaugccgcuaaggccuaugccgaacagcugaaagagaauggcgugauuaacuacucuguccuugaccugacagcugaggaacucgaagccaucaagcaccaacugaauccuaaagauaacgacguggagcuuugaggacuagugcaucacauuuaaaagcaucucagccuaccaugagaauaagagaaagaaaaugaagaucaauagcuuauucaucucuuuuucuuuuucguugguguaaagccaacacccugucuaaaaaacauaaauuucuuuaaucauuuugccucuuuucucugugcuucaauuaauaaaaaauggaaagaaccuagaucuaaaaaaaaaaaaaaaaaaaaaaaaaaaaaaaaaaaaaaaaaaaaaaaaaaaaaaaaaaaaaaaaugcaucccccccccccccccccccccccccccccccaaaggcucuuuucagagccaccagaauu

SEQ ID NO: 10493 - RNA, 1558 nt, Artificial Sequence
  mRNA product Design i-2 comprising derived and/or modified sequence from HRSV(A2)__P03418.1__N (opt6)
ggggcgcugccuacggagguggcagccaucuccuucucggcaucaagcuuaccauggcacuaagcaaagucaaauuaaacgacacauuaaacaaagaccaacucuuaucaucaucaaaauacacaauacaaagaagcaccggagacaguaucgacacaccaaacuaugacguccaaaaacauauaaauaaauuaugcggcaugcucuuaaucacagaagacgccaaccauaaauuuacaggauuaauaggaauguuauaugcaaugucacgacuagguagagaagacacaauaaaaauacuaagagacgcaggcuaucacguaaaagcaaauggaguagacguaaccacacacagacaagacauaaauggaaaagaaaugaaauuugaaguauuaacacuagcaucacuaacaacagaaauacaaaucaacauagaaauagaaucaagaaaaagcuacaaaaaaauguuaaaagaaaugggagaagucgcaccagaauauagacaugauucaccagacugcggaaugauaauacuaugcauagcagcccuaguaauuacaaaacuagcagcaggagacagaagcggauuaacagcaguaauaagaagagcaaacaacguacuaaaaaacgaaaugaaaagauauaaaggauuauuaccaaaagacauagcaaacucauucuaugaaguauucgaaaaacacccccacuuuauagacgucuucguacacuucggaauagcccaaucauccacaagaggaggaucaagagucgaaggaauauucgcaggauuauucaugaacgcauauggcgcaggacaaguaaugcuaagauggggaguacuagcaaaauccgucaaaaacauaaugcuaggacacgcaucaguucaagcagaaauggaacaaguaguagaaguauacgaauacgcccaaaaacuaggaggagaagcaggauucuaccacauacuaaauaauccaaaagcaucacuacuaagccuaacccaauuuccccacuucucaaguguaguauuaggaaaugcagcuggacuaggaauaaugggagaauacagaggaacaccaagaaaccaagacuuauacgacgcagcaaaagcauacgcagagcaacuuaaagaaaacggaguaauaaacuauagcguacuagacuuaacagcagaagaacuggaagcaauaaaacaucaauuaaacccgaaagacaaugacguagaauuauaaggacuagugcaucacauuuaaaagcaucucagccuaccaugagaauaagagaaagaaaaugaagaucaauagcuuauucaucucuuuuucuuuuucguugguguaaagccaacacccugucuaaaaaacauaaauuucuuuaaucauuuugccucuuuucucugugcuucaauuaauaaaaaauggaaagaaccuagaucuaaaaaaaaaaaaaaaaaaaaaaaaaaaaaaaaaaaaaaaaaaaaaaaaaaaaaaaaaaaaaaaaugcaucccccccccccccccccccccccccccccccaaaggcucuuuucagagccaccagaauu

SEQ ID NO: 10494 - RNA, 1558 nt, Artificial Sequence
  mRNA product Design i-2 comprising derived and/or modified sequence from HRSV(A2)__P03418.1__N (opt11)
ggggcgcugccuacggagguggcagccaucuccuucucggcaucaagcuuaccauggcacucucgaaaguaaaacucaacgacacccucaacaaagaccaacuccuuuccagcuccaaauacaccauccaacgauccaccggagacuccaucgacacgcccaacuacgacguccagaaacacaucaacaagcucugcggaaugcuacuaaucaccgaggacgccaaccacaaauucacaggacuuauagggaugcucuacgccaugucccgccucggacgcgaagacacaauaaaaauccuacgagacgccggcuaccacguaaaggcaaacggcgucgacgucaccacacacagacaagacaucaacggaaaggaaaugaaauucgaaguccucacccucgccagccuaaccaccgagauccaaaucaacaucgaaaucgaaucacgcaaauccuacaagaaaaugcucaaagaaaugggagaagucgcccccgaauaccgucacgacucgcccgacugcggcaugauaauccuaugcaucgccgcacucgucauaaccaaacucgccgccggugaccgaucaggacugacagcagucauccgccgagcaaacaacgugcucaaaaacgaaaugaaacgcuacaaaggccuacuccccaaagacaucgccaacuccuucuacgaagucuucgaaaaacacccacacuucaucgacgucuucguccacuucggcaucgcacaaucaucaaccagaggcggcagccgcguugaaggcaucuucgcaggacucuuuaugaacgccuacggcgccggccaagucaugcuccgcuggggcguccuggcaaaaagcgucaaaaacaucaugcuaggccacgcuagcguccaagccgaaauggaacaagucgucgaaguuuacgaguacgcacaaaaacucggcggcgaagcaggcuucuaccacauccuaaacaaccccaaagccucccugcuaucacucacccaauucccccacuucuccagcgucguccucggcaacgccgcaggacuaggcaucaugggagaauaccgcgggacaccgcgcaaccaagaccucuacgacgccgccaaagccuacgccgaacaacucaaagaaaacggcgucauaaacuacucaguccucgaccucaccgccgaagaacucgaagccaucaaacaccaacucaacccaaaagacaacgacgucgaauuauaaggacuagugcaucacauuuaaaagcaucucagccuaccaugagaauaagagaaagaaaaugaagaucaauagcuuauucaucucuuuuucuuuuucguugguguaaagccaacacccugucuaaaaaacauaaauuucuuuaaucauuuugccucuuuucucugugcuucaauuaauaaaaaauggaaagaaccuagaucuaaaaaaaaaaaaaaaaaaaaaaaaaaaaaaaaaaaaaaaaaaaaaaaaaaaaaaaaaaaaaaaaugcaucccccccccccccccccccccccccccccccaaaggcucuuuucagagccaccagaauu

SEQ ID NO: 10495 - RNA, 1393 nt, Artificial Sequence
  mRNA product Design i-3 comprising derived and/or modified sequence from HRSV(A2)__P03418.1__N (wt)
gggagaaagcuuaccauggcucuuagcaaagucaaguugaaugauacacucaacaaagaucaacuucugucauccagcaaauacaccauccaacggagcacaggagauaguauugauacuccuaauuaugaugugcagaaacacaucaauaaguuauguggcauguuauuaaucacagaagaugcuaaucauaaauucacuggguuaauagguauguuauaugcgaugucuagguuaggaagagaagacaccauaaaaauacucagagaugcgggauaucauguaaaagcaaauggaguagauguaacaacacaucgucaagacauuaauggaaaagaaaugaaauuugaaguguuaacauuggcaagcuuaacaacugaaauucaaaucaacauugagauagaaucuagaaaauccuacaaaaaaaugcuaaaagaaaugggagagguagcuccagaauacaggcaugacucuccugauugugggaugauaauauuauguauagcagcauuaguaauaacuaaauuagcagcaggggacagaucuggucuuacagccgugauuaggagagcuaauaauguccuaaaaaaugaaaugaaacguuacaaaggcuuacuacccaaggacauagccaacagcuucuaugaaguguuugaaaaacauccccacuuuauagauguuuuuguucauuuugguauagcacaaucuucuaccagagguggcaguagaguugaagggauuuuugcaggauuguuuaugaaugccuauggugcagggcaagugauguuacgguggggagucuuagcaaaaucaguuaaaaauauuauguuaggacaugcuagugugcaagcagaaauggaacaaguuguugagguuuaugaauaugcccaaaaauuggguggugaagcaggauucuaccauauauugaacaacccaaaagcaucauuauuaucuuugacucaauuuccucacuucuccaguguaguauuaggcaaugcugcuggccuaggcauaaugggagaguacagagguacaccgaggaaucaagaucuauaugaugcagcaaaggcauaugcugaacaacucaaagaaaauggugugauuaacuacaguguacuagacuugacagcagaagaacuagaggcuaucaaacaucagcuuaauccaaaagauaaugauguagagcuuugaggacuaguuauaagacugacuagcccgaugggccucccaacgggcccuccuccccuccuugcaccgagauuaauaaaaaaaaaaaaaaaaaaaaaaaaaaaaaaaaaaaaaaaaaaaaaaaaaaaaaaaaaaaaaaaaugcaucccccccccccccccccccccccccccccccaaaggcucuuuucagagccaccagaauu

SEQ ID NO: 10496 - RNA, 1393 nt, Artificial Sequence
  mRNA product Design i-3 comprising derived and/or modified sequence from HRSV(A2)__P03418.1__N (opt1) R7597
gggagaaagcuuaccauggcccugagcaaggugaagcucaacgacacccugaacaaggaccagcugcucuccagcuccaaguacaccauccagcgcagcaccggcgacuccaucgacacccccaacuacgacguccagaagcacaucaacaagcugugcgggaugcugcucaucaccgaggacgccaaccacaaguucaccggccugaucgggaugcuguacgcgaugagccggcucggccgcgaggacacgaucaagauccugcgggacgccggguaccacgugaaggccaacggcguggacgucaccacccaccgccaggacaucaacggcaaggagaugaaguucgaggugcugacccucgccucccugacgaccgagauccagaucaacaucgagaucgagagccggaaguccuacaagaagaugcugaaggagaugggggagguggccccggaguaccgccacgacagccccgacugcggcaugaucauccucugcaucgcggcccuggucaucaccaagcuggccgccggggaccgguccggccucaccgcggugauccgccgggccaacaacgugcugaagaacgagaugaagcgcuacaaggggcugcuccccaaggacaucgccaacagcuucuacgaggucuucgagaagcacccccacuucaucgacguguucgugcacuucggcaucgcccaguccagcacgcggggcgggucccgcgucgagggcaucuucgccgggcuguucaugaacgcguacggcgccggccaggugaugcugcgguggggcgugcucgccaagagcgucaagaacaucaugcuggggcacgccuccgugcaggccgagauggagcaggucguggagguguacgaguacgcgcagaagcucgggggcgaggccggguucuaccacauccugaacaacccgaaggccagccugcugucccucacccaguucccccacuucagcagcgugguccugggcaacgccgccggccuggggaucaugggcgaguaccgcgggacgccccggaaccaggaccucuacgacgcggccaaggccuacgccgagcagcugaaggagaacggcgugaucaacuacuccgugcuggaccucaccgccgaggagcuggaggcgaucaagcaccagcugaaccccaaggacaacgacgucgagcucugaggacuaguuauaagacugacuagcccgaugggccucccaacgggcccuccuccccuccuugcaccgagauuaauaaaaaaaaaaaaaaaaaaaaaaaaaaaaaaaaaaaaaaaaaaaaaaaaaaaaaaaaaaaaaaaaugcaucccccccccccccccccccccccccccccccaaaggcucuuuucagagccaccagaauu

SEQ ID NO: 10497 - RNA, 1393 nt, Artificial Sequence
  mRNA product Design i-3 comprising derived and/or modified sequence from HRSV(A2)__P03418.1__N (opt2)
gggagaaagcuuaccauggcccucuccaaggucaagcucaacgacacccucaacaaggaccagcuccucuccuccuccaaguacaccauccagcgcuccaccggcgacuccaucgacacccccaacuacgacguccagaagcacaucaacaagcucugcggcaugcuccucaucaccgaggacgccaaccacaaguucaccggccucaucggcaugcucuacgccaugucccgccucggccgcgaggacaccaucaagauccuccgcgacgccggcuaccacgucaaggccaacggcgucgacgucaccacccaccgccaggacaucaacggcaaggagaugaaguucgagguccucacccucgccucccucaccaccgagauccagaucaacaucgagaucgagucccgcaaguccuacaagaagaugcucaaggagaugggcgaggucgcccccgaguaccgccacgacucccccgacugcggcaugaucauccucugcaucgccgcccucgucaucaccaagcucgccgccggcgaccgcuccggccucaccgccgucauccgccgcgccaacaacguccucaagaacgagaugaagcgcuacaagggccuccuccccaaggacaucgccaacuccuucuacgaggucuucgagaagcacccccacuucaucgacgucuucguccacuucggcaucgcccaguccuccacccgcggcggcucccgcgucgagggcaucuucgccggccucuucaugaacgccuacggcgccggccaggucaugcuccgcuggggcguccucgccaaguccgucaagaacaucaugcucggccacgccuccguccaggccgagauggagcaggucgucgaggucuacgaguacgcccagaagcucggcggcgaggccggcuucuaccacauccucaacaaccccaaggccucccuccucucccucacccaguucccccacuucuccuccgucguccucggcaacgccgccggccucggcaucaugggcgaguaccgcggcaccccccgcaaccaggaccucuacgacgccgccaaggccuacgccgagcagcucaaggagaacggcgucaucaacuacuccguccucgaccucaccgccgaggagcucgaggccaucaagcaccagcucaaccccaaggacaacgacgucgagcucugaggacuaguuauaagacugacuagcccgaugggccucccaacgggcccuccuccccuccuugcaccgagauuaauaaaaaaaaaaaaaaaaaaaaaaaaaaaaaaaaaaaaaaaaaaaaaaaaaaaaaaaaaaaaaaaaugcaucccccccccccccccccccccccccccccccaaaggcucuuuucagagccaccagaauu

SEQ ID NO: 10498 - RNA, 1393 nt, Artificial Sequence
  mRNA product Design i-3 comprising derived and/or modified sequence from HRSV(A2)__P03418.1__N (opt3)
gggagaaagcuuaccauggcccugagcaaggugaaacucaacgacacccuuaauaaggaucagcuguuguccucuucaaaauacacaauccaaagaaguacuggcgacagcauugauacgcccaacuaugacguccagaagcacauaaauaaauuaugcgggaugcugcuaaucaccgaggaugcuaaccauaaguucacaggacucauugguaugcuguacgcaauguccaggcuuggccgggaagacacuaucaagauucugcgcgaugccggguaucacguuaaagcgaauggaguggacguaaccacacaucgacaggauaucaacggcaaggagaugaaauuugaaguguugacccucgcuucucugacuacagagauacagaucaauauugaaaucgagucgcguaagucauacaaaaagaugcugaaggagaugggugaagucgccccugaguauagacacgacagcccagauugugggaugauuauccucugcauagcagccuuagugauuaccaaacuggcugcaggagacaggaguggccuuacggccguuauccggcgcgcuaacaauguguugaagaacgaaaugaaaagauacaagggccugcuaccgaaagauauugccaauuccuucuaugaggucuuugagaagcauccccacuucaucgacguguuuguacacuucgggaucgcgcaaucuagcacuaggggagguucccggguugaaggcauuuuugcaggacucuucaugaacgccuacggggcuggccaggugaugcugcgcugggguguccuugccaaaucagugaagaauauaaugcuggggcaugcaagugugcaggcugagauggaacaggucguugagguguacgaauaugcccaaaaguugggaggcgaggcgggcuuuuaccacauccucaacaauccuaaagccagccuguuaucucugacccaguucccacauuuuuccucaguagugcucgggaacgcagcuggacuugguauuaugggcgaguaucgagggacacccagaaaccaggaccuguacgaugccgcuaaggccuaugcagaacaguugaaagagaauggagucaucaacuacagcgugcuagaccugacugccgaggaacucgaagcuauaaagcaccaacugaauccuaaagauaacgacguugagcuuugaggacuaguuauaagacugacuagcccgaugggccucccaacgggcccuccuccccuccuugcaccgagauuaauaaaaaaaaaaaaaaaaaaaaaaaaaaaaaaaaaaaaaaaaaaaaaaaaaaaaaaaaaaaaaaaaugcaucccccccccccccccccccccccccccccccaaaggcucuuuucagagccaccagaauu

SEQ ID NO: 10499 - RNA, 1393 nt, Artificial Sequence
  mRNA product Design i-3 comprising derived and/or modified sequence from HRSV(A2)__P03418.1__N (opt4)
gggagaaagcuuaccauggcccugagcaaggugaagcugaacgacacccugaacaaggaccagcugcugagcagcagcaaguacaccauccagagaagcaccggcgacagcaucgacacccccaacuacgacgugcagaagcacaucaacaagcugugcggcaugcugcugaucaccgaggacgccaaccacaaguucaccggccugaucggcaugcuguacgccaugagcagacugggcagagaggacaccaucaagauccugagagacgccggcuaccacgugaaggccaacggcguggacgugaccacccacagacaggacaucaacggcaaggagaugaaguucgaggugcugacccuggccagccugaccaccgagauccagaucaacaucgagaucgagagcagaaagagcuacaagaagaugcugaaggagaugggcgagguggcccccgaguacagacacgacagccccgacugcggcaugaucauccugugcaucgccgcccuggugaucaccaagcuggccgccggcgacagaagcggccugaccgccgugaucagaagagccaacaacgugcugaagaacgagaugaagagauacaagggccugcugcccaaggacaucgccaacagcuucuacgagguguucgagaagcacccccacuucaucgacguguucgugcacuucggcaucgcccagagcagcaccagaggcggcagcagaguggagggcaucuucgccggccuguucaugaacgccuacggcgccggccaggugaugcugagauggggcgugcuggccaagagcgugaagaacaucaugcugggccacgccagcgugcaggccgagauggagcaggugguggagguguacgaguacgcccagaagcugggcggcgaggccggcuucuaccacauccugaacaaccccaaggccagccugcugagccugacccaguucccccacuucagcagcguggugcugggcaacgccgccggccugggcaucaugggcgaguacagaggcacccccagaaaccaggaccuguacgacgccgccaaggccuacgccgagcagcugaaggagaacggcgugaucaacuacagcgugcuggaccugaccgccgaggagcuggaggccaucaagcaccagcugaaccccaaggacaacgacguggagcugugaggacuaguuauaagacugacuagcccgaugggccucccaacgggcccuccuccccuccuugcaccgagauuaauaaaaaaaaaaaaaaaaaaaaaaaaaaaaaaaaaaaaaaaaaaaaaaaaaaaaaaaaaaaaaaaaugcaucccccccccccccccccccccccccccccccaaaggcucuuuucagagccaccagaauu

SEQ ID NO: 10500 - RNA, 1393 nt, Artificial Sequence
  mRNA product Design i-3 comprising derived and/or modified sequence from HRSV(A2)__P03418.1__N (opt5)
gggagaaagcuuaccauggcccugagcaaggugaaacucaacgacacccugaauaaggaucagcuucuguccucuagcaaauacacaauccaaagauccacgggcgacucuauugauacccccaacuaugacguccagaagcacaucaauaaacucugcgggaugcugcuuauuacagaggaugcuaaccauaaguucaccggacugaucggcaugcucuacgccaugagccggcuggggcgcgaagacacaauuaagauccugagagaugcgggauaucacguuaaagcuaauggcguggacgugaccacacaucggcaggauaucaacgggaaggagaugaaauuugaaguccucacccuggccucccuuacgaccgagauucagaucaauauugaaaucgagucucgcaagagcuacaaaaagaugcugaaggagaugggagaaguggccccugaguauagacacgacuccccggauuguggcaugauuauccucugcauugcugcccugguuaucacaaaacuugcugccggcgaccggagcgggcugaccgcggugauccgcagagccaacaauguccucaagaacgaaaugaaacgguacaagggacugcugcccaaagauauugcuaauucuuucuaugagguguuugagaagcauccucacuucaucgacguuuuugugcacuucggcauugcccaauccagcacacgcgggggaucuagagucgaaggcaucuuugcuggacucuucaugaacgccuacggggcgggccaggugaugcugcgguggggcgugcuugccaaauccgucaagaauauuaugcuggggcaugcuagcguucaggccgagauggaacaggugguggaggucuacgaauaugcucaaaagcucggaggcgaggccggguuuuaccacauccugaacaaucccaaagccucucuucugucccucacccaguucccucauuuuagcuccgugguucugggaaacgcugcgggccuggggaucaugggagaguaucgcggcacgcccagaaaccaggaccucuacgaugccgcuaaggccuaugccgaacagcugaaagagaauggcgugauuaacuacucuguccuugaccugacagcugaggaacucgaagccaucaagcaccaacugaauccuaaagauaacgacguggagcuuugaggacuaguuauaagacugacuagcccgaugggccucccaacgggcccuccuccccuccuugcaccgagauuaauaaaaaaaaaaaaaaaaaaaaaaaaaaaaaaaaaaaaaaaaaaaaaaaaaaaaaaaaaaaaaaaaugcaucccccccccccccccccccccccccccccccaaaggcucuuuucagagccaccagaauu

SEQ ID NO: 10501 - RNA, 1393 nt, Artificial Sequence
  mRNA product Design i-3 comprising derived and/or modified sequence from HRSV(A2)__P03418.1__N (opt6)
gggagaaagcuuaccauggcacuaagcaaagucaaauuaaacgacacauuaaacaaagaccaacucuuaucaucaucaaaauacacaauacaaagaagcaccggagacaguaucgacacaccaaacuaugacguccaaaaacauauaaauaaauuaugcggcaugcucuuaaucacagaagacgccaaccauaaauuuacaggauuaauaggaauguuauaugcaaugucacgacuagguagagaagacacaauaaaaauacuaagagacgcaggcuaucacguaaaagcaaauggaguagacguaaccacacacagacaagacauaaauggaaaagaaaugaaauuugaaguauuaacacuagcaucacuaacaacagaaauacaaaucaacauagaaauagaaucaagaaaaagcuacaaaaaaauguuaaaagaaaugggagaagucgcaccagaauauagacaugauucaccagacugcggaaugauaauacuaugcauagcagcccuaguaauuacaaaacuagcagcaggagacagaagcggauuaacagcaguaauaagaagagcaaacaacguacuaaaaaacgaaaugaaaagauauaaaggauuauuaccaaaagacauagcaaacucauucuaugaaguauucgaaaaacacccccacuuuauagacgucuucguacacuucggaauagcccaaucauccacaagaggaggaucaagagucgaaggaauauucgcaggauuauucaugaacgcauauggcgcaggacaaguaaugcuaagauggggaguacuagcaaaauccgucaaaaacauaaugcuaggacacgcaucaguucaagcagaaauggaacaaguaguagaaguauacgaauacgcccaaaaacuaggaggagaagcaggauucuaccacauacuaaauaauccaaaagcaucacuacuaagccuaacccaauuuccccacuucucaaguguaguauuaggaaaugcagcuggacuaggaauaaugggagaauacagaggaacaccaagaaaccaagacuuauacgacgcagcaaaagcauacgcagagcaacuuaaagaaaacggaguaauaaacuauagcguacuagacuuaacagcagaagaacuggaagcaauaaaacaucaauuaaacccgaaagacaaugacguagaauuauaaggacuaguuauaagacugacuagcccgaugggccucccaacgggcccuccuccccuccuugcaccgagauuaauaaaaaaaaaaaaaaaaaaaaaaaaaaaaaaaaaaaaaaaaaaaaaaaaaaaaaaaaaaaaaaaaugcaucccccccccccccccccccccccccccccccaaaggcucuuuucagagccaccagaauu

SEQ ID NO: 10502 - RNA, 1393 nt, Artificial Sequence
  mRNA product Design i-3 comprising derived and/or modified sequence from HRSV(A2)__P03418.1__N (opt11)
gggagaaagcuuaccauggcacucucgaaaguaaaacucaacgacacccucaacaaagaccaacuccuuuccagcuccaaauacaccauccaacgauccaccggagacuccaucgacacgcccaacuacgacguccagaaacacaucaacaagcucugcggaaugcuacuaaucaccgaggacgccaaccacaaauucacaggacuuauagggaugcucuacgccaugucccgccucggacgcgaagacacaauaaaaauccuacgagacgccggcuaccacguaaaggcaaacggcgucgacgucaccacacacagacaagacaucaacggaaaggaaaugaaauucgaaguccucacccucgccagccuaaccaccgagauccaaaucaacaucgaaaucgaaucacgcaaauccuacaagaaaaugcucaaagaaaugggagaagucgcccccgaauaccgucacgacucgcccgacugcggcaugauaauccuaugcaucgccgcacucgucauaaccaaacucgccgccggugaccgaucaggacugacagcagucauccgccgagcaaacaacgugcucaaaaacgaaaugaaacgcuacaaaggccuacuccccaaagacaucgccaacuccuucuacgaagucuucgaaaaacacccacacuucaucgacgucuucguccacuucggcaucgcacaaucaucaaccagaggcggcagccgcguugaaggcaucuucgcaggacucuuuaugaacgccuacggcgccggccaagucaugcuccgcuggggcguccuggcaaaaagcgucaaaaacaucaugcuaggccacgcuagcguccaagccgaaauggaacaagucgucgaaguuuacgaguacgcacaaaaacucggcggcgaagcaggcuucuaccacauccuaaacaaccccaaagccucccugcuaucacucacccaauucccccacuucuccagcgucguccucggcaacgccgcaggacuaggcaucaugggagaauaccgcgggacaccgcgcaaccaagaccucuacgacgccgccaaagccuacgccgaacaacucaaagaaaacggcgucauaaacuacucaguccucgaccucaccgccgaagaacucgaagccaucaaacaccaacucaacccaaaagacaacgacgucgaauuauaaggacuaguuauaagacugacuagcccgaugggccucccaacgggcccuccuccccuccuugcaccgagauuaauaaaaaaaaaaaaaaaaaaaaaaaaaaaaaaaaaaaaaaaaaaaaaaaaaaaaaaaaaaaaaaaaugcaucccccccccccccccccccccccccccccccaaaggcucuuuucagagccaccagaauu

SEQ ID NO: 10503 - protein, 391 aa, Artificial Sequence
  derived and/or modified protein sequence (wt) from HRSV(Memphis-37)__AIY60635.1__N
MALSKVKLNDTLNKDQLLSSSKYTIQRSTGDSIDTPNYDVQKHINKLCGMLLITEDANHKFTGVIGMLYAMSRLGREDTIKILRDAGYHVKANGVDVTTHRQDINGKEMKFEVLTLASLTTEIQINIEIESRKSYKKMLKEMGEVAPEYRHDSPDCGMIILCIAALVITKLAAGDRSGLTAVIRRANNVLKNEMKRYKGLLPKDIANSFYEVFEKYPHFIDVFVHFGIAQSSTRGGSRVEGIFAGLFMNAYGAGQVMLRWGVLAKSVKNIMLGHASVQAEMEQVVEVYEYAQKLGGEAGFYHILNNPKASLLSLTQFPHFSSVVLGNAAGLGIMGEYRGTPRNQDLYDAAKAYAEQLKENGVINYSVLDLTAEELEAIKHQLNPKDNDVEL

SEQ ID NO: 10504 - protein, 391 aa, Artificial Sequence
  derived and/or modified protein sequence (wt) from HRSV__O42053.1__N
MALSKVKLNDTLNKDQLLSSSKYTIQRSTGDNIDTPNYDVQKHLNKLCGMLLITEDANHKFTGLIGMLYAMSRLGREDTIKILKDAGYHVKANGVDITTYRQDINGKEMKFEVLTLSSLTSEIQVNIEIESRKSYKKMLKEMGEVAPEYRHDSPDCGMIILCIAALVITKLAAGDRSGLTAVIRRANNVLKNEIKRYKGLIPKDIANSFYEVFEKHPHLIDVFVHFGIAQSSTRGGSRVEGIFAGLFMNAYGSGQVMLRWGVLAKSVKNIMLGHASVQAEMEQVVEVYEYAQKLGGEAGFYHILNNPKASLLSLTQFPNFSSVVLGNAAGLGIMGEYRGTPRNQDLYDAAKAYAEQLKENGVINYSVLDLTAEELEAIKNQLNPKEDDVEL

SEQ ID NO: 10505 - protein, 391 aa, Artificial Sequence
  derived and/or modified protein sequence (wt) from HRSV__AAC55964.1__N
MALSKVKLNDTLNKDQLLSSSKYTIQRSTGDSIDTPNYDVQKHINKLCGMLLITEDANHKFTGLIGMLYAMSRLGREDTIKILRDAGYHVKANGVDVTTHRQDINGKEMKFEVLTLASLTTEIQINIEIESRKSYKKMLKEMGEVAPEYRHDSPDCGMIILCIAALVITKLAAGDRSGLTAVIRRANNVLKNEMKRYKGLLPKDIANSFYEVFEKHPHFIDVFVHFGIAQSSTRGGSRVEGIFAGLFMNAYGAGQVMLRWGVLAKSIKNIMLGHASVQAEMEQVVEVYEYAQKLGGEAGFYHILNNPKASLLSLTQFPHFSSVVLGNAAGLGIMGEYRGTPRNQDLYDAAKAYAEQLKENGVINYSVLDLTAEELEAIKHQLNPKDNDVEL

SEQ ID NO: 10506 - protein, 391 aa, Artificial Sequence
  derived and/or modified protein sequence (wt) from HRSV__AAR14261.1__N
MALSKVKLNDTLNKDQLLSSSKYTIQRSTGDNIDTPNYDVQKHLNKLCGMLLITEDANHKFTGLIGMLYAMSRLGREDTIKILKDAGYHVKANGVDITTYRQDINGKEMKFEVLTLSSLTSEIQVNIEIESRKSYKKMLKEMGEVAPEYRHDSPDCGMIILCIAALVITKLAAGDRSGLTAVIRRANNVLKNEIKRYKGLIPKDIANSFYEVFEKHPHLIDVFVHFGIAQSSTRGGSRVEGIFAGLFMNAYGSGQVMLRWGVLAKSVKNIMLGHASVQAEMEQVVEVYEYAQKLGGEAGFYHILNNPKASLLSLTQFPNFSSVVLGNAAGLGIMGEYRGTPRNQDLYDAAKAYAEQLKENGVINYSVLDLTAEELEAIKHQLNPKEDDVEL

SEQ ID NO: 10507 - protein, 391 aa, Artificial Sequence
  derived and/or modified protein sequence (wt) from HRSV__ABG81855.1__N
MALSKVKLNDTLNKDQLLSSSKYTIQRSTGDSIDTPNYDVQKHINKLCGMLLITEDANHKFTGLIGMLYAMSRLGREDTIKILKDAGYHVKANGVDVTTHRQDINGKEMKFEVLTLASLTTEIQINIEIESRKSYKKMLKEMGEVAPEYRHDSPDCGMIILCIAALVITKLAAGDRSGLTAVIRRANNVLKNEMKRYKGLLPKDIANSFYEVFEKYPHFIDVFVHFGIAQSSTRGGSRVEGIFAGLFMNAYGAGQVMLRWGVLAKSVKNIMLGHASVQAEMEQVVEVYEYAQKLGGEAGFYHILSNPKASLLSLTQFPHFSSVVLGNAAGLGIMGEYRGTPRNQDLYDAAKAYAEQLKENGVINYSVLDLTAEELEAIKHQLNPKDNDVEL

SEQ ID NO: 10508 - protein, 391 aa, Artificial Sequence
  derived and/or modified protein sequence (wt) from HRSV__ABG81856.1__N
MALSKVKLNDTLNKDQLLSSSKYTIQRSTGDSIDTPNYDVQKHINKLCGMLLITEDANHKFTGLIGMLYAMPRLGREDTIKILKDAGYHVKANGVDVTTHRQDINGKEMKFEVLTLASLTTEIQINIEIESRKSYKKMLKEMGEVAPEYRHDSPDCGMIILCIAALVITKLAAGDRSGLTAVIRRANNVLKNEMKRYKGLLPKDIANSFYEVFEKYPHFIDVFVHFGIAQSSTRGGSRVEGIFAGLFMNAYGAGQVMLRWGVLAKSVKNIMLGHASVRAEMEQVVEVYEYAQKLGGEAGFYHILNNPKASLLSLTQFPHFSSVVLGNAAGLGIMGEYRGTPRNQDLYDAAKAYAEQLKENGVINYSVLDLTAEELEAIKHQLNPKDNDVEL

SEQ ID NO: 10509 - protein, 391 aa, Artificial Sequence
  derived and/or modified protein sequence (wt) from HRSV__ABG81857.1__N
MALSKVKLNDTLNKDQLLSSSKYTIQRSTGDSIDTPNYDVQKHINKLCGMLLITEDANHKFTGLIGMLYAMSRLGREDTIKILKDAGYHVKANGVDVTTHRQDINGKEMKFEVLTLASLTTEIQINIEIESRKSYKKMLKEMGEVAPEYRHDSPDCGMIILCIAALVITKLAAGDRSGLTAVIRRANNVLKNEMKRYKGLLPKDIANSFYEVFEKYPHFIDVFVHFGIAQSSTRGGSRVEGIFAGLFMNAYGAGQVMLRWGVLAKSVKNIMLGHASVQAEMEQVVEVYEYAQKLGGEAGFYHILNNPKASLLSLTQFPHFSSVVLGNAAGLGIMGEYRGTPRNQDLYDAAKAYAEQLKENGVINYSVLDLTAEELEAIKHQLNPKDNDVEL

SEQ ID NO: 10510 - protein, 391 aa, Artificial Sequence
  derived and/or modified protein sequence (wt) from HRSV__ABG81859.1__N
MALSKVKLNDTLNKDQLLSSSKYTIQRSTGDNIDTPNYDVQKHLNKLCGMLLITEDANHKFTGLIGMLYAMSRLGREDTIKILKDAGYHVKANGVDITTYRQDINGKEMKFEVLTLSSLTSEIQVNIEIESRKSYKKMLKEMGEVAPEYRHDSPDCGMIILCIAALVITKLAAGDRSGLTAVIRRANNVLKNEIKRYKGLIPKDIANSFYEVFEKHPHLIDVFVHFGIAQSSTRGGSRVEGIFAGLFMNAYGSGQVMLRWGVLAKSVKNIMLGHASVQAEMEQVVEVYEYAQKLGGEAGFYHILNNPKASLLSLTQFPNFSSVVLGNAAGLGIMGEYRGTPRNQDLYDAAKAYAEQLKENGVINYSVLDLTAEELEAIKHQLNPQEDDVEL

SEQ ID NO: 10511 - protein, 391 aa, Artificial Sequence
  derived and/or modified protein sequence (wt) from HRSV__ABG81860.1__N
MALSKVKLNDTLNKDQLLSSSKYTIQRSTGDNIDTPNYDVQKHLNKLCGMLLITEDANHKFTGLIGMLYAMSRLGREDTIKILKDAGYHVKANGVDITTYRQDINGKEMKFEVLTLSSLTSEIQVNIEIESRKSYKKMLKEMGEVAPEYRHDSPDCGMIILCIAALVITKLAAGDRSGLTAVIRRANNVLKNEIKRYKGLIPKDIANSFYEVFEKHPHLIDVFVHFGIAQSSTRGGSRVEGIFAGLFMNAYGSGQVMLRWGVLAKSVKNIMLGHASVQAEMEQVVEVYEYAQKLGGEAGFYHILNNPKASLLSLTQFPNFSSVVLGNAAGLGIMGEYRGTPRNQDLYDAAKAYAEQLKENGVINYCVLDLTAEELEAIKHQLNPKEDDVEL

SEQ ID NO: 10512 - protein, 391 aa, Artificial Sequence
  derived and/or modified protein sequence (wt) from HRSV__AEO45825.1__N
MALSKVKLNDTLNKDQLLSSSKYTIQRSTGDSIDTPNYDVQKHINKLCGMLLITEDANHKFTGVIGMLYAMSRLGREDTIKILRDAGYHVKANGVDVTTHRQDINGKEMKFEVLTLASLTTEIQINIEIESRKSYKKMLKEMGEVAPEYRHDSPDCGMIILCIAALVITKLAAGDRSGLTAVIRRANNVLKNEMKRYKGLLPKDIANSFYEVFEKHPHFIDVFVHFGIAQSSTRGGSRVEGIFAGLFMNAYGAGQVMLRWGVLAKSVKNIMLGHASVQAEMEQVVEVYEYAQKLGGEAGFYHILNNPKASLLSLTQFPHFSSVVLGNAAGLGIMGEYRGTPRNQDLYDAAKAYAEQLKENGVINYSVLDLTAEELEAIKHQLNPKDNDVEL

SEQ ID NO: 10513 - protein, 391 aa, Artificial Sequence
  derived and/or modified protein sequence (wt) from HRSV__AEO45884.1__N
MALSKVKLNDTLNKDQLLSSSKYTIQRSTGDSIDTPNYDVQKHINKLCGMLLITEDANHKFTGLIGMLYAMFRLGREDTIKILKDAGYHVKANGVDITTHRQDINGKEMKFEVLTLASLTTEIQINIEIESRKSYKKMLKEMGEVAPEYRHDSPDCGMIILCIAALVITKLAAGDRSGLTAVIRRANNVLKNEMKRYKGLLPKDIANSFYEVFEKYPHFIDVFVHFGIAQSSTRGGSRVEGIFAGLFMNAYGAGQVMLRWGVLAKSVKNIMLGHASVQAEMEQVVEVYEYAQKLGGEAGFYHILNNPKASLLSLTQFPHFSSVVLGNAAGLGIMGEYRGTPRNQDLYDAAKAYAEQLKENGVINYSVLDLTAEELEAIKHQLNPKDNDVEL

SEQ ID NO: 10514 - protein, 391 aa, Artificial Sequence
  derived and/or modified protein sequence (wt) from HRSV__AEO45904.1__N
MALSKVKLNDTLNKDQLLSSSKYTIQRSTGDSIDTPNYDVQKHINKLCGMLLITEDANHKFTGLIGMLYAMSRLGREDTIKILRDAGYHVKANGVDVTTHRQDINGKEMKFEVLTLASLTTEIQINIEIESRKSYKKMLKEMGEVAPEYRHDSPDCGMIILCIAALVITKLAAGDRSGLTAVIRRANNVLKNEMKRYKGLLPKDIANSFYEVFEKYPHFIDVFVHFGIAQSSTRGGSRVEGIFAGLFMNAYGAGQVMLRWGVLAKSVKNIMLGHASVQAEMEQVVEVYEYAQKLGGEAGFYHILNNPKASLLSLTQFPHFSSVVLGNAAGLGIMGEYRGTPRNQDLYDAAKAYAEQLKENGVINYSVLDLTAEELEAIKHQLNPKDNDVEL

SEQ ID NO: 10515 - protein, 391 aa, Artificial Sequence
  derived and/or modified protein sequence (wt) from HRSV__AEO45914.1__N
MALSKVKLNDTLNKDQLLSSSKYTIQRSTGDSIDTPNYDVQKHINKLCGMLLITEDANHKFTGLIGMLYAMSRLGREDTIKILKDAGYHVKANGVDITTHRQDINGKEMKFEVLTLASLTTEIQINIEIESRKSYKKMLKEMGEVAPEYRHDSPDCGMIILCIAALVITKLAAGDRSGLTAVIRRANNVLKNEMKRYKGLLPKDIANSFYEVFEKYPHFIDVFVHFGIAQSSTRGGSRVEGIFAGLFMNAYGAGQVMLRWGVLAKSVKNIMLGHASVQAEMEQVVEVYEYAQKLGGEAGFYHILNNPKASLLSLTQFPHFSSVVLGNAAGLGIMGEYRGTPRNQDLYDAAKAYAEQLKENGVINYSVLDLTAEELEAIKHQLNPKDNDVEL

SEQ ID NO: 10516 - protein, 391 aa, Artificial Sequence
  derived and/or modified protein sequence (wt) from HRSV__AEO45924.1__N
MALSKVKLNDTLNKDQLLSSSKYTIQRSTGDSIDTPNYDVQKHINKLCGMLLITEDANHKFTGLIGMLYAMSRLGREDTIKILKDAGYHVKANGVDVTTHRQDINGKEMKFEVLTLASLTTEIQINIEIESRKSYKKMLKEMGEVAPEYRHDSPDCGMIILCIAALVITKLAAGDRSGLTAVIRRANNVLKNEMKRYKGLLPKDIANSFYEVFEKYPHFIDVFVHFGIAQSSTRGGSRVEGIFAGLFMNAYGAGQVMLRWGVLAKSVKNIMLGHASVQAEMEQVVEVYEYAQKLGGEAGFYHILNNPKASLLSLTQFPHFSSVVLGNAAGLGIMGEYRGTPRNQDLYDAAKAYAEQLKENGVINYSVLDLTAEDLEAIKHQLNPKDNDVEL

SEQ ID NO: 10517 - protein, 391 aa, Artificial Sequence
  derived and/or modified protein sequence (wt) from HRSV__AEQ63439.1__N
MALSKVKLNDTLNKDQLLSSSKYTIQRSTGDSIDTPNYDVQKHINKLCGMLLITEDANHKFTGVIGMLYAMSRLGREDTIKILRDAGYHVKANGVDVTTHRQDINGKEMKFEVLTLASLTTEIQINIEIESRKSYKKMLKEMGEVAPEYRHDSPDCGMIILCIAALVITKLAAGDRSGLTAVIRRAHNVLKNEMKRYKGLLPKDIANSFYEVFEKYPHFIDVFVHFGIAQSSTRGGSRVEGIFAGLFMNAYGAGQVMLRWGVLAKSVKNIMLGHASVQAEMEQVVEVYEYAQKLGGEAGFYHILNNPKASLLSLTQFPHFSSVVLGNAAGLGIMGEYRGTPRNQDLYDAAKAYAEQLKENGVINYSVLDLTAEELEAIKHQLNPKDNDVEL

SEQ ID NO: 10518 - protein, 391 aa, Artificial Sequence
  derived and/or modified protein sequence (wt) from HRSV__AEQ63515.1__N
MALSKVKLNDTLNKDQLLSSSKYTIQRSTGDSIDTPNYDVQKHINKLCGMLLITEDANHKFTGLIGMLYAMSRLGREDTIKILKDAGYHVKANGVDITTHRQDINGKEMKFEVLTLASLTTEIQINIEIESRKSYKKMLKEMGEVAPEYRHDSPDCGMIILCIAALVITKLAAGDRSGLTAVIRRANNVLKNEMKRYKGLLPKDIANSFYEVFEKHPHFIDVFVHFGIAQSSTRGGSRVEGIFAGLFMNAYGAGQVMLRWGVLAKSVKNIMLGHASVQAEMEQVVEVYEYAQKLGGEAGFYHILNNPKASLLSLTQFPHFSSVVLGNAAGLGIMGEYRGTPRNQDLYDAAKAYAEQLKENGVINYSVLDLTAEELEAIKHQLNPKDNDVEL

SEQ ID NO: 10519 - protein, 391 aa, Artificial Sequence
  derived and/or modified protein sequence (wt) from HRSV__AEQ63581.1__N
MALSKVKLNDTLNKDQLLSSSKYTIQRSTGDNIDTPNYDVQKHLNKLCGMLLITEDANHKFTGLIGMLYAMSRLGREDTIKILKDAGYHVKANGVDITTYRQDINGKEMKFEVLTLSSLTSEIQVNIEIESRKSYKKMLKEMGEVAPEYRHDSPDCGMIILCIAALVITKLAAGDRSGLTAVIRRANNVLKNEIKRYKGLIPKDIANSFYEVFEKHPHLIDVFVHFGIAQSSTRGGSRVEGIFAGLFMNAYGSGQVMLRWGVLAKSVKNIMLGHASVQAEMEQVVEVYEYAQKLGGEAGFYHILNNPKASLLSLTQFPNFSSVVLGNAAGLGIMGEYRGTPRNQDLYDAAKAYAEQLKENGVINYSVLDLTTEELEAIKHQLNPKEDDVEL

SEQ ID NO: 10520 - protein, 391 aa, Artificial Sequence
  derived and/or modified protein sequence (wt) from HRSV__AEQ63625.1__N
MALSKVKLNDTLNKDQLLSSSKYTIQRSTGDNIDTPNYDVQKHLNKLCGMLLITEDANHKFTGLIGMLYAMSRLGREDTIKILKDAGYHVKANGVDITTYRQDINGKEMKFEVLTLSSLTSEIQVNIEIESRKSYKKMLKEMGEVAPEYRHDSPDCGMIILCIAALVITKLAAGDRSGLTAVIRRANNVLKNEIKRYKGLIPKDIANSFYEVFEKHPHLIDVFVHFGIAQSSTRGGSRVEGIFAGLFMNAYGSGQVMLRWGVLAKSVKNIMLGHASVQAEMEQVVEVYEYAQKLGGEAGFYHILNNPKASLLSLTQFPNFSSVVLGNAAGLGIIGEYRGTPRNQDLYDAAKAYAEQLKENGVINYSVLDLTTEELEAIKHQLNPKEDDVEL

SEQ ID NO: 10521 - protein, 391 aa, Artificial Sequence
  derived and/or modified protein sequence (wt) from HRSV__AFI25257.1__N
MALSKVKLNDTLNKDQLLSSSKYTIQRSTGDNIDTPNYDVQKHLNKLCGMLLITEDANHKFTGLIGMLYAMSRLGREDTIKILKDAGYHVKANGVDITTYRQDINGKEMKFEVLTLSSLTSEIQVNIEIESRKSYKKMLKEMGEVAPEYRHDSPDCGMIILCIAALVITKLAAGDRSGLTAVIRRANNVLKNEIKRYKGLIPKDIANSFYEVFEKHPHLIDVFVHFGIAQSSTRGGSRVEGIFAGLFMNAYGSGQVMLRWGVLTKSVKNIMLGHASVQAEMEQVVEVYEYAQKLGGEAGFYHILNNPKASLLSLTQFPNFSSVVLGNAAGLGIMGEYRGTPRNQDLYDAAKAYAEQLKENGVINYSVLDLTAEELEAIKHQLNPKEDDVEL

SEQ ID NO: 10522 - protein, 391 aa, Artificial Sequence
  derived and/or modified protein sequence (wt) from HRSV__AFM55228.1__N
MALSKVKLNDTLNKDQLLSSSKYTIQRSTGDSIDTPNYDVQKHINKLCGMLLITEDANHKFTGVIGMLYAMSRLGREDTIKILRDAGYHVKANGVDVTTHRQDINGKEMKFEVLTLASLTTEIQTNIEIESRKSYKKMLKEMGEVAPEYRHDSPDCGMIILCIAALVITKLAAGDRSGLTAVIRRANNVLKNEMKRYKGLLPKDIANSFYEVFEKYPHFIDVFVHFGIAQSSTRGGSRVEGIFAGLFMNAYGAGQVMLRWGVLAKSVKNIMLGHASVQAEMEQVVEVYEYAQKLGGEAGFYHILNNPKASLLSLTQFPHFSSVVLGNAAGLGIMGEYRGTPRNQDLYDAAKAYAEQLKENGVINYSVLDLTAEELEAIKHQLNPKDNDVEL

SEQ ID NO: 10523 - protein, 391 aa, Artificial Sequence
  derived and/or modified protein sequence (wt) from HRSV__AFM55250.1__N
MALSKVKLNDTLNKDQLLSSSKYTIQRSTGDSIDTPNYDVQKHINKLCGMLLITEDANHKFTGVIGMLYAMSRLGREDTIKILRDAGYHVKANGVDVTTHRQDINGKEMKFEVLTLTSLTTEIQINIEIESRKSYKKMLKEMGEVAPEYRHDSPDCGMIILCIAALVITKLAAGDRSGLTAVIRRANNVLKNEMKRYKGLLPKDIANSFYEVFEKYPHFIDVFVHFGIAQSSTRGGSRVEGIFAGLFMNAYGAGQVMLRWGVLAKSVKNIMLGHASVQAEMEQVVEVYEYAQKLGGEAGFYHILNNPKASLLSLTQFPHFSSVVLGNAAGLGIMGEYRGTPRNQDLYDAAKAYAEQLKENGVINYSVLDLTAEELEAIKHQLNPKDNDVEL

SEQ ID NO: 10524 - protein, 391 aa, Artificial Sequence
  derived and/or modified protein sequence (wt) from HRSV__AFM55283.1__N
MALSKVKLNDTLNKDQLLSSSKYTIQRSTGDSIDTPNYDVQKHINKLCGMLLITEDANHKFTGIIGMLYAMSRLGREDTIKILRDAGYHVKANGVDVTTHRQDINGKEMKFEVLTLASLTTEIQINIEIESRKSYKKMLKEMGEVAPEYRHDSPDCGMIILCIAALVITKLAAGDRSGLTAVIRRANNVLKNEMKRYKGLLPKDIANSFYEVFEKYPHFIDVFVHFGIAQSSTRGGSRVEGIFAGLFMNAYGAGQVMLRWGVLAKSVKNIMLGHASVQAEMEQVVEVYEYAQKLGGEAGFYHILNNPKASLLSLTQFPHFSSVVLGNAAGLGIMGEYRGTPRNQDLYDAAKAYAEQLKENGVINYSVLDLTAEELEAIKHQLNPKDNDVEL

SEQ ID NO: 10525 - protein, 391 aa, Artificial Sequence
  derived and/or modified protein sequence (wt) from HRSV__AFM55514.1__N
MALSKVKLNDTLNKDHLLSSSKYTIQRSTGDSIDTPNYDVQKHINKLCGMLLITEDANHKFTGLIGMLYAMSRLGREDTIKILKDAGYHVKANGVDVTTHRQDINGKEMKFEVLTLASLTTEIQINIEIESRKSYKKMLKEMGEVAPEYRHDSPDCGMIILCIAALVITKLAAGDRSGLTAVIRRANNVLKNEMKRYKGLLPKDIANSFYEVFEKYPHFIDVFVHFGIAQSSTRGGSRVEGIFAGLFMNAYGAGQVMLRWGVLAKSVKNVMLGHASVQAEMEQVVEVYEYAQKLGGEAGFYHILNNPKASLLSLTQFPHFSSVVLGNAAGLGIMGEYRGTPRNQDLYDAAKAYAEQLKENGVINYSVLDLTAEELEAIKHQLNPKDNDVEL

SEQ ID NO: 10526 - protein, 391 aa, Artificial Sequence
  derived and/or modified protein sequence (wt) from HRSV__AFM55547.1__N
MALSKVKLNDTLNKDQLLSSSKYTIQRSTGDSIDTPNYDVQKHINKLCGMLLITEDANHKFTGLIGMLYAMSRLGREDTIKILKDAGYHVKANGVDVTTHRQDINGKEMKFEVLTLASLTTEIQINIEIESRKSYKKMLKEMGEVAPEYRHDSPDCGMIILCIAALVITKLAAGDRSGLTAVIRRANNVLKNEMKRYKGLLPKDIANSFYEVFEKHPHFIDVFVHFGIAQSSTRGGSRVEGIFAGLFMNAYGAGQVMLRWGVLAKSVKNIMLGHASVQAEMEQVVEVYEYAQKLGGEAGFYHILNNPKASLLSLTQFPHFSSVVLGNAAGLGIMGEYRGTPRNQDLYDAAKAYAEQLKENGVINYSVLDLTAEELEAIKHQLNPKDNDVEL

SEQ ID NO: 10527 - protein, 391 aa, Artificial Sequence
  derived and/or modified protein sequence (wt) from HRSV__AFM95360.1__N
MALSKVKLNDTLNKDQLLSSSKYTIQRSTGDSIDTPNYDVQKHINKLCGMLLITEDANHKFTGLIGMLYAMSRLGREDTIKILKDAGYHIKANGVDITTHRQDINGKEMKFEVLTLASLTTEIQINIEIESRKSYKKMLKEMGEVAPEYRHDSPDCGMIILCIAALVITKLAAGDRSGLTAVIRRANNVLKNEMKRYKGLLPKDIANSFYEVFEKHPHFIDVFVHFGIAQSSTRGGSRVEGIFAGLFMNAYGAGQVMLRWGVLAKSVKNIMLGHASVQAEMEQVVEVYEYAQKLGGEAGFYHILNNPKASLLSLTQFPHFSSVVLGNAAGLGIMGEYRGTPRNQDLYDAAKAYAEQLKENGVINYSVLDLTAEELEAIKHQLNPKDNDVEL

SEQ ID NO: 10528 - protein, 391 aa, Artificial Sequence
  derived and/or modified protein sequence (wt) from HRSV__AFX95846.1__N
MAPSKVKLNDTLNKDQPPSSSKYTIQRSTGDSTDTPNYDVQKHTNKLCGMLLITEDANHKFTGLIGMLYAMSRLGREDTIKILKDAGYHVKANGVDVTTHRQDINGKEMKFEVLTLASLTTEIQINIEIESRKSYKKMLKEMGEVAPEYRHDSPDCGMIILCIAALVITKLAAGDRSGLTAVIRRANNVLKNEMKRYKGLLPKDIANSFYEVFEKYPHFIDVFVHFGIAQSSTRGGSRVEGIFAGLFMNAYGAGQVMLRWGVLAKSVKNIMLGHASVQAEMEQVVEVYEYAQKLGGEAGFYHILNNPKASLLSLTQFPHFSSVVLGNAAGLGIMGEYRGTPRNQDLYDAAKAYAEQLKENGVINYSVLDLTAEELEAIKHQLNPKDNDVEL

SEQ ID NO: 10529 - protein, 391 aa, Artificial Sequence
  derived and/or modified protein sequence (wt) from HRSV__AGN28666.1__N
MALSKVKLNDTLNKDQLLSSSKYTIQRSTGDNIDTPNYDVQKHLNKLCGMLLITEDANHKFTGLIGMLYAMSRLGREDTIKILKDAGYHVKANGVDITTYRQDINGKEMKFEVLTLSSLTSEIQVNIEIESRKSYKKMLKEMGEVAPEYRHDSPDCGMIILCIAALVITKLAAGDRSGLTAVIRRANNVLKNETKRYKGLIPKDIANSFYEVFEKHPHLIDVFVHFGIAQSSTRGGSRVEGIFAGLFMNAYGSGQVMLRWGVLAKSVKNIMLGHASVQAEMEQVVEVYEYAQKLGGEAGFYHILNNPKASLLSLTQFPNFSSVVLGNAAGLGIMGEYRGTPRNQDLYDAAKAYAEQLKENGVINYSVLDLTTEELEAIKHQLNPKEDDVEL

SEQ ID NO: 10530 - protein, 391 aa, Artificial Sequence
  derived and/or modified protein sequence (wt) from HRSV__AGN28787.1__N
MALSKVKLNDTLNKDQLLSSSKYTIQRSTGDNIDTPNYDVQKHLNKLCGMLLITEDANHKFTGLIGMLYAMSRLGREDTIKILKDAGYHVKANGVDITTYRQDINGKEMKFEVLTLSSLTSEIQVNIEIESRKSYKKMLKEMGEVAPEYRHDSPDCGMIILCIAALVITKLAAGDRSGLTAVIRRANNVLKNEIKRYKGLLPKDIANSFYEVFEKHPHLIDVFVHFGIAQSSTRGGSRVEGIFAGLFMNAYGSGQVMLRWGVLAKSVKNIMLGHASVQAEMEQVVEVYEYAQKLGGEAGFYHILNNPKASLLSLTQFPNFSSVVLGNAAGLGIMGEYRGTPRNQDLYDAAKAYAEQLKENGVINYSVLDLTAEELEAIKHQLNPKEDDVEL

SEQ ID NO: 10531 - protein, 391 aa, Artificial Sequence
  derived and/or modified protein sequence (wt) from HRSV__AGT75341.1__N
MALSKVKLNDTLNKDQLLSSSKYTIQRSTGDSIDTPNYDVQKHINKLCGMLLITEDANHKFTGLIGMLYAMSRLGREDTIKILKDAGYHVKANGVDVTTHRQDINGKEMKFEVLTLASLTTEIQINIEIESRKSYKKMLKEMGEVAPEYRHDSPDCGMIILCIAALVITKLAAGDRSGLTAVIRRANNVLKYEMKRYKGLLPKDIANSFYEVFEKYPHFIDVFVHFGIAQSSTRGGSRVEGIFAGLFMNAYGAGQVMLRWGVLAKSVKNIMLGHASVQAEMEQVVEVYEYAQKLGGEAGFYHILNNPKASLLSLTQFPHFSSVVLGNAAGLGIMGEYRGTPRNQDLYDAAKAYAEQLKENGVINYSVLDLTAEELEAIKHQLNPKDNDVEL

SEQ ID NO: 10532 - protein, 391 aa, Artificial Sequence
  derived and/or modified protein sequence (wt) from HRSV__AHA83645.1__N
MALSKVKLNDTLNKDQLLSSSKYAIQRSTGDNIDTPNYDVQKHLNKLCGMLLITEDANHKFTGLIGMLYAMSRLGREDTIKILKDAGYHVKANGVDITTYRQDINGKEMKFEVLTLSSLTSEIQVNIEIESRKSYKKMLKEMGEVAPEYRHDSPDCGMIILCIAALVITKLAAGDRSGLTAVIRRANNVLKNEIKRYKGLIPKDIANSFYEVFEKHPHLIDVFVHFGIAQSSTRGGSRVEGIFAGLFMNAYGSGQVMLRWGVLAKSVKNIMLGHASVQAEMEQVVEVYEYAQKLGGEAGFYHILNNPKASLLSLTQFPNFSSVVLGNAAGLGIMGEYRGTPRNQDLYDAAKAYAEQLKENGVINYSVLDLTTEELEAIKHQLNPKEDDVEL

SEQ ID NO: 10533 - protein, 391 aa, Artificial Sequence
  derived and/or modified protein sequence (wt) from HRSV__AHA83744.1__N
MALSKVKLNDTLNKDQLLSSSKYTIQRSTGDNIDTPNYDVQKHLNKLCGMLLITEDTNHKFTGLIGMLYAMSRLGREDTIKILKDAGYHVKANGVDITTYRQDINGKEMKFEVLTLSSLTSEIQVNIEIESRKSYKKMLKEMGEVAPEYRHDSPDCGMIILCIAALVITKLAAGDRSGLTAVIRRANNVLKNEIKRYKGLIPKDIANSFYEVFEKHPHLIDVFVHFGIAQSSTRGGSRVEGIFAGLFMNAYGSGQVMLRWGVLAKSVKNIMLGHASVQAEMEQVVEVYEYAQKLGGEAGFYHILNNPKASLLSLTQFPNFSSVVLGNAAGLGIMGEYRGTPRNQDLYDAAKAYAEQLKENGVINYSVLDLTAEELEAIKHQLNPKEDDVEL

SEQ ID NO: 10534 - protein, 391 aa, Artificial Sequence
  derived and/or modified protein sequence (wt) from HRSV__AHA83919.1__N
MALSKVKLNDTLNKDQLLSSSKYTIQRSTGDNIDTPNYDVQKHLNKLCGMLLITEDANHKFTGLIGMLYAMSRLGREDTIKILKDAGYHVKANGVDITTYRQDINGKEMKFEVLILSSLTSEIQVNIEIESRKSYKKMLKEMGEVAPEYRHDSPDCGMIILCIAALVITKLAAGDRSGLTAVIRRANNVLKNEIKRYKGLIPKDIANSFYEVFEKHPHLIDVFVHFGIAQSSTRGGSRVEGIFAGLFMNAYGSGQVMLRWGVLAKSVKNIMLGHASVQAEMEQVVEVYEYAQKLGGEAGFYHILNNPKASLLSLTQFPNFSSVVLGNAAGLGIMGEYRGTPRNQDLYDAAKAYAEQLKENGVINYSVLDLTTEELEAIKHQLNPKEDDVEL

SEQ ID NO: 10535 - protein, 391 aa, Artificial Sequence
  derived and/or modified protein sequence (wt) from HRSV__AHB33450.1__N
MALSKVKLNDTLNKDQLLSFSKYTIQRSTGDNIDTPNYDVQKHLNKLCGMLLITEDANHKFTGLIGMLYAMSRLGREDTIKILKDAGYHVKANGVDITTYRQDINGKEMKFEVLTLSSLTSEIQVNIEIESRKSYKKMLKEMGEVAPEYRHDSPDCGMIILCIAALVITKLAAGDRSGLTAVIRRANNVLKNEIKRYKGLIPKDIANSFYEVFEKHPHLIDVFVHFGIAQSSTRGGSRVEGIFAGLFMNAYGSGQVMLRWGVLAKSVKNIMLGHASVQAEMEQVVEVYEYAQKLGGEAGFYHILNNPKASLLSLTQFPNFSSVVLGNAAGLGIMGEYRGTPRNQDLYDAAKAYAEQLKENGVINYSVLDLTTEELEAIKHQLNPKEDDVEL

SEQ ID NO: 10536 - protein, 391 aa, Artificial Sequence
  derived and/or modified protein sequence (wt) from HRSV__AHC94758.1__N
MALSKVKLNDTLNKDQLLSSSKYAIQRSTGDSIDTPNYDVQKHINKLCGMLLITEDANHKFTGLIGMLYAMSRLGREDTIKILRDAGYHVKANGVDVTTHRQDINGKEMKFEVLTLASLTTEIQINIEIESRKSYKKMLKEMGEVAPEYRHDSPDCGMIILCIAALVITKLAAGDRSGLTAVIRRANNVLKNEMKRYKGLLPKDIANSFYEVFEKHPHFIDVFVHFGIAQSSTRGGSRVEGIFAGLFMNAYGAGQVMLRWGVLAKSVKNIMLGHASVQAEMEQVVEVYEYAQKLGGEAGFYHILNNPKASLLSLTQFPHFSSVVLGNAAGLGIMGEYRGTPRNQDLYDAAKAYAEQLKENGVINYSVLDLTAEELEAIKHQLNPKDNDVEL

SEQ ID NO: 10537 - protein, 391 aa, Artificial Sequence
  derived and/or modified protein sequence (wt) from HRSV__AHV80753.1__N
MALSKVKLNDTLNKDQLLSSSKYTIQRSTGDNIDTPNYDVQKHLNKLCGMLLITEDANHKFTGLIGMLYAMSRLGREDTIKILKDAGYHVKANGVDITTYRQDINGKEMKFEVLTLSSLTSEIQVNIEIESRKSYKKMLKEMGEVALEYRHDSPDCGMIILCIAALVITKLAAGDRSGLTAVIRRANNVLKNEIKRYKGLIPKDIANSFYEVFEKHPHLIDVFVHFGIAQSSTRGGSRVEGIFAGLFMNAYGSGQVMLRWGVLAKSVKNIMLGHASVQAEMEQVVEVYEYAQKLGGEAGFYHILNNPKASLLSLTQFPNFSSVVLGNAAGLGIMGEYRGTPRNQDLYDAAKAYAEQLKENGVINYSVLDLTTEELEAIKHQLNPKEEDVEL

SEQ ID NO: 10538 - protein, 391 aa, Artificial Sequence
  derived and/or modified protein sequence (wt) from HRSV__AHV80798.1__N
MALSKVKLNDTLNKDQLLSSSKYTIQRSTGDNIDTPNYDVQKHLNKLCGMLLITEDANHKFTGLIGMLYAMSRLGREDTIKILRDAGYHVKANGVDITTYRQDINGKEMKFEVLTLSSLTSEIQVNIEIESRKSYKKMLKEMGEVAPEYRHDSPDCGMIILCIAALVITKLAAGDRSGLTAVIRRANNVLKNEIKRYKGLIPKDIANSFYEVFEKHPHLIDVFVHFGIAQSSTRGGSRVEGIFAGLFMNAYGSGQVMLRWGVLAKSVKNIMLGHASVQAEMEQVVEVYEYAQKLGGEAGFYHILNNPKASLLSLTQFPNFSSVVLGNAAGLGIMGEYRGTPRNQDLYDAAKAYAEQLKENGVINYSVLDLTTEELEAIKHQLNPKEDDVEL

SEQ ID NO: 10539 - protein, 391 aa, Artificial Sequence
  derived and/or modified protein sequence (wt) from HRSV__AHV81073.1__N
MALSKVKLNDTLNKDQLLSSSKYTIQRSTGDNIDTPNYDVQKHLNKLCGMLLITEDANHKFTGLIGMLYAMSRLGREDTIKILKDAGYHVKANGVDITTYRQDINGKEMKFEVLTLSSLTSEIQVNIEIESRKSYKKMLKEMGEVAPEYRHDSPDCGMIILCIAALVITKLAAGDRSGLTAVIRRANNVLKNEIKRYKGLIPKDIANSFYEVFEKHPHLIDVFVHFGIAQSSTRGGSRVEGIFAGLFMNAYGSGQVMLRWGVLAKSVKNIMLGHASVQAEMEQVVEVYEYAQKLGGEAGFYHILNNPKASLLSLTQFPNFSSVVLGNAAGLGIMGEYRGTPRNQDLYDAAKAYAEQLKENGVINYSVLDLTTEELEAIKHQLNPKEEDVEL

SEQ ID NO: 10540 - protein, 391 aa, Artificial Sequence
  derived and/or modified protein sequence (wt) from HRSV__AHV81084.1__N
MALSKVKLNDTLNKDQLLSSSKYTIQRSTGDNIDTPNYDVQKHLNKLCGMLLITEDANHKFTGLIGMLYAMSRLGREDTIKILKDAGYHVKANGVDITTYRQDINGKEMKFEVLTLSSLTSEIQVNIEIESRKSYKKMLKEMGEVAPEYRHDSPDCGMIILCIAALVITKLAAGDRSGLTAVIRRANNVLKNEIKRYKGLIPKDIANSFYEVFEKHPHLIDVFVHFGIAQSSTRGGSRVEGIFAGLFMNAYGSGQVMLRWGVLAKSVKNIMLGHAGVQAEMEQVVEVYEYAQKLGGEAGFYHILNNPKASLLSLTQFPNFSSVVLGNAAGLGIMGEYRGTPRNQDLYDAAKAYAEQLKENGVINYSVLDLTTEELEAIKHQLNPKEDDVEL

SEQ ID NO: 10541 - protein, 391 aa, Artificial Sequence
  derived and/or modified protein sequence (wt) from HRSV__AHV81237.1__N
MALSKVKLNDTLNKDQLLSSSKYTIQRSTGDSIDTPNYDVQKHINKLCGMLLITEDANHKFTGLIGMLYAMSRLGREDTIKILKDAGYHVKANGVDVTTHRQDINGKEMKFEVLTLASLTTEIQINIEIESRKSYKKMLKEMGEVAPEYRHDSPDCGMIILCIAALVITKLAAGDRSGLTAVIRRANNVLKNEMKRYKGLLPKDIANSFYEVFEKYPHFIDVFVHFGIAQSSTRGGSRVEGIFAGLFMNAYGAGQVMLRWGVLAKSVKNIMLGHASVQAEMEQVVEVYEYAQKLGGEAGFYHILNNPKASLLSLTQFPHFSSVALGNAAGLGIMGEYRGTPRNQDLYDAAKAYAEQLKENGVINYSVLDLTAEELEAIKHQLNPKDNDVEL

SEQ ID NO: 10542 - protein, 391 aa, Artificial Sequence
  derived and/or modified protein sequence (wt) from HRSV__AHV81292.1__N
MALSKVKLNDTLNKDQLLSSSKYTIQRSTGDSIDTPNYDVQKHINKLCGMLLITEDANHKFTGLIGMLYAMSRLGREDTIKILKDAGYHAKANGVDVTTHRQDINGKEMKFEVLTLASLTTEIQINIEIESRKSYKKMLKEMGEVAPEYRHDSPDCGMIILCIAALVITKLAAGDRSGLTAVIRRANNVLKNEMKRYKGLLPKDIANSFYEVFEKYPHFIDVFVHFGIAQSSTRGGSRVEGIFAGLFMNAYGAGQVMLRWGVLAKSVKNIMLGHASVQAEMEQVVEVYEYAQKLGGEAGFYHILNNPKASLLSLTQFPHFSSVVLGNAAGLGIMGEYRGTPRNQDLYDAAKAYAEQLKENGVINYSVLDLTAEELEAIKHQLNPKDNDVEL

SEQ ID NO: 10543 - protein, 391 aa, Artificial Sequence
  derived and/or modified protein sequence (wt) from HRSV__AHV81457.1__N
MALSKVKLNDTLNKDQLLSSSKYTIQRSTGDSIDTPNYDVQKHINKLCGMLLITEDANHKFTGLIGMLYAMSRLGREDTIKILKDAGYHVKANGVDVTTHRQDINGKEMKFEVLTLASLTTEIQINIEVESRKSYKKMLKEMGEVAPEYRHDSPDCGMIILCIAALVITKLAAGDRSGLTAVIRRANNVLKNEMKRYKGLLPKDIANSFYEVFEKYPHFIDVFVHFGIAQSSTRGGSRVEGIFAGLFMNAYGAGQVMLRWGVLAKSVKNIMLGHASVQAEMEQVVEVYEYAQKLGGEAGFYHILNNPKASLLSLTQFPHFSSVVLGNAAGLGIMGEYRGTPRNQDLYDAAKAYAEQLKENGVINYSVLDLTAEELEAIKHQLNPKDNDVEL

SEQ ID NO: 10544 - protein, 391 aa, Artificial Sequence
  derived and/or modified protein sequence (wt) from HRSV__AHV81677.1__N
MALSKVKLNDTLNKDQLLSSSKYTIQRSTGDSIDTPNYDVQKHINKLCGMLLITEDANHKFTGLIGMLYAMSRLGREDTIKILKDAGYHVKANGVDVTTHRQDINGKEMKFEVLTLASLTTEIQINIEIESRKSYKKMLKEMGEVALEYRHDSPDCGMIILCIAALVITKLAAGDRSGLTAVIRRANNVLKNEMKRYKGLLPKDIANSFYEVFEKYPHFIDVFVHFGIAQSSTRGGSRVEGIFAGLFMNAYGAGQVMLRWGVLAKSVKNIMLGHASVQAEMEQVVEVYEYAQKLGGEAGFYHILNNPKASLLSLTQFPHFSSVVLGNAAGLGIMGEYRGTPRNQDLYDAAKAYAEQLKENGVINYSVLDLTAEELEAIKHQLNPKDNDVEL

SEQ ID NO: 10545 - protein, 391 aa, Artificial Sequence
  derived and/or modified protein sequence (wt) from HRSV__AHW80506.1__N
MALSKVKLNDTLNKDQLLSSSKYTIQRSTGDSIDTPNYDVQKHINKLCGMLLITEDANHKFTGLIGMLYAMSRLGREDTIKILKDAGYHVKANGVDVTTHRQDINGKEMRFEVLTLASLTTEIQINIEIESRKSYKKMLKEMGEVAPEYRHDSPDCGMIILCIAALVITKLAAGDRSGLTAVIRRANNVLKNEMKRYKGLLPKDIANSFYEVFEKYPHFIDVFVHFGIAQSSTRGGSRVEGIFAGLFMNAYGAGQVMLRWGVLAKSVKNIMLGHASVQAEMEQVVEVYEYAQKLGGEAGFYHILNNPKASLLSLTQFPHFSSVVLGNAAGLGIMGEYRGTPRNQDLYDAAKAYAEQLKENGVINYSVLDLTAEELEAIKHQLNPKDNDVEL

SEQ ID NO: 10546 - protein, 391 aa, Artificial Sequence
  derived and/or modified protein sequence (wt) from HRSV__AHW80735.1__N
MALSKVKLNDTLNKDQLLSSSKYTIQRSTGDSIDTPNYDVQKHINKLCGMLLITEDANHKFTGVIGMLYAMSRLGREDTIKILRDAGYHVKANGVDVTTHRQDINGKEMKFEVLTLASLTTEIQINIEIESRKSYKKMLKEMGEVAPEHRHDSPDCGMIILCIAALVITKLAAGDRSGLTAVIRRANNVLKNEMKRYKGLLPKDIANSFYEVFEKYPHFIDVFVHFGIAQSSTRGGSRVEGIFAGLFMNAYGAGQVMLRWGVLAKSVKNIMLGHASVQAEMEQVVEVYEYAQKLGGEAGFYHILNNPKASLLSLTQFPHFSSVVLGNAAGLGIMGEYRGTPRNQDLYDAAKAYAEQLKENGVINYSVLDLTAEELEAIKHQLNPKDNDVEL

SEQ ID NO: 10547 - protein, 391 aa, Artificial Sequence
  derived and/or modified protein sequence (wt) from HRSV__AHW80745.1__N
MALSKVKLNDTLNKDQLLSSSKYTIQRSTGDSIDTPNYDVQKHINKLCGMLLITEDANHKFTGVIGMLYAMSRLGREDTIKILRDAGYHVKANGVDVTTHRQDINGKEMKFEVLTLASLTTEIQINIEIESRKSYKKMLKEMGEVAPEHRHDSPDCGMIILCIAALVITKLAAGDRSGLTAVIRRANNVLKNEMKRYKGLLPKDIANSFYEVFEKYPHFIDVFVHFGIAQSSTRGGSRVEGIFAGLFMNAYGAGQVMLRWGVLAKSVKNIMLGHASVQAEMEQVVEVYEYAQKLGGEAGFYHILNNPKASLLSLTQFPHFSSVVLGNAAGLGIMGEYRGTPRNQDLYDAAKAYAEQLKENGVINYSVLDLTAEELETIKHQLNPKDNDVEL

SEQ ID NO: 10548 - protein, 391 aa, Artificial Sequence
  derived and/or modified protein sequence (wt) from HRSV__AHW80795.1__N
MALSKVKLNDTLNKDQLLSSSKYTIQRSTGDSIDTPNYDVQKHINKLCGMLLITEDANHKFTGVIGMLYAMSRLGREDTIKILRDAGYHVKANGVDVTTHRQDINGKEMKFEVLTLASLTTEIQINIEIESRKSYKKMLKEMGEVAPEYRHDSPDCGMIILCIAALVITKLAAGDRSGLTAVIRRANNVLKNEMKRYKGLLPKDIANSFYEVFEKHPHLIDVFVHFGIAQSSTRGGSRVEGIFAGLFMNAYGAGQVMLRWGVLAKSVKNIMLGHASVQAEMEQVVEVYEYAQKLGGEAGFYHILNNPKASLLSLTQFPHFSSVVLGNAAGLGIMGEYRGTPRNQDLYDAAKAYAEQLKENGVINYSVLDLTAEELEAIKHQLNPKDNDVEL

SEQ ID NO: 10549 - protein, 391 aa, Artificial Sequence
  derived and/or modified protein sequence (wt) from HRSV__AHW80935.1__N
MALSKVKLNDTLNKDQLLSSSKYTIQRSTGDSIDTPNYDVQKHINKLCGMLLITEDANHKFTGVIGMLYAMSRLGREDTIKILRDAGYHVKANGVDVTTHRQDINGKEMKFEVLTLASLTTEIQINIEIESRKSYKKMLKEMGEVAPEYRHDSPDCGMIILCIAALVITKLAAGDRSGLTAVIRRANNVLKNEMKRYKGLLPKDIANSFYEVFEKYPHFIDVFVHFGIAQSSTRGGSRVEGIFAGLFMNAYGAGQVMLRWGVLAKSVKNIMLGHASVQAEMEQVVEVYEYAQKLGGEAGFYHILNNPKASLLSLTQFPHFSSVVLGNAAGLGIMGEYRGTPRNQDLYDAAKAYAEQLKENGVINYSVLDLTAEELETIKHQLNPKDNDVEL

SEQ ID NO: 10550 - protein, 391 aa, Artificial Sequence
  derived and/or modified protein sequence (wt) from HRSV__AHW81055.1__N
MALSKVKLNDTLNKDQLLSSSKYTIQRSTGDSIDTPNYDVQKHINKLCGMLLITEDANHKFTGVIGMLYAMSRLGREDTIKILRDAGYHVKANGVDVTTHRQDINGKEMKFEVLTLASLTTEIQINIEIESRKSYKKMLKEMGEVAPEYRHDSPDCGMIILCIAALVITKLAAGDRSGLAAVIRRANNVLKNEMKRYKGLLPKDIANSFYEVFEKYPHFIDVFVHFGIAQSSTRGGSRVEGIFAGLFMNAYGAGQVMLRWGVLAKSVKNIMLGHASVQAEMEQVVEVYEYAQKLGGEAGFYHILNNPKASLLSLTQFPHFSSVVLGNAAGLGIMGEYRGTPRNQDLYDAAKAYAEQLKENGVINYSVLDLTAEELEAIKHQLNPKDNDVEL

SEQ ID NO: 10551 - protein, 391 aa, Artificial Sequence
  derived and/or modified protein sequence (wt) from HRSV__AHW81295.1__N
MALSKVKLNDTLNKDQLLSSSKYTIQRSTGDSIDTPNYDVQKHINKLCGMLLITEDANHKFTGVIGMLYAMSRLGREDTIKILRDAGYHVKANGVDVTTHRQDINGKEMKFEVLTLASLTTEIQINIEIESRKSYKKMLKEMGEVAPEYRHDSPDCGMIILCIAALVITKLAAGDRSGLTAVIRRANNVKKNKMKRYKGLLPKDIANSFYEVFEKYPHFIDVFVHFGIAQSSTRGGSRVEGIFAGLFMNAYGAGQVMLRWGVLAKSVKNIMLGHASVQAEMEQVVEVYEYAQKLGGEAGFYHILNNPKASLLSLTQFPHFSSVVLGNAAGLGIMGEYRGTPRNQDLYDAAKAYAEQLKENGVINYSVLDLTAEELEAIKHQLNPKDNDVEL

SEQ ID NO: 10552 - protein, 391 aa, Artificial Sequence
  derived and/or modified protein sequence (wt) from HRSV__AHX57191.1__N
MALSKVKLNDTLNKDQLLSSSKYTIQRSTGDSIDTPNYDVQKHINKLCGMLLITEDANHKFTGLIGMLYAMSRLGREDTIKILKDAGYHVKANGVDVTTHRQDINGKEMKFEVLTLASLTTEIQINIEIESRKSYKKMLKEMGEVAPEYRHDSPDCGMIILCIAALVITKLAAGDRSGLTAVIRRANNVLKNEMKRYKGLLPKDIANSFYEVFEKYPHFIDVFVHFGIAQSSTRGGSRVEGIFAGLFMNAYGAGQVMLRWGVLAKSVKNIMLGHASVQAEMEQVVEVYEYARKLGGEAGFYHILNNPKASLLSLTQFPHFSSVVLGNAAGLGIMGEYRGTPRNQDLYDAAKAYAEQLKENGVINYSVLDLTAEELEAIKHQLNPKDNDVEL

SEQ ID NO: 10553 - protein, 391 aa, Artificial Sequence
  derived and/or modified protein sequence (wt) from HRSV__AHX57554.1__N
MALSKVKLNDTINKDQLLSSSKYTIQRSTGDSIDTPNYDVQKHINKLCGMLLITEDANHKFTGLIGMLYAMSRLGREDTIKILKDAGYHVKANGVDVTTHRQDINGKEMKFEVLTLASLTTEIQINIEIESRKSYKKMLKEMGEVAPEYRHDSPDCGMIILCIAALVITKLAAGDRSGLTAVIRRANNVLKNEMKRYKGLLPKDIANSFYEVFEKYPHFIDVFVHFGIAQSSTRGGSRVEGIFAGLFMNAYGAGQVMLRWGVLAKSVKNIMLGHASVQAEMEQVVEVYEYAQKLGGEAGFYHILNNPKASLLSLTQFPHFSSVVLGNAAGLGIMGEYRGTPRNQDLYDAAKAYAEQLKENGVINYSVLDLTAEELEAIKHQLNPKDNDVEL

SEQ ID NO: 10554 - protein, 391 aa, Artificial Sequence
  derived and/or modified protein sequence (wt) from HRSV__AHY21293.1__N
MALSKVKLNDTLNKDQLLSSSKYTIQRSTGDNIDTPNYDVQKHLNKLCGMLLITEDANHKFTGLIGMLYAMSRLGREDTIKILKDAGYHVKANGVDITTYRQDINGKEMKFEVLTLSSLTSEIQVNIEIESRKSYKKMLKEMGEVAPEYRHDSPDCGMIILCIAALVITKLAAGDRSGLTAVIRRANNVLKNEIKRYKGLIPKDIANSFYEVFEKHPHLIDVFVHFGIAQSSTRGGSRVEGIFAGLFMNAYGSGQVMLRWGVLAKSVKNIMLGHASVQAEMEQIVEVYEYAQKLGGEAGFYHILNNPKASLLSLTQFPNFSSVVLGNAAGLGIMGEYRGTPRNQDLYDAAKAYAEQLKENGVINYSVLDLTAEELEAIKHQLNPKEDDVEL

SEQ ID NO: 10555 - protein, 391 aa, Artificial Sequence
  derived and/or modified protein sequence (wt) from HRSV__AHY21326.1__N
MALSKVKLNDTLNKDQLLSSSKYTIQRSTGDNIDTPNYDVQKHLNKLCGMLLITEDANHKFTGLIGMLYAMSRLGREDTIKILKDAGYHVKANGVDITTYRQDINGKEMKFEVLTLSSLTSEIQANIEIESRKSYKKMLKEMGEVAPEYRHDSPDCGMIILCIAALVITKLAAGDRSGLTAVIRRANNVLKNEIKRYKGLIPKDIANSFYEVFEKHPHLIDVFVHFGIAQSSTRGGSRVEGIFAGLFMNAYGSGQVMLRWGVLAKSVKNIMLGHASVQAEMEQVVEVYEYAQKLGGEAGFYHILNNPKASLLSLTQFPNFSSVVLGNAAGLGIMGEYRGTPRNQDLYDAAKAYAEQLKENGVINYSVLDLTAEELEAIKHQLNPKEDDVEL

SEQ ID NO: 10556 - protein, 391 aa, Artificial Sequence
  derived and/or modified protein sequence (wt) from HRSV__AHY21392.1__N
MALSKVKLNDTLNKDQLLSSSKYTIQRSTGDNIDTPNYDVQKHLNKLCGMLLITEDANHKFTGLIGMLYAMSRLGREDTIKILKDAGYHVKANGVDITTYRQDINGKEMKFEVLTLSSLTSEIQVNIEIESRKSYKKMLKEMGEVAPEYRHDSPDCGMIILCIAALVITKLAAGDRSGLTAVIRRANNVLKNEIKRYKGLIPKDIATSFYEVFEKHPHLIDVFVHFGIAQSSTRGGSRVEGIFAGLFMNAYGSGQVMLRWGVLAKSVKNIMLGHASVQAEMEQVVEVYEYAQKLGGEAGFYHILNNPKASLLSLTQFPNFSSVVLGNAAGLGIMGEYRGTPRNQDLYDAAKAYAEQLKENGVINYSVLDLTAEELEAIKHQLNPKEDDVEL

SEQ ID NO: 10557 - protein, 391 aa, Artificial Sequence
  derived and/or modified protein sequence (wt) from HRSV__AHY21425.1__N
MALSKVKLNDTLNKDQLLSSSKYTIQRSTGDSIDTPNYDVQKHINKLCGMLLITEDANHKFTGLIGMLYAMSRLGREDTIKILRDAGYHVKANGVDVTIHRQDINGKEMKFEVLTLASLTTEIQINIEIESRKSYKKMLKEMGEVAPEYRHDSPDCGMIILCIAALVITKLAAGDRSGLTAVIRRANNVLKNEMKRYKGLLPKDIANSFYEVFEKHPHLIDVFVHFGIAQSSTRGGSRVEGIFAGLFMNAYGAGQVMLRWGVLAKSVKNIMLGHASVQAEMEQVVEVYEYAQKLGGEAGFYHILNNPKASLLSLTQFPHFSSVVLGNAAGLGIMGEYRGTPRNQDLYDAAKAYAEQLKENGVINYSVLDLTAEELEAIKHQLNPKDNDVEL

SEQ ID NO: 10558 - protein, 391 aa, Artificial Sequence
  derived and/or modified protein sequence (wt) from HRSV__AIA62740.1__N
MALSKVKLNDTLNKDQLLSSSKYTIQRSTGDSIDTPNYDVQKHINNLCGMLLITEDANHKFTGVIGMLYAMSRLGREDTIKILRDAGYHVKANGVDVTTHRQDINGKEMKFEVLTLASLTTEIQINIEIESRKSYKKMLKEMGEVAPEYRHDSPDCGMIILCIAALVITKLAAGDRSGLTAVIRRANNVLKNEMKRYKGLLPKDIANSFYEVFEKYPHFIDVFVHFGIAQSSTRGGSRVEGIFAGLFMNAYGAGQVMLRWGVLAKSVKNIMLGHASVQAEMEQVVEVYEYAQKLGGEAGFYHILNNPKASLLSLTQFPHFSSVVLGNAAGLGIMGEYRGTPRNQDLYDAAKAYAEQLKENGVINYSVLDLTAEELEAIKHQLNPKDNDVEL

SEQ ID NO: 10559 - protein, 391 aa, Artificial Sequence
  derived and/or modified protein sequence (wt) from HRSV__AIA62979.1__N
MALSKVKLNDTLNKEHLLSSSKYTIQRSTGDSIDTPNYDVQKHINKLCGMLLITEDANHKFTGVIGMLYAMSRLGREDTIKILRDAGYHVKANGVDVTTHRQDINGKEMKFEVLTLASLTTEIQINIEIESRKSYKKMLKEMGEVAPEYRHDSPDCGMIILCIAALVITKLAAGDRSGLTAVIRRANNVLKNEMKRYKGLLPKDIANSFYEVFEKYPHFIDVFVHFGIAQSSTRGGSRVEGIFAGLFMNAYGAGQVMLRWGVLAKSVKNIMLGHASVQAEMEQVVEVYEYAQKLGGEAGFYHILNNPKASLLSLTQFPHFSSVVLGNAAGLGIMGEYRGTPRNQDLYDAAKAYAEQLKENGVINYSVLDLTAEELEAIKHQLNPKDNDVEL

SEQ ID NO: 10560 - protein, 388 aa, Artificial Sequence
  derived and/or modified protein sequence (wt) from HRSV__AIA63399.1__N
MALSKVKLNDTLNKDQLLSSSKYTIQRSTGDSIDTPNYDVQKHINKLCGMLLITEDANHKFTGVIGMLYAMSRLGREDTIKILRDAGYHVKANGVDVTTHRQDINGKEMKFEVLIFLTEIQINIEIESRKSYKKMLKEMGEVAPEYRHDSPDCGMIILCIAALVITKLAAGDRSGLTAVIRRANNVLKNEMKRYKGLLPKDIANSFYEVFEKYPHFIDVFVHFGIAQSSTRGGSRVEGIFAGLFMNAYGAGQVMLRWGVLAKSVKNIMLGHASVQAEMEQVVEVYEYAQKLGGEAGFYHILNNPKASLLSLTQFPHFSSVVLGNAAGLGIMGEYRGTPRNQDLYDAAKAYAEQLKENGVINYSVLDLTAEELEAIKHQLNPKDNDVEL

SEQ ID NO: 10561 - protein, 391 aa, Artificial Sequence
  derived and/or modified protein sequence (wt) from HRSV__AIY62423.1__N
MALSKVKLNDTLNKDQLLSSSKYTIQRSTGDNIDTPNYDVQKHLNKLCGMLLITEDANHKFTGLIGMLYAMSRLGREDTIKILKDAGYHVKANGVDITTYRQDINGKEMKFEVLTLSSLTSEIQVNIEIESRKSYKKMLKEMGEVAPEYRHDSPDCGMIILCIAALVITKLAAGDRSGLTAVIRRANNVLKNEIKRYKGLIPKDIANSFYEVFEKYPHLIDVFVHFGIAQSSTRGGSRVEGIFAGLFMNAYGSGQVMLRWGVLAKSVKNIMLGHASVQAEMEQVVEVYEYAQKLGGEAGFYHILNNPKASLLSLTQFPNFSSVVLGNAAGLGIMGEYRGTPRNQDLYDAAKAYAEQLKENGVINYSVLDLTTEELEAIKHQLNPKEDDVEL

SEQ ID NO: 10562 - protein, 391 aa, Artificial Sequence
  derived and/or modified protein sequence (wt) from HRSV__AIY70193.1__N
MALSKVKLNDTLNKDQLLSSSKYTIQRSTGDGIDTPNYDVQKHINKLCGMLLITEDANHKFTGLIGMLYAMSRLGREDTIKILKDAGYHVKANGVDVTTHRQDINGKEMKFEVLTLASLTTEIQINIEIESRKSYKKMLKEMGEVAPEYRHDSPDCGMIILCIAALVITKLAAGDRSGLTAVIRRANNVLKNEMKRYKGLLPKDIANSFYEVFEKYPHFIDVFVHFGIAQSSTRGGSRVEGIFAGLFMNAYGAGQVMLRWGVLAKSVKNIMLGHASVQAEMEQVVEVYEYAQKLGGEAGFYHILNNPKASLLSLTQFPHFSSVVLGNAAGLGIMGEYRGTPRNQDLYDAAKAYAEQLKENGVINYSVLDLTAEELEAIKHQLNPKDNDVEL

SEQ ID NO: 10563 - protein, 391 aa, Artificial Sequence
  derived and/or modified protein sequence (wt) from HRSV__AIZ95602.1__N
MALSKVKLNDTLNKDQLLSSSKYTIQRSTGDNIDTPNYDVQKHLNKLCGMLLITEDANHKFTGLIGMLYAMSRLGREDTIKILKDAGYHVKANGVDITTYRQDINGKEMKFEVLTLSSLTSEIQVNIEIESRKSYKKMLKEMGEVAPEYRHDSPDCGMTILCIAALVITKLAAGDRSGLTAVIRRANNVLKNEIKRYKGLIPKDIANSFYEVFEKHPHLIDVFVHFGIAQSSTRGGSRVEGIFAGLFMNAYGSGQVMLRWGVLAKSVKNIMLGHASVQAEMEQVVEVYEYAQKLGGEAGFYHILNNPKASLLSLTQFPNFSSVVLGNAAGLGIMGEYRGTPRNQDLYDAAKAYAEQLKENGVINYSVLDLTAEELEAIKHQLNPKEDDVEL

SEQ ID NO: 10564 - protein, 391 aa, Artificial Sequence
  derived and/or modified protein sequence (wt) from HRSV__AIZ95624.1__N
MALSKVKLNDTLNKDQLLSSSKYTIQRSTGDNIDTPNYDVQKHLNKLCGMLLITEDANHKFTGLIGMLYAMSRLGREDTIKILKDAGYHVKANGVDITTYRQDINGKEMKFEVLTLSSLTSEIQVNIEIESRKSYKKMLKEMGEVAPEYRHDSPDCGMIILCIAALVITKLAAGDRSGLTAVIRRANNVLKNEIKRYKGLIPKDIANSFYEVFEKYPHLIDVFVHFGIAQSSTRGGSRVEGIFAGLFMNAYGSGQVMLRWGVLAKSVKNIMLGHASVQAEMEQVVEVYEYAQKLGGEAGFYHILNNPKASLLSLTQFPNFSSVVLGNAAGLGIMGEYRGTPRNQDLYDAAKAYAEQLKENGVINYSVLDLTAEELEAIKHQLNPKEDDVEL

SEQ ID NO: 10565 - protein, 391 aa, Artificial Sequence
  derived and/or modified protein sequence (wt) from HRSV__AIZ95646.1__N
MALSKVKLNDTLNKDQLLSSSKYTIQRSTGDSIDTPNYDVQKHINKLCGMLLITEDANHKFTGVIGMLYAMSRLGREDTIKILRDAGYHVKANGVDVTTHRQDINGKEMKFEVLTLASLTTEIQINIEIESRKSYKKMLKEMGEVAPEYRHDSPDCGMIILCIAALVITKLAAGDRSGLTAVIRRANNVLKNEMKRYKGLLPKDIANSFYEVFEKYPHFIDVFVHFGIAQSSTRGGSRVEGIFAGLFMNAYGAGQVMLRWGVLAKSVKNIMLGHASVQAEMEQVVEVYEYAQKLGGEAGFYHILNNPKASLLSLTQFPHFSSVVLGNAAGLGIMGEYRGTPRNQDLYDAAKAYAEQLKENGVINYSVLDLTAEELEAIKHQLKPKDNDVEL

SEQ ID NO: 10566 - protein, 391 aa, Artificial Sequence
  derived and/or modified protein sequence (wt) from HRSV__AIZ95866.1__N
MALSKVKLNDTLNKDQLLSSSKYTIQRSTGDNIDTPNYDVQKHLNKLCGMLLITEDANHKFTGLIGMLYAMSRLGREDTIKILKDAGYHVKANGVDITTYRQDINGKEMKFEVLTLTSLTSEIQVNIEIESRKSYKKMLKEMGEVAPEYRHDSPDCGMIILCIAALVITKLAAGDRSGLTAVIRRANNVLKNEIKRYKGLIPKDIANSFYEVFEKHPHLIDVFVHFGIAQSSTRGGSRVEGIFAGLFMNAYGSGQVMLRWGVLAKSVKNIMLGHASVQAEMEQVVEVYEYAQKLGGEAGFYHILNNPKASLLSLTQFPNFSSVVLGNAAGLGIMGEYRGTPRNQDLYDAAKAYAEQLKENGVINYSVLDLTAEELEAIKHQLNPKEDDVEL

SEQ ID NO: 10567 - protein, 391 aa, Artificial Sequence
  derived and/or modified protein sequence (wt) from HRSV__AIZ95943.1__N
MALSKVKLNDTLNKDQLLSSSKYTIQRSTGDNIDTPNYDVQKHLNKLCGMLLITEDANHKFTGLIGMLYAMSRLGREDTIKILKDAGYHVKANGVDITTYRQDINGKEMKFEVLTLSSLTSEIQVNIEIESRKSYKKMLKEMGEVAPEYRHDSPDCGMIILCIAALVITKLAAGDRSGLTAVIRRANNVLKNEIKRYKGLIPKDIATSFYEVFEKHPHLIDVFVHFGIAQSSTRGGSRVEGIFAGLFMNAYGSGQVMLRWGVLAKSVKNIMLGHASVQAEMEQVVEVYEYAQKLGGEAGFYHILNNPKASLLSLTQFPNFSSVVLGNAAGLGIMGEYRGTPRNQDLYDAAKAYAEQLKENGVINYSVLDLTAEELEAIKHLLNPKEDDVEL

SEQ ID NO: 10568 - protein, 390 aa, Artificial Sequence
  derived and/or modified protein sequence (wt) from HRSV__AJF44633.1__N
MALSKVKLNDTLKDQLLSSSKYTIQRSTGDSIDTPNYDVQKHINKLCGMLLITEDANHKFTGVIGMLYAMSRLGREDTIKILRDAGYHVKANGVDVTTHRQDINGKEMKFEVLTLASLTTEIQINIEIESRKSYKKMLKEMGEVAPEYRHDSPDCGMIILCIAALVITKLAAGDRSGLTAVIRRANNVLKNEMKRYKGLLPKDIANSFYEVFEKYPHFIDVFVHFGIAQSSTRGGSRVEGIFAGLFMNAYGAGQVMLRWGVLAKSVKNIMLGHASVQAEMEQVVEVYEYAQKLGGEAGFYHILNNPKASLLSLTQFPHFSSVVLGNAAGLGIMGEYRGTPRNQDLYDAAKAYAEQLKENGVINYSVLDLTAEELEAIKHQLNPKDNDVEL

SEQ ID NO: 10569 - protein, 391 aa, Artificial Sequence
  derived and/or modified protein sequence (wt) from HRSV__AJF44638.1__N
MALSKVKLNDTLNKDQLLSSSKYTIQRSTGDNIDTPNYDVQKHLNKLCGMLLITEDANHKFTGLIGMLYAMSRLGREDTIKILKDAGYHVKANGVDVTTYRQDINGKEMKFEVLTLSSLTSEIQVNIEIESRKSYKKMLKEMGEVAPEYRHDSPDCGMIILCIAALVITKLAAGDRSGLTAVIRRANNVLKNEIKRYKGLIPKDIANSFYEVFEKHPHLIDVFVHFGIAQSSTRGGSRVEGIFAGLFMNAYGSGQVMLRWGVLAKSVKNIMLGHASVQAEMEQVVEVYEYAQKLGGEAGFYHILNNPKASLLSLTQFPNFSSVVLGNAAGLGIMGEYRGTPRNQDLYDAAKAYAEQLKENGVINYSVLDLTTEELEAIKHQLNPKEDDVEL

SEQ ID NO: 10570 - protein, 391 aa, Artificial Sequence
  derived and/or modified protein sequence (wt) from HRSV__AJF44733.1__N
MALSKVKLNDTLNKDQLLSSSKYTIQRSTGDSIDTPNYDVQKHINKLCGMLLITEDANHKFTGLIGMLYAMSRLGREDTIKILKDAGYHVKANGVDVTTHRQDINGKEMKFEVLTLTSLTTEIQINIEIESRKSYKKMLKEMGEVAPEYRHDSPDCGMIILCIAALVITKLAAGDRSGLTAVIRRANNVLKNEMKRYKGLLPKDIANSFYEVFEKYPHFIDVFVHFGIAQSSTRGGSRVEGIFAGLFMNAYGAGQVMLRWGVLAKSVKNIMLGHASVQAEMEQVVEVYEYAQKLGGEAGFYHILNNPKASLLSLTQFPHFSSVVLGNAAGLGIMGEYRGTPRNQDLYDAAKAYAEQLKENGVINYSVLDLTAEELEAIKHQLNPKDNDVEL

SEQ ID NO: 10571 - protein, 391 aa, Artificial Sequence
  derived and/or modified protein sequence (wt) from HRSV__AJO16072.1__N
MALSKVKLNDTLNKDQLLSSSKYTIQRSTGDNIDTPNYDVQKHLNKLCGMLLITEDANHKFTGLIGMLYAMSRLGREDTIKILKDAGYHVKANGVDITTYRQDINGKEMKFEVLTLSSLTSEIQVNIEIESRKSYKKMLKEMGEVAPEYRHDSPDCGMIILCVAALVITKLAAGDRSGLTAVIRRANNVLKNEIKRYKGLIPKDIANSFYEVFEKYPHLIDVFVHFGIAQSSTRGGSRVEGIFAGLFMNAYGSGQVMLRWGVLAKSVKNVMLGHASVQAEMEQVVEVYEYAQKLGGEAGFYHILNNPKASLLSLTQFPNFSSVVLGNAAGLGIMGEYRGTPRNQDLYDAAKAYAEQLKENGVINYSVLDLTTEELEAIKHQLNPKEDDVEL

SEQ ID NO: 10572 - protein, 391 aa, Artificial Sequence
  derived and/or modified protein sequence (wt) from HRSV__AJZ69864.1__N
MALSKVKLNDTLNKDQLLSSSKYTIQRSTGDSIDTPNYDVQKHINKLCGMLLITEDANHKFTGVIGMLYAMSRLGREDTIKILRDAGYHVKANGVDVTTHRHDINGKEMKFEVLTLASLTTEIQINIEIESRKSYKKMLKEMGEVAPEYRHDSPDCGMIILCIAALVITKLAAGDRSGLTAVIRRANNVLKNEMKRYKGLLPKDIANSFYEVFEKYPHFIDVFVHFGIAQSSTRGGSRVEGIFAGLFMNAYGAGQVMLRWGVLAKSVKNIMLGHASVQAEMEQVVEVYEYAQKLGGEAGFYHILNNPKASLLSLTQFPHFSSVVLGNAAGLGIMGEYRGTPRNQDLYDAAKAYAEQLKENGVINYSVLDLTAEELEAIKHQLNPKDNDVEL

SEQ ID NO: 10573 - protein, 391 aa, Artificial Sequence
  derived and/or modified protein sequence (wt) from HRSV__AJZ69875.1__N
MALSKVKLNDTLNKDQLLSSSKYTIQRSTGDNIDTPNYDVQKHINKLCGMLLITEDANHKFTGLIGMLYAMSRLGREDTIKILKDAGYHVKANGVDVTTHRQDINGKEMKFEVLTLASLTTEIQINIEIESRKSYKKMLKEMGEVAPEYRHDSPDCGMIILCIAALVITKLAAGDRSGLTAVIRRANNVLKNEMKRYKGLLPKDIANSFYEVFEKYPHFIDVFVHFGIAQSSTRGGSRVEGIFAGLFMNAYGAGQVMLRWGVLAKSVKNIMLGHASVQAEMEQVVEVYEYAQKLGGEAGFYHILNNPKASLLSLTQFPHFSSVVLGNAAGLGIMGEYRGTPRNQDLYDAAKAYAEQLKENGVINYSVLDLTAEELEAIKHQLNPKDNDVEL

SEQ ID NO: 10574 - protein, 391 aa, Artificial Sequence
  derived and/or modified protein sequence (wt) from HRSV__AJZ70062.1__N
MALSKVKLNDTLNKDQLLSSSKYTIQRSTGDSIDTPNYDVQKHINKLCGMLLITEDANHKFTGLIGMLYAMSRLGREDTIKILKDAGYHVKANGVDVTTHRQDINGKEMKFDVLTLASLTTEIQINIEIESRKSYKKMLKEMGEVAPEYRHDSPDCGMIILCIAALVITKLAAGDRSGLTAVIRRANNVLKNEMKRYKGLLPKDIANSFYEVFEKYPHFIDVFVHFGIAQSSTRGGSRVEGIFAGLFMNAYGAGQVMLRWGVLAKSVKNIMLGHASVQAEMEQVVEVYEYAQKLGGEAGFYHILNNPKASLLSLTQFPHFSSVVLGNAAGLGIMGEYRGTPRNQDLYDAAKAYAEQLKENGVINYSVLDLTAEELEAIKHQLNPKDNDVEL

SEQ ID NO: 10575 - protein, 391 aa, Artificial Sequence
  derived and/or modified protein sequence (wt) from HRSV__AKA45811.1__N
MALSKVKLNDTLNKDQLLSSSKYTIQRSTGDNIDTPNYDVQKHLNKLCGMLLITEDANHKFTGLIGMLYAMSRLGREDTIKILKDAGYHVKANGVDITTYRQDINGKEMKFEVLTLSSLTSEIQVNIEIESRKSYKKMLKEMGEVAPEYRHDSPDCGMIILCIAALVITKLAAGDRSGLTAVIRRANNVLKNEIKRYKGLIPKDIANSFYEVFEKHPHLIDVFVHFGIAQSSTRGGSRVEGIFAGLFMNAYGSGQVMLRWGVLAKSVKNIMLGHASVQAEMDQVVEVYEYAQKLGGEAGFYHILNNPKASLLSLTQFPNFSSVVLGNAAGLGIMGEYRGTPRNQDLYDAAKAYAEQLKENGVINYSVLDLTAEELEAIKHQLNPKEDDVEL

SEQ ID NO: 10576 - protein, 391 aa, Artificial Sequence
  derived and/or modified protein sequence (wt) from HRSV__AMA66531.1__N
MALSKVKLNDTLNKDQLLSSSKYTIQRSTGDNIDTPNYDVQKHLNKLCGMLLITEDANHKFTGLIGMLYAMSRLGREDTIKILKDAGYHVKANGVDITTYRQDINGKEMKFEVLTLSSLTSEIQVNIEIESRKSYKKMLKEMGEVAPEYRHDSPDCGMIILCIAALVITKLAAGDRSGLTAVIRRANNVLKNEIKRYKGLIPKDIANSFYEVFEKHPHLIDVFVHFGIAQSSTRGGSRVEGIFAGLFMNAYGSGQVMLRWGVLAKSVKNIMLGHASVQAEMEQVVEVYEYAQKLGGEAGFYHILNNPKASLLSLTQFPNFSSVVLGNAAGLGIMGEYRGTPRNQDLYDAAKAYAEQLKENGAINYSVLDLTAEELEAIKHQLNPKEDDVEL

SEQ ID NO: 10577 - protein, 391 aa, Artificial Sequence
  derived and/or modified protein sequence (wt) from HRSV__AMA66564.1__N
MALSKVKLNDTLNKDQLLSSSKYTIQRSTGDNIDTPNYDVQKHLNKLCGMLLITEDANHKFTGLIGMLYAMSRLGREDTIKILKDAGYHVKASGVDITTYRQDINGKEMKFEVLTLSSLTSEIQVNIEIESRKSYKKMLKEMGEVAPEYRHDSPDCGMIILCIAALVITKLAAGDRSGLTAVIRRANNVLKNEIKRYKGLIPKDIANSFYEVFEKHPHLIDVFVHFGIAQSSTRGGSRVEGIFAGLFMNAYGSGQVMLRWGVLAKSVKNIMLGHASVQAEMEQVVEVYEYAQKLGGEAGFYHILNNPKASLLSLTQFPNFSSVVLGNAAGLGIMGEYRGTPRNQDLYDAAKAYAEQLKENGVINYSVLDLTAEELEAIKHQLNPKEDDVEL

SEQ ID NO: 10578 - protein, 391 aa, Artificial Sequence
  derived and/or modified protein sequence (wt) from HRSV__AMA66575.1__N
MALSKVKLNDTLNKDQLLSSSKYTIQRSTGDSIDTPNYDVQKHINKLCGMLLITEDANHKFTGLIGMLYAMSRLGREDTIKILRDAGYHVKANGVDVATHRQDINGKEMKFEVLTLASLTTEIQINIEIESRKSYKKMLKEMGEVAPEYRHDSPDCGMIILCIAALVITKLAAGDRSGLTAVIRRANNVLKNEMKRYKGLLPKDIANSFYEVFEKHPHFIDVFVHFGIAQSSTRGGSRVEGIFAGLFMNAYGAGQVMLRWGVLAKSVKNIMLGHASVQAEMEQVVEVYEYAQKLGGEAGFYHILNNPKASLLSLTQFPHFSSVVLGNAAGLGIMGEYRGTPRNQDLYDAAKAYAEQLKENGVINYSVLDLTAEELEAIKHQLNPKDNDVEL

SEQ ID NO: 10579 - protein, 391 aa, Artificial Sequence
  derived and/or modified protein sequence (wt) from HRSV__AMA66619.1__N
MALSKVKLNDTLNKDQLLSSSKYTIQRSTGDNIDTPNYDVQKHLNKLCGMLLITEDANHKFTGLIGMLYAMSRLGREDTIKILKDAGYHVKANGVDITTYRQDINGKEMKLEVLTLSSLTSEIQANIEIESRKSYKKMLKEMGEVAPEYRHDSPDCGMIILCIAALVITKLAAGDRSGLTAVIRRANNVLKNEIKRYKGLIPKDIANSFYEVFEKHPHLIDVFVHFGIAQSSTRGGSRVEGIFAGLFMNAYGSGQVMLRWGVLAKSVKNIMLGHASVQAEMEQVVEVYEYAQKLGGEAGFYHILNNPKASLLSLTQFPNFSSVVLGNAAGLGIMGEYRGTPRNQDLYDAAKAYAEQLKENGVINYSVLDLTAEELEAIKHQLNPKEDDVEL

SEQ ID NO: 10580 - protein, 391 aa, Artificial Sequence
  derived and/or modified protein sequence (wt) from HRSV__AMA66806.1__N
MALSKVKLNDTLNKDQLLSSSKYTIQRSTGDSIDTPNYDVQKNINKLCGMLLITEDANHKFTGVIGMLYAMSRLGREDTIKILRDAGYHVKANGVDVTTHRQDINGKEMKFEVLTLASLTTEIQINIEIESRKSYKKMLKEMGEVAPEYRHDSPDCGMIILCIAALVITKLAAGDRSGLTAVIRRANNVLKNEMKRYKGLLPKDIANSFYEVFEKYPHFIDVFVHFGIAQSSTRGGSRVEGIFAGLFMNAYGAGQVMLRWGVLAKSVKNIMLGHASVQAEMEQVVEVYEYAQKLGGEAGFYHILNNPKASLLSLTQFPHFSSVVLGNAAGLGIMGEYRGTPRNQDLYDAAKAYAEQLKENGVINYSVLDLTAEELEAIKHQLNPKDNDVEL

SEQ ID NO: 10581 - protein, 391 aa, Artificial Sequence
  derived and/or modified protein sequence (wt) from HRSV__AMA66817.1__N
MALSKVKLNDTLNKDQLLSSSKYTIQRSTGDNIDTPNYDVQKHLNKLCGMLLITEDANHKFTGLIGMLYAMSRLGREDTIKILKDAGYHVKANGVDITTYRQEINGKEMKFEVLTLSSLTSEIQVNIEIESRKSYKKMLKEMGEVAPEYRHDSPDCGMIILCIAALVITKLAAGDRSGLTAVIRRANNVLKNEIKRYKGLIPKDIANSFYEVFEKYPHLIDVFVHFGIAQSSTRGGSRVEGIFAGLFMNAYGSGQVMLRWGVLAKSVKNIMLGHASVQAEMEQVVEVYEYAQKLGGEAGFYHILNNPKASLLSLTQFPNFSSVVLGNAAGLGIMGEYRGTPRNQDLYDAAKAYAEQLKENGVINYSVLDLTAEELEAIKHQLNPKEDDVEL

SEQ ID NO: 10582 - protein, 391 aa, Artificial Sequence
  derived and/or modified protein sequence (wt) from HRSV__AMA67092.1__N
MALSKVKLNDTLNKDQLLSSSKYTIQRSTGDNIDTPNYDVQKHLNKLCGMLLITEDANHKFTGLIGMLYAMSRLGREDTIKILKDAGYHVKANGVDITTYRQDINGKEMKFEVLTLSSLTSEIQVNIEIESRKSYKKMLKEMGEVAPEYRHDSPDCGMIILCMAALVITKLAAGDRSGLTAVIRRANNVLKNEIKRYKGLIPKDIANSFYEVFEKHPHLIDVFVHFGIAQSSTRGGSRVEGIFAGLFMNAYGSGQVMLRWGVLAKSVKNIMLGHASVQAEMEQVVEVYEYAQKLGGEAGFYHILNNPKASLLSLTQFPNFSSVVLGNAAGLGIMGEYRGTPRNQDLYDAAKAYAEQLKENGVINYSVLDLTAEELEAIKHQLNPKEDDVEL

SEQ ID NO: 10583 - protein, 391 aa, Artificial Sequence
  derived and/or modified protein sequence (wt) from HRSV__AMA67235.1__N
MALSKVKLNDTLNKDQLLSSSKYTIQRSTGDNIDTPNYDVQKHLNKLCGMLLITEDANHKFTGLIGMLYAMSRLGREDTIKILKDAGYHVKANGVDITTYRQDINGKEMKFEVLTLSSLTSEIQVNIEIESRKSYKKMLKEMGEVAPEYRHDSPDCGMIILCIAALVITKLAAGDRSGITAVIRRANNVLKNEIKRYKGLIPKDIANSFYEVFEKHPHLIDVFVHFGIAQSSTRGGSRVEGIFAGLFMNAYGSGQVMLRWGVLAKSVKNIMLGHASVQAEMEQVVEVYEYAQKLGGEAGFYHILNNPKASLLSLTQFPNFSSVVLGNAAGLGIMGEYRGTPRNQDLYDAAKAYAEQLKENGVINYSVLDLTAEELEAIKHQLNPKEDDVEL

SEQ ID NO: 10584 - protein, 391 aa, Artificial Sequence
  derived and/or modified protein sequence (wt) from HRSV__AMA67323.1__N
MALSKVKLNDTLNKDQLLSSSKYTIQRSTGDSIDTPNYDVQKHINKLCGMLLITEDANHKFTGVIGMLYAMSRLGREDTIKILRDAGYHVKANGVDITTHRQDINGKEMKFEVLTLASLTTEIQINIEIESRKSYKKMLKEMGEVAPEYRHDSPDCGMIILCIAALVITKLAAGDRSGLTAVIRRANNVLKNEMKRYKGLLPKDIANSFYEVFEKYPHFIDVFVHFGIAQSSTRGGSRVEGIFAGLFMNAYGAGQVMLRWGVLAKSVKNIMLGHASVQAEMEQVVEVYEYAQKLGGEAGFYHILNNPKASLLSLTQFPHFSSVVLGNAAGLGIMGEYRGTPRNQDLYDAAKAYAEQLKENGVINYSVLDLTAEELEAIKHQLNPKDNDVEL

SEQ ID NO: 10585 - protein, 391 aa, Artificial Sequence
  derived and/or modified protein sequence (wt) from HRSV__AMA67334.1__N
MALSKVKLNDTLNKDQLLSSSKYTIQRSTGDNIDTPNYDVQKHLNKLCGMLLITEDANHKFTGLIGMLYAMSRLGREDTIKILKDAGYHVKANGVDITTYRQDMNGKEMKFEVLTLSSLTSEIQVNIEIESRKSYKKMLKEMGEVAPEYRHDSPDCGMIILCIAALVITKLAAGDRSGLTAVIRRANNVLKNEIKRYKGLIPKDIANSFYEVFEKHPHLIDVFVHFGIAQSSTRGGSRVEGIFAGLFMNAYGSGQVMLRWGVLAKSVKNIMLGHASVQAEMEQVVEVYEYAQKLGGEAGFYHILNNPKASLLSLTQFPNFSSVVLGNAAGLGIMGEYRGTPRNQDLYDAAKAYAEQLKENGVINYSVLDLTAEELEAIKNQLNPKEDDVEL

SEQ ID NO: 10586 - protein, 391 aa, Artificial Sequence
  derived and/or modified protein sequence (wt) from HRSV__AMN91424.1__N
MALSKVKLNDTLNKDQLLSSSKYTIQRSTGDNIDTPNYDVQKHLNKLCGMLLITEDANHKFTGLIGMLYAMSRLGREDTIKILKDAGYHVKANGVDITTYRQDINGKEMKFEVLTLSSLTSEIQVNIEIESRRSYKKMLKEMGEVAPEYRHDSPDCGMIILCIAALVITKLAAGDRSGLTAVIRRANNVLKNEIKRYKGLIPKDIANSFYEVFEKHPHLIDVFVHFGIAQSSTRGGSRVEGIFAGLFMNAYGSGQVMLRWGVLAKSVKNIMLGHASVQAEMEQVVEVYEYAQKLGGEAGFYHILNNPKASLLSLTQFPNFSSVVLGNAAGLGIMGEYRGTPRNQDLYDAAKAYAEQLKENGVINYSVLDLTTEELEAIKHQLNPKEDDVEL

SEQ ID NO: 10587 - protein, 391 aa, Artificial Sequence
  derived and/or modified protein sequence (wt) from HRSV__AMT77353.1__N
MALSKVKLNDTLNKDQLLSSSKYTIQRSTGDNIDTPNYDVQKHLNKLCGMLLITEDANHKFTGLIGMLYAMSRLGREDTIKILKDAGYHVKANGVDITTYRQDINGKEMKFEVLTLSSLTSEIQVNIEIESRKSYKKMLKEMGEVAPEYRHDSPDCGMIILCIAALVITKLAAGDRSGLTAVIRRANNVLKNEIKRYKGLIPKDIASSFYEVFEKHPHLIDVFVHFGIAQSSTRGGSRVEGIFAGLFMNAYGSGQVMLRWGVLAKSVKNIMLGHASVQAEMEQVVEVYEYAQKLGGEAGFYHILNNPKASLLSLTQFPNFSSVVLGNAAGLGIMGEYRGTPRNQDLYDAAKAYAEQLKENGVINYSVLDLTTEELEAIKHQLNPKEDDVEL

SEQ ID NO: 10588 - protein, 391 aa, Artificial Sequence
  derived and/or modified protein sequence (wt) from HRSV__AMT77518.1__N
MALSKVKLNDTLNKDQLLSSSKYTIQRSTGDSIDTPNYDVQKHINKLCGMLLITEDANHKFTGLIGMLYAMSRLGREDTIKILKDAGYHVKANGVDVTTHRQDINGKEMKFEVLTLASLTTEIQINIEIESRKSYKKMLKEMGEVAPEYRHDSPDCGMIILCIAALVITKLAAGDRSGITAVIRRANNVLKNEMKRYKGLLPKDIANSFYEVFEKYPHFIDVFVHFGIAQSSTRGGSRVEGIFAGLFMNAYGAGQVMLRWGVLAKSVKNIMLGHASVQAEMEQVVEVYEYAQKLGGEAGFYHILNNPKASLLSLTQFPHFSSVVLGNAAGLGIMGEYRGTPRNQDLYDAAKAYAEQLKENGVINYSVLDLTAEELEAIKHQLNPKDNDVEL

SEQ ID NO: 10589 - protein, 391 aa, Artificial Sequence
  derived and/or modified protein sequence (wt) from HRSV__AMT77639.1__N
MALSKVKLNDTLNKDQLLSSSKYTIQRSTGDSIDTPNYDVQKHINKLCGMLLITEDANHKFTGLIGMLYAMSRLGREDTIKILKDAGYHVKANGVDVTTHRQDINGKEMKFEVLTLASLTTEIQINIEIESRKSYKKMLKEMGEVTPEYRHDSPDCGMIILCIAALVITKLAAGDRSGLTAVIRRANNVLKNEMKRYKGLLPKDIANSFYEVFEKYPHFIDVFVHFGIAQSSTRGGSRVEGIFAGLFMNAYGAGQVMLRWGVLAKSVKNIMLGHASVQAEMEQVVEVYEYAQKLGGEAGFYHILNNPKASLLSLTQFPHFSSVVLGNAAGLGIMGEYRGTPRNQDLYDAAKAYAEQLKENGVINYSVLDLTAEELEAIKHQLNPKDNDVEL

SEQ ID NO: 10590 - protein, 391 aa, Artificial Sequence
  derived and/or modified protein sequence (wt) from HRSV__AMT77727.1__N
MALSKVKLNDTLNKDQLLSSSKYTIQRSTGDSIDTPNYDVQKHINKLCGMLLITEDANHKFTGLIGMLYAMSRLGREDTIKILKDAGYHVKANGVDVTTHRQDINGKEMKFEVLTLASLTTEIQINIEIESRKSYKKMLKEMGEVAPEYRHDSPDCGMIILCIAALVITKLAAGDRSGLTAVNRRANNVLKNEMKRYKGLLPKDIANSFYEVFEKYPHFIDVFVHFGIAQSSTRGGSRVEGIFAGLFMNAYGAGQVMLRWGVLAKSVKNIMLGHASVQAEMEQVVEVYEYAQKLGGEAGFYHILNNPKASLLSLTQFPHFSSVVLGNAAGLGIMGEYRGTPRNQDLYDAAKAYAEQLKENGVINYSVLDLTAEELEAIKHQLNPKDNDVEL

SEQ ID NO: 10591 - protein, 391 aa, Artificial Sequence
  derived and/or modified protein sequence (wt) from HRSV__AMT78035.1__N
MALSKVKLNDTLNKDQLLSSSKYTIQRSTGDSIDTPNYDVQKHINKLCGMLLITEDANHKFTGLIGMLYAMSRLGREDTIKILKDAGYHVKASGVDVTTHRQDINGKEMKFEVLTLASLTTEIQINIEIESRKSYKKMLKEMGEVAPEYRHDSPDCGMIILCIAALVITKLAAGDRSGLTAVIRRANNVLKNEMKRYKGLLPKDIANSFYEVFEKYPHFIDVFVHFGIAQSSTRGGSRVEGIFAGLFMNAYGAGQVMLRWGVLAKSVKNIMLGHASVQAEMEQVVEVYEYAQKLGGEAGFYHILNNPKASLLSLTQFPHFSSVVLGNAAGLGIMGEYRGTPRNQDLYDAAKAYAEQLKENGVINYSVLDLTAEELEAIKHQLNPKDNDVEL

SEQ ID NO: 10592 - protein, 391 aa, Artificial Sequence
  derived and/or modified protein sequence (wt) from HRSV__AMT78068.1__N
MALSKVKLNDTLNKDQLLSSSKYTIQRSTGDSIDTPNYDVQKHINKLCGMLLITEDANHKFTGLIGMLYAMSRLGREDTIKILKDAGYHVKANGVDVTTHRQDINGKEMKFEVLTLASLTTEIQINIEIESRKSYKKMLKEMGEVAPEYRHDSPDCGMIILCIAALVITKLAAGDRSGLTAVIRRANNVLKNEMKRYKGLLPKDIANSFYEVFEKYPHFIDVFVHFGIAQSSTRGGSRVEGIFAGLFMNAYGAGQVMLRWGVLAKSVKNIMLGHASVQAEMEQVVEVYEYAQKLGGEAGFYHILNNPKASLLSLTQFPHFSSVVLGNAAGLGIMGEYRGTPRNQDLYDAAKAYAEQLKENGVINYSVLDLTAEELETIKHQLNPKDNDVEL

SEQ ID NO: 10593 - protein, 391 aa, Artificial Sequence
  derived and/or modified protein sequence (wt) from HRSV__AMT78431.1__N
MALSKVKLNDTLNKDQLLSSSKYTIQRSTGDSIDTPNYDVQKHINKLCGMLLITEDANHKFTGLIGMLYAMSRLGREDTIKILKDAGYHVKANGVDVTTHRQDINGKEMKFEVLTLASLTTEIQINIEIESRKSYKKMLKEMGEVAPEYRHDSPDCGMIMLCIAALVITKLAAGDRSGLTAVIRRANNVLKNEMKRYKGLLPKDIANSFYEVFEKYPHFIDVFVHFGIAQSSTRGGSRVEGIFAGLFMNAYGAGQVMLRWGVLAKSVKNIMLGHASVQAEMEQVVEVYEYAQKLGGEAGFYHILNNPKASLLSLTQFPHFSSVVLGNAAGLGIMGEYRGTPRNQDLYDAAKAYAEQLKENGVINYSVLDLTAEELEAIKHQLNPKDNDVEL

SEQ ID NO: 10594 - protein, 391 aa, Artificial Sequence
  derived and/or modified protein sequence (wt) from HRSV__AMT79185.1__N
MALSKVKLNDTLNKDQLLSSSKYTIQRSTGDSIDTPNYDVQKHINKLCGMLLITEDANHKFTGLIGMLYAMSRLGREDTIKILKDAGYHVKANGVDVTTHRQDINGKEMKFEVLTLASLTTEIQINIEIESRKSYKKMLKEMGEVAPEYRHDSPDCGMIILCIAALVITKLAAGDRSGLTAVIRRANNVLKNEMKRYKGLLPKDIANSFYEVFEKYPHFIDVFVHFGIAQSSTRGGSRVEGIFAGLFMNAYGAGQVMLRWGVLAKSVKNIMLGHASVQAEMEQVVEVYEYAQKLGGEAGFYHILNNPKASLLSLTQFPHFSSVVLGNAAGLGIMGEHRGTPRNQDLYDAAKAYAEQLKENGVINYSVLDLTAEELEAIKHQLNPKDNDVEL

SEQ ID NO: 10595 - protein, 391 aa, Artificial Sequence
  derived and/or modified protein sequence (wt) from HRSV__AMT79262.1__N
MALSKVRLNDTLNKDQLLSSSKYTIQRSTGDNIDTPNYDVQKHLNKLCGMLLITEDANHKFTGLIGMLYAMSRLGREDTIKILKDAGYHVKANGVDITTYRQDINGKEMKFEVLTLSSLTSEIQVNIEIESRKSYKKMLKEMGEVAPEYRHDSPDCGMIILCIAALVITKLAAGDRSGLTAVIRRANNVLKNEIKRYKGLIPKDIANSFYEVFEKYPHLIDVFVHFGIAQSSTRGGSRVEGIFAGLFMNAYGSGQVMLRWGVLAKSVKNIMLGHASVQAEMEQVVEVYEYAQKLGGEAGFYHILNNPKASLLSLTQFPNFSSVVLGNAAGLGIMGEYRGTPRNQDLYDAAKAYAEQLKENGVINYSVLDLTTEELEAIKHQLNPKEDDVEL

SEQ ID NO: 10596 - protein, 391 aa, Artificial Sequence
  derived and/or modified protein sequence (wt) from HRSV__AMT79383.1__N
MALSKVKLNDTLNKDQLLSSSKYTIQRSTGDNIDTPNYDVQKHLNKLCGMLLITEDANHKFTGLIGMLYAMSRLGREDTIKILKDAGYHVKANGVDITTYRQDINGKEMKFEVLTLSSLTSEIQVNIEIESRKSYKKMLKEMGEVAPEYRHDSPDCGMIILCIAALVITKLAAGDRSGLTAVIRRANNVLKNEIKRYKGLIPKDIANSFYEVFEKHPHLIDVFVHFGIAQSSTRGGSRVEGIFAGLFMNAYGSGQVMLRWGVLAKSVKNIMLGHASVQAEMEQVVEVYEYAQRLGGEAGFYHILNNPKASLLSLTQFPNFSSVVLGNAAGLGIMGEYRGTPRNQDLYDAAKAYAEQLKENGVINYSVLDLTTEELEAIKHQLNPKEDDVEL

SEQ ID NO: 10597 - protein, 391 aa, Artificial Sequence
  derived and/or modified protein sequence (wt) from HRSV__AMT79592.1__N
MALSKVKLNDTLNKDQLLSSSKYTIQRSTGDSIDTPNYDVQKHINKLCGMLLITEDANHKFTGLIGMLYAMSRLGREDTIKILKDAGYHVKANGVDVITHRQDINGKEMKFEVLTLASLTTEIQINIEIESRKSYKKMLKEMGEVAPEYRHDSPDCGMIILCIAALVITKLAAGDRSGLTAVIRRANNVLKNEMKRYKGLLPKDIANSFYEVFGKYPHFIDVFVHFGIAQSSTRGGSRVEGIFAGLFMNAYGAGQVMLRWGVLAKSVKNIMLGHASVQAEMEQVVEVYEYAQKLGGEAGFYHILNNPKASLLSLTQFPHFSSVVLGNAAGLGIMGEYRGTPRNQDLYDAAKAYAEQLKENGVINYSVLDLTAEELEAIKHQLNPKDNDVEL

SEQ ID NO: 10598 - protein, 391 aa, Artificial Sequence
  derived and/or modified protein sequence (wt) from HRSV__ANZ80095.1__N
MALSKVKLNDTLNKDQLLSSSKYTIQRSTGDSIDTPNYDVQKHINKLCGMLLITEDANHKFTGLIGMLYAMSRLGREDTIKILKDAGYHVKANGVDVTTHRQDINGKEMKFEVLTLASLTAEIQINIEIESRKSYKKMLKEMGEVAPEYRHDSPDCGMIILCIAALVITKLAAGDRSGLTAVIRRANNVLKNEMKRYKGLLPKDIANSFYEVFEKYPHFIDVFVHFGIAQSSTRGGSRVEGIFAGLFMNAYGAGQVMLRWGVLAKSVKNIMLGHASVQAEMEQVVEVYEYAQKLGGEAGFYHILNNPKASLLSLTQFPHFSSVVLGNAAGLGIMGEYRGTPRNQDLYDAAKAYAEQLKENGVINYSVLDLTAEELEAIKHQLNPKDNDVEL

SEQ ID NO: 10599 - protein, 391 aa, Artificial Sequence
  derived and/or modified protein sequence (wt) from HRSV__ANZ80414.1__N
MALSKVKLNDTLNKDQLLSSSKYTIQRSTGDSIDTPNYDVQKHINKLCGMLLITEDANHKFTGLIGMLYAMSRLGREDTIKILKDAGYHVKANGVDVTTHRQDINGKEMKFEVLTLASLTTEIQINIEIESRKSYKKMLKEMGEVAPEYRHDSPDCGMIILCIAALVITKLAAGDRSGLTAVIRRANNVLKNEMKRYKGLLPKDIANSFYEVFDKYPHFIDVFVHFGIAQSSTRGGSRVEGIFAGLFMNAYGAGQVMLRWGVLAKSVKNIMLGHASVQAEMEQVVEVYEYAQKLGGEAGFYHILNNPKASLLSLTQFPHFSSVVLGNAAGLGIMGEYRGTPRNQDLYDAAKAYAEQLKENGVINYSVLDLTAEELEAIKHQLNPKDNDVEL

SEQ ID NO: 10600 - protein, 391 aa, Artificial Sequence
  derived and/or modified protein sequence (wt) from HRSV__AOS48678.1__N
MALSKVKLNDTLNKDQLLSSSKYTIQRSTGDNIDTPNYDVQKHLNKLCGMLLITEDANHKFTGLIGMLYAMSRLGREDTIKILKDAGYHVKANGVDITTHRQDINGKEMKFEVLTLSSLTSEIQVNIEIESRKSYKKMLKEMGEVAPEYRHDSPDCGMIILCIAALVITKLAAGDRSGLTAVIRRANNVLKNEIKRYKGLIPKDIANSFYEVFEKHPHLIDVFVHFGIAQSSTRGGSRVEGIFAGLFMNAYGSGQVMLRWGVLAKSVKNIMLGHASVQAEMEQVVEVYEYAQKLGGEAGFYHILNNPKASLLSLTQFPNFSSVVLGNAAGLGIMGEYRGTPRNQDLYDAAKAYAEQLKENGVINYSVLDLTTEELEAIKHQLNPKEDDVEL

SEQ ID NO: 10601 - protein, 391 aa, Artificial Sequence
  derived and/or modified protein sequence (wt) from HRSV__AOS48711.1__N
MALSKVKLNDTLNKDQLLSSSKYTIQRSTGDSIDTPNYDVQKHINKLCGMLLITEDANHKFTGVVGMLYAMSRLGREDTIKILRDAGYHVKANGVDVTTHRQDINGKEMKFEVLTLASLTTEIQINIEIESRKSYKKMLKEMGEVAPEYRHDSPDCGMIILCIAALVITKLAAGDRSGLTAVIRRANNVLKNEMKRYKGLLPKDIANSFYEVFEKYPHFIDVFVHFGIAQSSTRGGSRVEGIFAGLFMNAYGAGQVMLRWGVLAKSVKNIMLGHASVQAEMEQVVEVYEYAQKLGGEAGFYHILNNPKASLLSLTQFPHFSSVVLGNAAGLGIMGEYRGTPRNQDLYDAAKAYAEQLKENGVINYSVLDLTAEELEAIKHQLNPKDNDVEL

SEQ ID NO: 10602 - protein, 391 aa, Artificial Sequence
  derived and/or modified protein sequence (wt) from HRSV__AOS48854.1__N
MALSKVKLNDTLNKDQLLSSSKYTIQRSTGDSIDTPNYDVQKHINKLCGMLLITEDANHKFTGLIGMLYAMSRLGREDTIKILKDAGYHVKANGVDVTTHRQDINGKEMKFEVLTLASLTTEIQINIEIESRKSYKKMLKEMGEVAPEYRHDSPDCGMIILCIAALVITKLAAGDRSGLTAVIRRANNVLKNEMKRYKGLLPKDIANSFYEVFEKYPHFIDVFVHFGIAQSSTRGGSRVEGIFAGLFMNAYGAGQVMLRWGVLAKSVKNIMLGHASVQAEMEQVVEVYEYAQKLGGEAGFYHILNNPKASLLSLTQFPHFSSVVLGNAAGLGIMGEYRGTPRNQDLYDAAKAYAEQLKENGVINYSVLDLTAEELEAVKHQLNPKDNDVEL

SEQ ID NO: 10603 - protein, 391 aa, Artificial Sequence
  derived and/or modified protein sequence (wt) from HRSV__AOS49151.1__N
MALSKVKLNDTLNKDQLLSSSKYTIQRSTGDNIDTPNYDVQKHLNKLCGMLLITEDANHKFTGLIGMLYAMSRLGREDTIKILKDAGYHVKANGVDITIYRQDINGKEMKFEVLTLSSLTSEIQVNIEIESRKSYKKMLKEMGEVAPEYRHDSPDCGMIILCIAALVITKLAAGDRSGLTAVIRRANNVLKNEIKRYKGLIPKDIANSFYEVFEKHPHLIDVFVHFGIAQSSTRGGSRVEGIFAGLFMNAYGSGQVMLRWGVLAKSVKNIMLGHASVQAEMEQVVEVYEYAQKLGGEAGFYHILNNPKASLLSLTQFPNFSSVVLGNAAGLGIMGEYRGTPRNQDLYDAAKAYAEQLKENGVINYSVLDLTTEELEAIKHQLNPKEDDVEL

SEQ ID NO: 10604 - protein, 391 aa, Artificial Sequence
  derived and/or modified protein sequence (wt) from HRSV__AOS49173.1__N
MALSKVKLNDTLNKDQLLSSSKYTIQRSTGDNIDTPNYDVQKHLNKLCGMLLITEDANHKFTGLIGMLYAMSRLGREDTIKILKDAGYHVKANGVDITTYRQDINGKEMKFEVLTLSSLTSEIQVNIEVESRKSYKKMLKEMGEVAPEYRHDSPDCGMIILCIAALVITKLAAGDRSGLTAVIRRANNVLKNEIKRYKGLIPKDIANSFYEVFEKHPHLIDVFVHFGIAQSSTRGGSRVEGIFAGLFMNAYGSGQVMLRWGVLAKSVKNIMLGHASVQAEMEQVVEVYEYAQKLGGEAGFYHILNNPKASLLSLTQFPNFSSVVLGNAAGLGIMGEYRGTPRNQDLYDAAKAYAEQLKENGVINYSVLDLTTEELEAIKHQLNPKEDDVEL

SEQ ID NO: 10605 - protein, 391 aa, Artificial Sequence
  derived and/or modified protein sequence (wt) from HRSV__APW78620.1__N
MALSKVKLNDTLNKDQLLSSSKYTIQRSTGDNIDTPNYDVQKHLNKLCGMLLITEDANHKFTGLIGMLYVMSRLGREDTIKILKDAGYHVKANGVDITTYRQDINGKEMKFEVLTLSSLTSEIQVNIEIESRKSYKKMLKEMGEVAPEYRHDSPDCGMIILCIAALVITKLAAGDRSGLTAVIRRANNVLKNEIKRYKGLIPKDIANSFYEVFEKYPHLIDVFVHFGIAQSSTRGGSRVEGIFAGLFMNAYGSGQVMLRWGVLAKSVKNIMLGHASVQAEMEQVVEVYEYAQKLGGEAGFYHILNNPKASLLSLTQFPNFSSVVLGNAAGLGIMGEYRGTPRNQDLYDAAKAYAEQLKENGVINYSVLDLTTEELEAIKHQLNPKEDDVEL

SEQ ID NO: 10606 - protein, 391 aa, Artificial Sequence
  derived and/or modified protein sequence (wt) from HRSV__APW78631.1__N
MALSKVKLNDTLNKDQLLSSSKYTIQRSTGDNIDTPNYDVQKHLNKLCGMLLITEDANHKFTGLIGMLYAMSRLGREDTIKILKDAGYHVKANGVDITTYRQDINGKEMKFEVLTLSSLTSEIQVNIEIESRKSYKKMLKEMGEVAPEYRHDSPDCGMIILCIAALVITKLAAGDRSGLTAVIRRANNVLKNELKRYKGLIPKDIANSFYEVFEKHPHLIDVFVHFGIAQSSTRGGSRVEGIFAGLFMNAYGSGQVMLRWGVLAKSVKNIMLGHASVQAEMEQVVEVYEYAQKLGGEAGFYHILNNPKASLLSLTQFPNFSSVVLGNAAGLGIMGEYRGTPRNQDLYDAAKAYAEQLKENGVINYSVLDLTTEELEAIKHQLNPKEDDVEL

SEQ ID NO: 10607 - protein, 391 aa, Artificial Sequence
  derived and/or modified protein sequence (wt) from HRSV__APW78697.1__N
MALSKVKLNDTLNKDQLLSSSKYTIQRSTGDNIDTPNYDVQKHLNKLCGMLLITEDANHKFTGLIGMLYAMSRLGREDTIKILKDAGYHVKANGVDITTYRQDINGKEMKFEVLTLSSLTSEIQVNIEIESRKSYKKMLKEMGEVAPEYRHDSPDCGMIILCIAALVITKLAAGDRSGLTAVIRRANNVLKNEIKRYRGLIPKDIANSFYEVFEKHPHLIDVFVHFGIAQSSTRGGSRVEGIFAGLFMNAYGSGQVMLRWGVLAKSVKNIMLGHASVQAEMEQVVEVYEYAQKLGGEAGFYHILNNPKASLLSLTQFPNFSSVVLGNAAGLGITGEYRGTPRNQDLYDAAKAYAEQLKENGVINYSVLDLTTEELEAIKHQLNPKEDDVEL

SEQ ID NO: 10608 - protein, 391 aa, Artificial Sequence
  derived and/or modified protein sequence (wt) from HRSV__APW78763.1__N
MALSKVKLNDTLNKDQLLSSSKYTIQRSTGDNIDTPNYDVQKHLNKLCGMLLITEDANHKFTGLIGMLYAMSRLGREDTIKILKDAGYHVKANGVDITTYRQDINGKEMKFEVLTLSSLTSEIQVNIEIESRKSYKKMLKEMGEVAPEYRHDSPDCGMIILCIAALVITKLAAGDRSGLTAVIRRANNVLKNEIKRYKGLIPKDIANSFYEVFEKHPHLIDVFVHFGIAQSSTRGGSRVEGIFAGLFMNAYGSGQVMLRWGVLAKSVKNIMLGHASVQAEMEQVVEVYEYAQKLGGEAGFYHILNNPKASLLSLTQFPNFSSVVLGNAAGLGIMGEYRGTPRNQDLYDAAKAYAEQLKENGVINYSVLDLTTEELEAIKNQLNPKEDDVEL

SEQ ID NO: 10609 - protein, 391 aa, Artificial Sequence
  derived and/or modified protein sequence (wt) from HRSV__APW78829.1__N
MALSKVKLNDTLNKDQLLSSSKYTIQRSTGDNIDTPNYDVQKHLNKLCGMLLITEDANHKFTGLIGMLYAMSRLGREDTIKILKDAGYHVKANGVDITTYRQDINGKEMKFEVLTLSSLTSEIQVNIEIESRKSYKKMLKEMGEVAPEYRHDSPDCGMIILCIAALVITKLAAGDRSGLTAVIRRANNVLKNEIKRYKGLIPKDIANSFYEVFEKHPHLIDVFVHFGIAQSSTRGGSRVEGIFAGLFMNAYGSGQVMLRWGVLAKSVKNIMLGHASVQAEMEQVVEVYEYAQKLGGEAGFYHILNNPKASLLSLTQFPNFSSVVLGNAAGLGIMGEYKGTPRNQDLYDAAKAYAEQLKENGVINYSVLDLTTEELEAIKHQLNPKEDDVEL

SEQ ID NO: 10610 - protein, 391 aa, Artificial Sequence
  derived and/or modified protein sequence (wt) from HRSV__APW78884.1__N
MALSKVKLNDTLNKDQLLSSSKYTIQRSTGDNIDTPNYDVQKHLNKLCGMLLITEDANHKFTGLIGMLYAMSRLGREDTIKILKDAGYHVKANGVDITTYRQDVNGKEMKFEVLTLSSLTSEIQVNIEIESRKSYKKMLKEMGEVAPEYRHDSPDCGMIILCIAALVITKLAAGDRSGLTAVIRRANNVLKNEIKRYKGLIPKDIANSFYEVFEKYPHLIDVFVHFGIAQSSTRGGSRVEGIFAGLFMNAYGSGQVMLRWGVLAKSVKNIMLGHASVQAEMEQVVEVYEYAQKLGGEAGFYHILNNPKASLLSLTQFPNFSSVVLGNAAGLGIMGEYRGTPRNQDLYDAAKAYAEQLKENGVINYSVLDLTTEELEAIKHQLNPKEDDVEL

SEQ ID NO: 10611 - protein, 391 aa, Artificial Sequence
  derived and/or modified protein sequence (wt) from HRSV__APW78895.1__N
MALSKVKLNDTLNKDQLLSSSKYTIQRSTGDNIDTPNYDVQKHLNKLCGMLLITEDANHKFTGLIGMLYAMSRLGREDTIKILKDAGYHVKANGVDITTYRQDINGKEMKFEVLTLSSLTSEIQVNIEIESRKSYKKMLKEMGEVAPEYRHDSPDCGMIILCIAALVITKLAAGDRSGLTAVIRRANNVLKNEIKRYKGLIPKDIANSFYEVFEKYPHLIDVFVHFGIAQSSTRGGSRVEGIFAGLFMNAYGSGQVMLRWGVLAKSVKNIMLGHASVQAEMEQVVEVYEYAQKLGGEAGFYHILNNPKASLLSLTQFPNFSSVVLGNAAGLGIMGEYRGTPRNQDLYDAAKAYAEQLKENGVINYSVLDLTTEELEAIKHQLNPKENDVEL

SEQ ID NO: 10612 - protein, 389 aa, Artificial Sequence
  derived and/or modified protein sequence (wt) from HRSV__AQX36836.1__N
MALSKVKLNDTLNKDQLLSSSKYTIQRSTGDSIDTPNYDVQKHINKLCGMLLITEDANHKFTGLIGMLYAMSRLGREDTIKILKDAGYHVKANGVDVTTHRQDINGKEMKFEVLTLASLTTEIQINIEIESRKSYKKMLKEMGEVAPEYRHDSPDCGMIILCIAALVITKLAAGDRSGLTAVIRRANNVLKNEMKRYKGLLPKDIANSFYEVFEKYPHFIDVFVHFGIAQSSTRGGSRVEGIFAGLFMNAYGAGQVMLRWGVLAKSVKNIMLGHASVQAEMEQVVEVYEYAQKLGGEAGFYHILNNPKASLLSLTQFPHFSSVVLGNAAGLGIMGEYRGTPRNQDLYDAAKAYAEQLKENGVINYSVLDLTAEELEAIKHQLNPKDNDM

SEQ ID NO: 10613 - protein, 391 aa, Artificial Sequence
  derived and/or modified protein sequence (wt) from HRSV__ARB66400.1__N
MALSKVKLNDTLNKDQLLSSSKYTIQRSTGDSIDTPNYDVQKHINKLWGMLLITEDANHKFTGLIGMLYAMSRLGREDTIKILKDAGYHVKANGVDVTTHRQDINGKEMKFEVLTLASLTTEIQINIEIESRKSYKKMLKEMGEVAPEYRHDSPDCGMIILCIAALVITKLAAGDRSGLTAVIRRANNVLKNEMKRYKGLLPKDIANSFYEVFEKYPHFIDVFVHFGIAQSSTRGGSRVEGIFAGLFMNAYGAGQVMLRWGVLAKSVKNIMLGHASVQAEMEQVVEVYEYAQKLGGEAGFYHILNNPKASLLSLTQFPHFSSVVLGNAAGLGIMGEYRGTPRNQDLYDAAKAYAEQLKENGVINYSVLDLTAEELEAIKHQLNPKDNDVEL

SEQ ID NO: 10614 - protein, 391 aa, Artificial Sequence
  derived and/or modified protein sequence (wt) from HRSV__ARB66422.1__N
MAPSKVKLNDTLNKDQLLSSSKYTIQRSTGDSIDTPNYDVQKHINKLCGMLLITEDANHKFTGLIGMLYAMSRLGREDTIKILKDAGYHVKANGVDVTTHRQDINGKEMKFEVLTLASLTTEIQINIEIESRKSYKKMLKEMGEVAPEYRHDSPDCGMIILCIAALVITKLAAGDRSGLTAVIRRANNVLKNEMKRYKGLLPKDIANSFYEVFEKYPHFIDVFVHFGIAQSSTRGGSRVEGIFAGLFMNAYGAGQVMLRWGVLAKSVKNIMLGHASVQAEMEQVVEVYEYAQKLGGEAGFYHILNNPKASLLSLTQFPHFSSVVLGNAAGLGIMGEYRGTPRNQDLYDAAKAYAEQLKENGVINYSVLDLTAEELEAIKHQLNPKDNDVEL

SEQ ID NO: 10615 - protein, 391 aa, Artificial Sequence
  derived and/or modified protein sequence (wt) from HRSV__ARR29184.1__N
MALSKVKLNDTLNKDQLLSSSKYTIQRSTGDSIDTPNYDVQKHINKLCGMLLITEDANHKFTGLIGMLYAMSRLGREDTIKILKDAGYHVKANGVDVTTHRQDINGKEMKFEVLTLASLTTEIQINIEIESRKSYKKMLKEMGEVAPEYRHDSPDCGMIILCIAALVITKLAAGDRSGLTAVIRRANNVLKNEIKRYKGLLPKDIANSFYEVFEKYPHFIDVFVHFGIAQSSTRGGSRVEGIFAGLFMNAYGAGQVMLRWGVLAKSVKNIMLGHASVQAEMEQVVEVYEYAQKLGGEAGFYHILNNPKASLLSLTQFPHFSSVVLGNAAGLGIMGEYRGTPRNQDLYDAAKAYAEQLKENGVINYSVLDLTAEELEAIKHQLNPKDNDVEL

SEQ ID NO: 10616 - protein, 391 aa, Artificial Sequence
  derived and/or modified protein sequence (wt) from HRSV__ARR29246.1__N
MALSKVKLNDTLNKDQLLSSSKYTIQRSTGDSIDTPNYDVQKHINKLCGMLLITEDANHKFTGLIGMLYAMSRLGREDTIKILKDAGYHVKANGVDVTTHRQDINGKEMKFEVLTLASLTTEIQINIEIESRKSYKKMLKEMGEVAPEYRHDSPDCGMIILCIAALVITKLAAGDRSGLTAVIRRANNVLKNEMKRYKGLLPKDIANSFYEVFEKYPHFIDVFVHFGIAQSSTRGGSRVEGIFAGLFMNAYGAGQVMLRWGVLAKSVKNVMLGHASVQAEMEQVVEVYEYAQKLGGEAGFYHILNNPKASLLSLTQFPHFSSVVLGNAAGLGIMGEYRGTPRNQDLYDAAKAYAEQLKENGVINYSVLDLTAEELEAIKHQLNPKDNDVEL

SEQ ID NO: 10617 - protein, 391 aa, Artificial Sequence
  derived and/or modified protein sequence (wt) from HRSV__ART28302.1__N
MALSKVKLNDTLNKDQLLSSSKYTIQRSTGDSIDTPNYDVQKHINKLCGMLLITEDANHKFTGLIGMLYAMSRLGREDTIKILKDAGYHVKANGVDVTTHRQDINGKEMKFEVLTLASLTTEIQISIEIESRKSYKKMLKEMGEVAPEYRHDSPDCGMIILCIAALVITKLAAGDRSGLTAVIRRANNVLKNEMKRYKGLLPKDIANSFYEVFEKYPHFIDVFVHFGIAQSSTRGGSRVEGIFAGLFMNAYGAGQVMLRWGVLAKSVKNIMLGHASVQAEMEQVVEVYEYAQKLGGEAGFYHILNNPKASLLSLTQFPHFSSVVLGNAAGLGIMGEYRGTPRNQDLYDAAKAYAEQLKENGVINYSVLDLTAEELEAIKHQLNPKDNDVEL

SEQ ID NO: 10618 - protein, 391 aa, Artificial Sequence
  derived and/or modified protein sequence (wt) from HRSV__ART28389.1__N
MALSKVKLNDTLNKDQLLSSSKYTIQRSTGDNIDTPNYDVQKHLNKLCGMLLITEDANHKFTGLIGMLYAMSRLGREDTIKILKDAGYHVKANGVDITTYRQDINGKEMKFEVLTLSSLTSEIQVNIEIESRKSYKKMLKEMGEVAPEYRHDSPDCGMIILCIAALVITKLAAGDRSGLTAVIRRANNVLKNEIKRYRGLIPKDIANSFYEVFEKHPHLIDVFVHFGIAQSSTRGGSRVEGIFAGLFMNAYGSGQVMLRWGVLAKSVKNIMLGHASVQAEMEQVVEVYEYAQKLGGEAGFYHILNNPKASLLSLTQFPNFSSVVLGNAAGLGIMGEYRGTPRNQDLYDAAKAYAEQLKENGVINYSVLDLTTEELEAIKHQLNPKEDDVEL

SEQ ID NO: 10619 - protein, 391 aa, Artificial Sequence
  derived and/or modified protein sequence (wt) from HRSV__ASK05515.1__N
MALSKVKLNDTLNKDQLLSSSKYTIQRSTGDNIDTPNYDVQKHLNKLCGMLLITEDANHKFTGLIGMLYAMSRLGREDTIKILKDAGYHVKANGVDITTYRQDINGKEMKFEVLTLSSLTSEIQVNIEIESRKSYKKMLKEMGEVAPEYRHDSPDCGMIILCIAALVITKLAAGDRSGLTAVIRRANNVLKNEIKRYKGLIPKDIANSFYEVFEKYPHLIDVFVHFGIAQSSTRGGSRVEGIFAGLFMNAYGSGQVMLRWGVLAKSVKNIMLGHASVQAEMEQVVEVYEYAQKLGGEAGFYHILNNPKASLLSLTQFPNFSSVVLGNAAGLGIMGEYRGTPRNQDLYDAAKAYAEQLKENGVINYSVLDLTTEELEAIKNQLNPKEDDVEL

SEQ ID NO: 10620 - protein, 391 aa, Artificial Sequence
  derived and/or modified protein sequence (wt) from HRSV__ASV49527.1__N
MALSKVKLNDTLNKDQLLSSSKYTIQRSTGDSIDTPNYDVQKHINKLCGMLLITEDANHKFTGLIGMLYAMSRLGREDTIKILRDAGYHVKANGVDVTTHRQDINGKEMKFEVLTLASLTTEIQINIEIESRKSYKKMLKEMGEVAPEYRHDSPDCGMIILCIAALVITKLAAGDRSGLTAVIRRANNVLKNEMKRYKGLLPKDIANSFYEVFEKHPHFIDVFVHFGIAQSSTRGGSRVEGIFAGLFMNAYGAGQVMLRWGVLAKSVKNIMLGHASVQAEMEQVVEVYEYAQKLGGEAGFYHILNNPKASLLSLTQFPHFSSVVLGNAAGLGIMGEYRGTPRNQDLYDAAKAYAEQLKENGVINYSVLDLTAEELEAINHQLNPKDNDVEL

SEQ ID NO: 10621 - protein, 391 aa, Artificial Sequence
  derived and/or modified protein sequence (wt) from HRSV__ASV65822.1__N
MALSKVKLNDTLNKDQLLSSSKYTIQRSTGDSIDTPNYDVQKHINKLCGMLLITEDANHKFTGLIGMLYAMSRLGREDTIKILKDAGYHVKANGVDVTTHRQDINGKEMKFEVLTLASLTTEIQINIEIESRKSYKKMLKEMGEVAPEYRHDSPDCGMIILCIAALVITKLAAGDRSGLTAVIRRANNVLKNEMKRYKGLLPKDIANSFYEVFEKYPHFIDVFVHFGIAQSSTRGGSRVEGIFAGLFMNAYGAGQVMLRWGVLAKSVKNIMLGHASVQAEMEQVVEVYEYAQKLGGEAGFYHILNNPKASLLSLTQFPHFSSVVLGNAAGLGIMGEYRGTPRNQDLYDAAKAYAEQLKENGVINYSVLDLTSEELEAIKHQLNPKDNDVEL

SEQ ID NO: 10622 - protein, 391 aa, Artificial Sequence
  derived and/or modified protein sequence (wt) from HRSV__ASZ70094.1__N
MALSKVKLNDTLNKDQLLSSSKYTIQRSTGDSIDTPNYDVQKHINKLCGMLLITEDANHKFTGLIGMLYAMSRLGREDTIKILKDAGYHVKANGVDVTTHRQDINGKDMKFEVLTLTSLTTEIQINIEIESRKSYKKMLKEMGEVAPEYRHDSPDCGMIILCIAALVITKLAAGDRSGLTAVIRRANNVLKNEMKRYKGLLPKDIANSFYEVFEKYPHFIDVFVHFGIAQSSTRGGSRVEGIFAGLFMNAYGAGQVMLRWGVLAKSVKNIMLGHASVQAEMEQVVEVYEYAQKLGGEAGFYHILNNPKASLLSLTQFPHFSSVVLGNAAGLGIMGEYRGTPRNQDLYDAAKAYAEQLKENGVINYSVLDLTAEELEAIKHQLNPKDNDVEL

SEQ ID NO: 10623 - protein, 391 aa, Artificial Sequence
  derived and/or modified protein sequence (wt) from HRSV__AUC68067.1__N
MALSKVKLNDTLNKDQLLSSSKYTIQRSTGDSIDTPNYDVQKHINKLCGMLLITEDANHKFTGLIGMLYAMSRLGREDTIKILKDAGYHVKANGVDVTTHRQDINGKEMKFEVLTLASLTTEIQINIEIESRKSYKKMLKEMGEVAPEYRHDSPDCGMIILCIAALVITKLAAGDRSGLIAVIRRANNVLKNEMKRYKGLLPKDIANSFYEVFEKYPHFIDVFVHFGIAQSSTRGGSRVEGIFAGLFMNAYGAGQVMLRWGVLAKSVKNIMLGHASVQAEMEQVVEVYEYAQKLGGEAGFYHILNNPKASLLSLTQFPHFSSVVLGNAAGLGIMGEYRGTPRNQDLYDAAKAYAEQLKENGVINYSVLDLTAEELEAIKHQLNPKDNDVEL

SEQ ID NO: 10624 - protein, 391 aa, Artificial Sequence
  derived and/or modified protein sequence (wt) from HRSV__AUC68089.1__N
MALSKVKLNDTLNKDQLLSSSKYTIQRSTGDSIDTPNYDVQKHINKLCGMLLITEDANHKFTGLIGMLYAMSRLGREDTIKILRDAGYHVKANGVDVTTHRQDINGKEMKFEVLTLASLTTEIQINIEIESRKSYKKMLKEMGEVAPEYRHDSPDCGMIILCIAALVITKLAAGDRSGLTAVIRRANNVLKNEMKRYKGLLPKDIANSFYEVFEKYPHFIDVFVHFGIAQSSTRGGSRVEGIFAGLFMNAYGAGQVMLRWGVLAKSVKNIMLGHASVQAEMEQVVEVYEYAQKLGGEAGFYHILNNPKASLLSLTQFPHFSSVVLGNTAGLGIMGEYRGTPRNQDLYDAAKAYAEQLKENGVINYSVLDLTAEELEAIKHQLNPKDNDVEL

SEQ ID NO: 10625 - protein, 391 aa, Artificial Sequence
  derived and/or modified protein sequence (wt) from HRSV__AUC68221.1__N
MALSKVKLNDTLNKDQLLSSSKYTIQRSTGDNIDTPNYDVQKHLNKLCGMLLITDDANHKFTGLIGMLYAMSRLGREDTIKILKDAGYHVKANGVDITTYRQDINGKEMKFEVLTLSSLTSEIQVNIEIESRKSYKKMLKEMGEVAPEYRHDSPDCGMIILCIAALVITKLAAGDRSGLTAVIRRANNVLKNEIKRYKGLIPKDIANSFYEVFEKHPHLIDVFVHFGIAQSSTRGGSRVEGIFAGLFMNAYGSGQVMLRWGVLAKSVKNIMLGHASVQAEMEQVVEVYEYAQKLGGEAGFYHILNNPKASLLSLTQFPNFSSVVLGNAAGLGIMGEYRGTPRNQDLYDAAKAYAEQLKENGVINYSVLDLTAEELEAIKNQLNPKEDDVEL

SEQ ID NO: 10626 - protein, 391 aa, Artificial Sequence
  derived and/or modified protein sequence (wt) from HRSV__AUC68473.1__N
MALSKVKLNDTLNKDQLLSSSKYTIQRSTGDNIDTPNYDVQKHLNKLCGMLLITEDANHKFTGLIGMLYAMSRLGREDTIKILKDAGYHVKANGVDITTYRQDINGKEMKFEVLTLSSLTSEIQVNIEIESRKSYKKMLKEMGEVAPEYRHDSPDCGMIILCIAALVITKLAAGDRSGLTAVIRRANNVLKNEIKRYKGLIPKDIASSFYEVFEKHPHLIDVFVHFGIAQSSTRGGSRVEGIFAGLFMNAYGSGQVMLRWGVLAKSVKNIMLGHASVQAEMEQVVEVYEYAQKLGGEAGFYHILNNPKASLLSLTQFPNFSSVVLGNAAGLGIMGEYRGTPRNQDLYDAAKAYAEQLKENGVINYSVLDLTAEELEAIKNQLNPKEDDVEL

SEQ ID NO: 10627 - protein, 391 aa, Artificial Sequence
  derived and/or modified protein sequence (wt) from HRSV__AUH15159.1__N
MALSKVKLNDTLNKDQLLSSSKYTIQRSTGDNIDTPNYDVQKHLNKLCGMLLITEDANHKFTGLIGMLYAMSRLGREDTIKILKDAGYHVKANGVDITTYRQDINGKEMKFDVLTLSSLTSEIQVNIEIESRKSYKKMLKEMGEVAPEYRHDSPDCGMIILCIAALVITKLAAGDRSGLTAVIRRANNVLKNEIKRYKGLIPKDIANSFYEVFEKHPHLIDVFVHFGIAQSSTRGGSRVEGIFAGLFMNAYGSGQVMLRWGVLAKSVKNIMLGHASVQAEMEQVVEVYEYAQKLGGEAGFYHILNNPKASLLSLTQFPNFSSVVLGNAAGLGIMGEYRGTPRNQDLYDAAKAYAEQLKENGVINYSVLDLTTEELEAIKHQLNPKEDDVEL

SEQ ID NO: 10628 - protein, 391 aa, Artificial Sequence
  derived and/or modified protein sequence (wt) from HRSV__BAE96916.1__N
MALSKVKLNDTLNKDQLLSSSKYTIQRSTGDNIDTPNYDVQKHLNKLCGMLLITEDANHKFTGLIGMLYAMSRLGREDTIKILKDAGYHVKANGVDITTYRQDINGKEMKFEVLTLSSLTSEIQVNIEIESRKSYKKMLKEMGEVAPEYRHDSPDCGMIILCIAALVITKLAAGDRSGLTAVIRRANNVLKNEIKRYKGLIPRDIANSFYEVFEKHPHLIDVFVHFGIAQSSTRGGSRVEGIFAGLFMNAYGSGQVMLRWGVLAKSVKNIMLGHASVQAEMEQVVEVYEYAQKLGGEAGFYHILNNPKASLLSLTQFPNFSSVVLGNAAGLGIMGEYRGTPRNQDLYDAAKAYAEQLKENGVINYSVLDLTAEELEAIKHQLNPKEDDVEL

SEQ ID NO: 10629 - protein, 391 aa, Artificial Sequence
  derived and/or modified protein sequence (wt) from HRSV__BBA57885.1__N
MALSKVKLNDTLNKDQLLSSSKYTIQRSTGDNIDTPNYDVQKHLNKLCGMLLITEDANHKFTGLVGMLYAMSRLGREDTIKILKDAGYHVKANGVDITTYRQDINGKEMKFEVLTLSSLTSEIQVNIEIESRKSYKKMLKEMGEVAPEYRHDSPDCGMIILCIAALVITKLAAGDRSGLTAVIRRANNVLKNEIKRYKGLIPKDIANSFYEVFEKYPHLIDVFVHFGIAQSSTRGGSRVEGIFAGLFMNAYGSGQVMLRWGVLAKSVKNIMLGHASVQAEMEQVVEVYEYAQKLGGEAGFYHILNNPKASLLSLTQFPNFSSVVLGNAAGLGIMGEYRGTPRNQDLYDAAKAYAEQLKENGVINYSVLDLTTEELEAIKHQLNPKEDDVEL

SEQ ID NO: 10630 - protein, 391 aa, Artificial Sequence
  derived and/or modified protein sequence (wt) from HRSV__CAI96788.1__N
MALSKVKLNDTFNKDQLLSTSKYTIQRSTGDNIDIPNYDVQKHLNKLCGMLLITEDANHKFTGLIGMLYAMSRLGREDTLKILKDAGYQVRANGVDVITHRQDVNGKEMKFEVLTLVSLTSEVQGNIEIESRKSYKKMLKEMGEVAPEFRHDSPDCGMIVLCVAALVITKLAAGDRSGLTAVIRRANNVLRNEMKRYKGLIPKDIANSFYEVFEKYPHYIDVFVHFGIAQSSTRGGSRVEGIFAGLFMNAYGAGQVMLRWGVLAKSVKNIMLGHASVQAEMEQVVEVYEYAQKLGGEAGFYHILNNPKASLLSLTQFPNFSSVVLGNAAGLGIMGEYRGTPRNQDLYDAAKAYAEQLKENGVINYSVLDLTTEELEAIKNQLNPKDNDVGS

SEQ ID NO: 10631 - protein, 391 aa, Artificial Sequence
  derived and/or modified protein sequence (wt) from HRSV__NP_044591.1__N
MALSKVKLNDTLNKDQLLSSSKYTIQRSTGDSIDTPNYDVQKHINKLCGMLLITEDANHKFTGLIGMLYAMSRLGREDTIKILRDAGYHVKANGVDVTTHRQDINGKEMKFEVLTLSSLTTEIQINIEIESRKSYKKMLKEMGEVAPEYRHDSPDCGMIILCIAALVITKLAAGDRSGLTAVIRRANNVLKNEMKRYKGLLPKDIANSFYEVFEKYPHFIDVFVHFGIAQSSTRGGSRVEGIFAGLFMNAYGAGQVMLRWGVLAKSVKNIMLGHASVQAEMEQVVEVYEYAQKLGGEAGFYHILNNPKASLLSLTQFPHFSSVVLGNAAGLGIMGEYRGTPRNQDLYDAAKAYAEQLKENGVINYSVLDLTAEELEAIKHQLNPKDNDVEL

SEQ ID NO: 10632 - protein, 391 aa, Artificial Sequence
  derived and/or modified protein sequence (wt) from HRSV__P22677.1__N
MALSKVKLNDTFNKDQLLSTSKYTIQRSTGDNIDIPNYDVQKHLNKLCGMLLITEDANHKFTGLIGILYAMSRLGREDTLKILKDAGYQVRANGVDVITHRQDVNGKEMKFEVLTLVSLTSEVQGNIEIESRKSYKKMLKEMGEVAPEYRHDSPDCGMIVLCVAALVITKLAAGDRSGLTAVIRRANNVLRNEMKRYKGLIPKDIANSFYEVIEKYPHYIDVFVHFGIAQSSTRGGSRVEGIFAGLFMNAYGAGQVMLRWGVLAKSVKNIMLGHASVQAEMEQVVEVYEYAQKLGGEAGFYHILNNPKASLLSLTQFPNFSSVVLGNAAGLGIMGEYRGTPRNQDLYDAAKAYAEQLKENGVINYSVLDLTTEELEAIKNQLNPKDNDVEL

SEQ ID NO: 10633 - protein, 391 aa, Artificial Sequence
  derived and/or modified protein sequence (wt) from HRSV__P24566.1__N
MALSKVKLNDTLNKDQLLSSSKYTIQRSTGDNIDTPNYDVQKHLNKLCGMLLITEDANHKFTGLIGMLYAMSRLGREDTIKILKDAGYHVKANGVDITTYRQDINGKEMKFEVLTLSSLTSEIQVNIEIESRKSYKKLLKEMGEVAPEYRHDSPDCGMIILCIAALVITKLAAGDRSGLTAVIRRANNVLKNEIKRYKGLIPKDIANSFYEVFEKHPHLIDVFVHFGIAQSSTRGGSRVEGIFAGLFMNAYGSGQVMLRWGVLAKSVKNIMLGHASVQAEMEQVVEVYEYAQKLGGEAGFYHILNNPKASLLSLTQFPNFSSVVLGNAAGLGIMGEYRGTPRNQDLYDAAKAYAEQLKENGVINYSVLDLTAEELEAIKHQLNPKEDDVEL

SEQ ID NO: 10634 - protein, 393 aa, Artificial Sequence
  derived and/or modified protein sequence (wt) from HRSV__P26589.1__N
MSLDRLKLNDVSNKDSLLSNCKYSVTRSTGDVTSVSGHAMQKALARTLGMFLLTAFNRCEEVAEIGLQYAMSLLGRDDSIKILREAGYNVKCVDTQLKDFTIKLQGKEYKIQVLDIVGIDAANLADLEIQARGVVAKELKTGARLPDNRRHDAPDCGVIVLCIAALVVSKLAAGDRGGLDAVERRALNVLKAEKARYPNMEVKQIAESFYDLFERKPYYIDVFITFGLAQSSVRGGSKVEGLFSGLFMNAYGAGQVMLRWGLLAKSVKNIMLGHASVQAEMEQVVEVYEYAQKQGGEAGFYHIRNNPKASLLSLTNCPNFTSVVLGNAAGLGIIGSYKGAPRNRELFDAAKDYAERLKDNNVINYSALNLTAEERELISQQLNIVDDTPDDDI

SEQ ID NO: 10635 - protein, 391 aa, Artificial Sequence
  derived and/or modified protein sequence (wt) from HRSV__P35943.1__N
MALSKVKLNDTFNKDQLLSTSKYTIQRSTGDNIDIPNYDVQKHLNKLCGMLLITEDANHKFTGLIGMLYAMSRLGREDTLKILKDAGYQVRANGVDVITHRQDVNGKEMKFEVLTLVSLTSEVQGNIEIESRKSYKKMLKEMGEVAPEYRHDFPDCGMIVLCVAALVITKLAAGDRSGLTAVIRRANNVLRNEMKRYKGLIPKDIANSFYEVFEKYPHYIDVFVHFGIAQSSTRGGSRVEGIFAGLFMNAYGAGQVMLRWGVLAKSVKNIMLGHASVQAEMEQVVEVYEYAQKLGGEAGFYHILNNPKASLLSLTQFPNFSSVVLGNAAGLGIMGEYRGTPRNQDLYDAAKAYAEQLKENGVINYSVLDLTTEELEAIKNQLNPKDNDVEL

SEQ ID NO: 10636 - protein, 391 aa, Artificial Sequence
  derived and/or modified protein sequence (wt) from HRSV__Q83957.1__N
MALSKVKLNDTFNKDQLLSTSKYTIQRSTGDNIDIPNYDVQKHLNKLCGMLLITEDANHKFTGLIGMLYAMSRLGREDTLKILKDAGYQVKANGVDVITHRQDVNGKEMKFEVLTLVSLTSEVQVNIEVESRKSYKKMLKEMGEVAPEYRHDSPDCGMIVLCIAALVIAKLAAGDRSGLTAVIRRANNVLKNEIERYKGLIPKDVANSFYEVFEKYPHYIDVFVHFGIAQSSTRGGSRVEGIFAGLFMNAYGAGQVMLRWGVLAKSVKNIMLGHASVQAEMEQVVEVYEYAQKLGGEAGFYHILNNPKASLLSLTQFPNFSSVVLGNAAGLGIMGEYRGTPRNQDLYDAAKAYAEQLKENGVINYSVLDLTTEELEAIKNQLNPKDNDVEL

SEQ ID NO: 10637 - protein, 241 aa, Artificial Sequence
  derived and/or modified protein sequence (wt) from HRSV(A2)__P03421.1__P
MEKFAPEFHGEDANNRATKFLESIKGKFTSPKDPKKKDSIISVNSIDIEVTKESPITSNSTIINPTNETDDTAGNKPNYQRKPLVSFKEDPTPSDNPFSKLYKETIETFDNNEEESSYSYEEINDQTNDNITARLDRIDEKLSEILGMLHTLVVASAGPTSARDGIRDAMIGLREEMIEKIRTEALMTNDRLEAMARLRNEESEKMAKDTSDEVSLNPTSEKLNNLLEGNDSDNDLSLEDF

SEQ ID NO: 10638 - RNA, 726 nt, Artificial Sequence
  derived and/or modified CDS sequence (wt) from HRSV(A2)__P03421.1__P
auggaaaaguuugcuccugaauuccauggagaagaugcaaacaacagggcuacuaaauuccuagaaucaauaaagggcaaauucacaucacccaaagaucccaagaaaaaagauaguaucauaucugucaacucaauagauauagaaguaaccaaagaaagcccuauaacaucaaauucaacuauuaucaacccaacaaaugagacagaugauacugcagggaacaagcccaauuaucaaagaaaaccucuaguaaguuucaaagaagacccuacaccaagugauaaucccuuuucuaaacuauacaaagaaaccauagaaacauuugauaacaaugaagaagaauccagcuauucauacgaagaaauaaaugaucagacaaacgauaauauaacagcaagauuagauaggauugaugaaaaauuaagugaaauacuaggaaugcuucacacauuaguaguggcaagugcaggaccuacaucugcucgggaugguauaagagaugccaugauugguuuaagagaagaaaugauagaaaaaaucagaacugaagcauuaaugaccaaugacagauuagaagcuauggcaagacucaggaaugaggaaagugaaaagauggcaaaagacacaucagaugaagugucucucaauccaacaucagagaaauugaacaaccuauuggaagggaaugauagugacaaugaucuaucacuugaagauuucuga

SEQ ID NO: 10639 - RNA, 726 nt, Artificial Sequence
  derived and/or modified CDS sequence (opt1) from HRSV(A2)__P03421.1__P
auggagaaguucgcccccgaguuccacggcgaggacgccaacaaccgcgcgaccaaguuccuggagagcaucaaggggaaguucaccuccccgaaggaccccaagaagaaggacagcaucaucuccgugaacagcaucgacaucgaggucacgaaggagucccccaucaccagcaacuccaccaucaucaaccccaccaacgagacggacgacaccgccggcaacaagccgaacuaccagcggaagccccucgugagcuucaaggaggaccccacccccuccgacaacccguucagcaagcuguacaaggagaccaucgagacguucgacaacaacgaggaggaguccagcuacuccuacgaggagaucaacgaccagaccaacgacaacaucaccgcccgccuggaccggaucgacgagaagcucagcgagauccuggggaugcugcacacccucguggucgccuccgccggccccacgagcgcgcgcgacgggauccgggacgccaugaucggccugcgcgaggagaugaucgagaagauccggaccgaggcccugaugaccaacgaccgccucgaggccauggcgcggcugcgcaacgaggaguccgagaagauggccaaggacaccagcgacgaggugucccugaaccccacgagcgagaagcucaacaaccugcuggagggcaacgacagcgacaacgaccucucccuggaggacuucuga

SEQ ID NO: 10640 - RNA, 726 nt, Artificial Sequence
  derived and/or modified CDS sequence (opt2) from HRSV(A2)__P03421.1__P
auggagaaguucgcccccgaguuccacggcgaggacgccaacaaccgcgccaccaaguuccucgaguccaucaagggcaaguucaccucccccaaggaccccaagaagaaggacuccaucaucuccgucaacuccaucgacaucgaggucaccaaggagucccccaucaccuccaacuccaccaucaucaaccccaccaacgagaccgacgacaccgccggcaacaagcccaacuaccagcgcaagccccucgucuccuucaaggaggaccccacccccuccgacaaccccuucuccaagcucuacaaggagaccaucgagaccuucgacaacaacgaggaggaguccuccuacuccuacgaggagaucaacgaccagaccaacgacaacaucaccgcccgccucgaccgcaucgacgagaagcucuccgagauccucggcaugcuccacacccucgucgucgccuccgccggccccaccuccgcccgcgacggcauccgcgacgccaugaucggccuccgcgaggagaugaucgagaagauccgcaccgaggcccucaugaccaacgaccgccucgaggccauggcccgccuccgcaacgaggaguccgagaagauggccaaggacaccuccgacgaggucucccucaaccccaccuccgagaagcucaacaaccuccucgagggcaacgacuccgacaacgaccucucccucgaggacuucuga

SEQ ID NO: 10641 - RNA, 726 nt, Artificial Sequence
  derived and/or modified CDS sequence (opt3) from HRSV(A2)__P03421.1__P
auggagaaguucgcccccgaauuucacggcgaggacgcuaacaauagagcaaccaaauuccuggaaagcaucaaggggaaauuuacauccccuaaggauccgaaaaagaaggacucuauuauaucagugaacaguaucgauauugaggucacuaaagaaagcccaaucacguccaauucuaccauuaucaaccccacaaaugagacugacgauaccgccggaaacaagccuaauuaccagaggaaaccacucguuucguucaaggaggaccccacaccuucagauaacccauuuagcaaacuuuauaaggaaaccauagagacuuucgacaauaacgaagaggagaguuccuacucuuaugaagagaucaaugaucaaacaaacgacaauauuaccgcgcggcuggaucgcaucgacgaaaaguugagcgagauuuuagguaugcugcauacgcuagugguagcuuccgccggccccacuucagcacgagaugggauccgugacgccaugauaggacucagagaagagaugauugagaaaaucaggaccgaagcucugaugacaaacgaccggcuugaggcaauggcccgccugagaaaugaagagagugaaaagauggcuaaagauacuagcgacgaggugucuuugaacccuaccuccgagaagcucaacaaucugcuggaaggcaacgauucagacaaugaucucagcuuagaggacuuuuga

SEQ ID NO: 10642 - RNA, 726 nt, Artificial Sequence
  derived and/or modified CDS sequence (opt4) from HRSV(A2)__P03421.1__P
auggagaaguucgcccccgaguuccacggcgaggacgccaacaacagagccaccaaguuccuggagagcaucaagggcaaguucaccagccccaaggaccccaagaagaaggacagcaucaucagcgugaacagcaucgacaucgaggugaccaaggagagccccaucaccagcaacagcaccaucaucaaccccaccaacgagaccgacgacaccgccggcaacaagcccaacuaccagagaaagccccuggugagcuucaaggaggaccccacccccagcgacaaccccuucagcaagcuguacaaggagaccaucgagaccuucgacaacaacgaggaggagagcagcuacagcuacgaggagaucaacgaccagaccaacgacaacaucaccgccagacuggacagaaucgacgagaagcugagcgagauccugggcaugcugcacacccuggugguggccagcgccggccccaccagcgccagagacggcaucagagacgccaugaucggccugagagaggagaugaucgagaagaucagaaccgaggcccugaugaccaacgacagacuggaggccauggccagacugagaaacgaggagagcgagaagauggccaaggacaccagcgacgaggugagccugaaccccaccagcgagaagcugaacaaccugcuggagggcaacgacagcgacaacgaccugagccuggaggacuucuga

SEQ ID NO: 10643 - RNA, 726 nt, Artificial Sequence
  derived and/or modified CDS sequence (opt5) from HRSV(A2)__P03421.1__P
auggagaaguucgcccccgaauuucacggcgaggacgcuaacaauagagccaccaaauuccuggaaagcaucaaggggaaauuuacauccccuaaggauccgaaaaagaaggacucuauuaucagcgugaacuccauugauaucgaggucacgaaagaaucucccauuaccagcaauuccacaaucaucaacccuaccaaugagacagacgauaccgcgggaaacaagcccaauuaccagcggaaaccucucguuucuuucaaggaggaccccacaccuagcgauaacccguuuuccaaacuguauaaggaaaccauugagacguucgacaauaacgaagaggagagcucuuacuccuaugaagagaucaaugaucaaaccaacgacaauauuacagcucgccuugauagaaucgacgaaaagcugagcgagauucucggcaugcugcauacccuugugguggccucugccgggcccacauccgcucgggauggaauccgcgacgccaugauuggccugagagaagagaugaucgagaaaauccggaccgaagcucucaugacgaacgaccgccuggaggccauggcgagacugcggaaugaagagagcgaaaagauggccaaagauacaucugacgaggucucccucaacccuaccagcgagaagcugaacaaucuucuggaagggaacgauuccgacaaugaucucucucuggaggacuuuuga

SEQ ID NO: 10644 - RNA, 726 nt, Artificial Sequence
  derived and/or modified CDS sequence (opt6) from HRSV(A2)__P03421.1__P
auggaaaaauucgcaccagaauuucacggagaagacgcaaacaacagagcaacaaaauucuuagaaucaaucaaaggaaaauucacaagcccaaaagacccaaaaaaaaaagacucaauaauaagcguaaacucaauagacauagaaguaacaaaagaaagcccaauaacaagcaacagcacaauaauaaacccaacaaacgaaacagaugacacagcuggaaauaaaccaaacuaccaaagaaaaccccuagucagcuucaaagaagaccccacaccaucagacaacccauucagcaaacuauauaaagaaacaauagaaacauuugacaacaacgaagaagaaucaucauacucauacgaagaaauaaacgaccaaacaaacgacaacauaaccgcaagauuagacagaauagaugaaaaacuaucagaaauacuaggaaugcuacacacauuaguaguagcaagcgcaggaccaacaucagcaagagacggaauaagagacgcaaugauaggacucagagaagaaaugauagaaaaaauaagaacagaagcacuaaugacaaacgacagauuagaagcaauggcaagacuaagaaaugaagaaucggaaaaaauggcaaaagacacaucagacgaaguaagccuaaacccaacaucagaaaaauuaaauaaccuacuagaaggaaacgacagcgacaacgacuuaucacuagaagacuucuaa

SEQ ID NO: 10645 - RNA, 726 nt, Artificial Sequence
  derived and/or modified CDS sequence (opt11) from HRSV(A2)__P03421.1__P
auggaaaaauucgcgcccgaguuccacggcgaggacgcgaacaaccgcgcgacaaaguuccuagaaucaaucaagggcaaauucacgagcccgaaagaccccaagaaaaaggacucaaucauaagcgugaacucgaucgacaucgaggucacgaaagagagcccgaucacaagcaacagcaccauaauaaacccgaccaacgaaacagacgacaccgcgggcaacaaaccgaacuaccaaagaaaaccgcucgugagcuucaaagaagacccgaccccaagcgacaacccguucucaaaacuauacaaggaaacgaucgagaccuucgacaacaacgaggaagagagcucguacucguacgaggaaauaaacgaccaaacaaacgacaacauaaccgcacgccuagacaggaucgacgaaaaacucucggaaauacucgggaugcuacacacgcucguggucgcgagcgcaggcccgaccucggccagggacggcaucagggacgcaaugauaggccugcgagaggaaaugaucgagaaaauacgcaccgaagcacucaugaccaacgacagacucgaagccauggccaggcucaggaacgaagaauccgaaaagauggcgaaagacaccucggacgaggucucgcucaaccccacgagcgagaaacugaacaaccuacuggaagggaacgacagcgacaacgaccuuucccucgaggacuucuga

SEQ ID NO: 10646 - RNA, 1002 nt, Artificial Sequence
  mRNA product Design a-1 comprising derived and/or modified sequence from HRSV(A2)__P03421.1__P (wt)
gggagagucccgcagucggcguccagcggcucugcuuguucgugugugugucguugcaggccuuauucaagcuuaccauggaaaaguuugcuccugaauuccauggagaagaugcaaacaacagggcuacuaaauuccuagaaucaauaaagggcaaauucacaucacccaaagaucccaagaaaaaagauaguaucauaucugucaacucaauagauauagaaguaaccaaagaaagcccuauaacaucaaauucaacuauuaucaacccaacaaaugagacagaugauacugcagggaacaagcccaauuaucaaagaaaaccucuaguaaguuucaaagaagacccuacaccaagugauaaucccuuuucuaaacuauacaaagaaaccauagaaacauuugauaacaaugaagaagaauccagcuauucauacgaagaaauaaaugaucagacaaacgauaauauaacagcaagauuagauaggauugaugaaaaauuaagugaaauacuaggaaugcuucacacauuaguaguggcaagugcaggaccuacaucugcucgggaugguauaagagaugccaugauugguuuaagagaagaaaugauagaaaaaaucagaacugaagcauuaaugaccaaugacagauuagaagcuauggcaagacucaggaaugaggaaagugaaaagauggcaaaagacacaucagaugaagugucucucaauccaacaucagagaaauugaacaaccuauuggaagggaaugauagugacaaugaucuaucacuugaagauuucugaggacuagucccuguucccagagcccacuuuuuuuucuuuuuuugaaauaaaauagccugucuuucagaucuaaaaaaaaaaaaaaaaaaaaaaaaaaaaaaaaaaaaaaaaaaaaaaaaaaaaaaaaaaaaaaaaugcaucccccccccccccccccccccccccccccccaaaggcucuuuucagagccaccagaauu

SEQ ID NO: 10647 - RNA, 1002 nt, Artificial Sequence
  mRNA product Design a-1 comprising derived and/or modified sequence from HRSV(A2)__P03421.1__P (opt1)
gggagagucccgcagucggcguccagcggcucugcuuguucgugugugugucguugcaggccuuauucaagcuuaccauggagaaguucgcccccgaguuccacggcgaggacgccaacaaccgcgcgaccaaguuccuggagagcaucaaggggaaguucaccuccccgaaggaccccaagaagaaggacagcaucaucuccgugaacagcaucgacaucgaggucacgaaggagucccccaucaccagcaacuccaccaucaucaaccccaccaacgagacggacgacaccgccggcaacaagccgaacuaccagcggaagccccucgugagcuucaaggaggaccccacccccuccgacaacccguucagcaagcuguacaaggagaccaucgagacguucgacaacaacgaggaggaguccagcuacuccuacgaggagaucaacgaccagaccaacgacaacaucaccgcccgccuggaccggaucgacgagaagcucagcgagauccuggggaugcugcacacccucguggucgccuccgccggccccacgagcgcgcgcgacgggauccgggacgccaugaucggccugcgcgaggagaugaucgagaagauccggaccgaggcccugaugaccaacgaccgccucgaggccauggcgcggcugcgcaacgaggaguccgagaagauggccaaggacaccagcgacgaggugucccugaaccccacgagcgagaagcucaacaaccugcuggagggcaacgacagcgacaacgaccucucccuggaggacuucugaggacuagucccuguucccagagcccacuuuuuuuucuuuuuuugaaauaaaauagccugucuuucagaucuaaaaaaaaaaaaaaaaaaaaaaaaaaaaaaaaaaaaaaaaaaaaaaaaaaaaaaaaaaaaaaaaugcaucccccccccccccccccccccccccccccccaaaggcucuuuucagagccaccagaauu

SEQ ID NO: 10648 - RNA, 1002 nt, Artificial Sequence
  mRNA product Design a-1 comprising derived and/or modified sequence from HRSV(A2)__P03421.1__P (opt2)
gggagagucccgcagucggcguccagcggcucugcuuguucgugugugugucguugcaggccuuauucaagcuuaccauggagaaguucgcccccgaguuccacggcgaggacgccaacaaccgcgccaccaaguuccucgaguccaucaagggcaaguucaccucccccaaggaccccaagaagaaggacuccaucaucuccgucaacuccaucgacaucgaggucaccaaggagucccccaucaccuccaacuccaccaucaucaaccccaccaacgagaccgacgacaccgccggcaacaagcccaacuaccagcgcaagccccucgucuccuucaaggaggaccccacccccuccgacaaccccuucuccaagcucuacaaggagaccaucgagaccuucgacaacaacgaggaggaguccuccuacuccuacgaggagaucaacgaccagaccaacgacaacaucaccgcccgccucgaccgcaucgacgagaagcucuccgagauccucggcaugcuccacacccucgucgucgccuccgccggccccaccuccgcccgcgacggcauccgcgacgccaugaucggccuccgcgaggagaugaucgagaagauccgcaccgaggcccucaugaccaacgaccgccucgaggccauggcccgccuccgcaacgaggaguccgagaagauggccaaggacaccuccgacgaggucucccucaaccccaccuccgagaagcucaacaaccuccucgagggcaacgacuccgacaacgaccucucccucgaggacuucugaggacuagucccuguucccagagcccacuuuuuuuucuuuuuuugaaauaaaauagccugucuuucagaucuaaaaaaaaaaaaaaaaaaaaaaaaaaaaaaaaaaaaaaaaaaaaaaaaaaaaaaaaaaaaaaaaugcaucccccccccccccccccccccccccccccccaaaggcucuuuucagagccaccagaauu

SEQ ID NO: 10649 - RNA, 1002 nt, Artificial Sequence
  mRNA product Design a-1 comprising derived and/or modified sequence from HRSV(A2)__P03421.1__P (opt3)
gggagagucccgcagucggcguccagcggcucugcuuguucgugugugugucguugcaggccuuauucaagcuuaccauggagaaguucgcccccgaauuucacggcgaggacgcuaacaauagagcaaccaaauuccuggaaagcaucaaggggaaauuuacauccccuaaggauccgaaaaagaaggacucuauuauaucagugaacaguaucgauauugaggucacuaaagaaagcccaaucacguccaauucuaccauuaucaaccccacaaaugagacugacgauaccgccggaaacaagccuaauuaccagaggaaaccacucguuucguucaaggaggaccccacaccuucagauaacccauuuagcaaacuuuauaaggaaaccauagagacuuucgacaauaacgaagaggagaguuccuacucuuaugaagagaucaaugaucaaacaaacgacaauauuaccgcgcggcuggaucgcaucgacgaaaaguugagcgagauuuuagguaugcugcauacgcuagugguagcuuccgccggccccacuucagcacgagaugggauccgugacgccaugauaggacucagagaagagaugauugagaaaaucaggaccgaagcucugaugacaaacgaccggcuugaggcaauggcccgccugagaaaugaagagagugaaaagauggcuaaagauacuagcgacgaggugucuuugaacccuaccuccgagaagcucaacaaucugcuggaaggcaacgauucagacaaugaucucagcuuagaggacuuuugaggacuagucccuguucccagagcccacuuuuuuuucuuuuuuugaaauaaaauagccugucuuucagaucuaaaaaaaaaaaaaaaaaaaaaaaaaaaaaaaaaaaaaaaaaaaaaaaaaaaaaaaaaaaaaaaaugcaucccccccccccccccccccccccccccccccaaaggcucuuuucagagccaccagaauu

SEQ ID NO: 10650 - RNA, 1002 nt, Artificial Sequence
  mRNA product Design a-1 comprising derived and/or modified sequence from HRSV(A2)__P03421.1__P (opt4)
gggagagucccgcagucggcguccagcggcucugcuuguucgugugugugucguugcaggccuuauucaagcuuaccauggagaaguucgcccccgaguuccacggcgaggacgccaacaacagagccaccaaguuccuggagagcaucaagggcaaguucaccagccccaaggaccccaagaagaaggacagcaucaucagcgugaacagcaucgacaucgaggugaccaaggagagccccaucaccagcaacagcaccaucaucaaccccaccaacgagaccgacgacaccgccggcaacaagcccaacuaccagagaaagccccuggugagcuucaaggaggaccccacccccagcgacaaccccuucagcaagcuguacaaggagaccaucgagaccuucgacaacaacgaggaggagagcagcuacagcuacgaggagaucaacgaccagaccaacgacaacaucaccgccagacuggacagaaucgacgagaagcugagcgagauccugggcaugcugcacacccuggugguggccagcgccggccccaccagcgccagagacggcaucagagacgccaugaucggccugagagaggagaugaucgagaagaucagaaccgaggcccugaugaccaacgacagacuggaggccauggccagacugagaaacgaggagagcgagaagauggccaaggacaccagcgacgaggugagccugaaccccaccagcgagaagcugaacaaccugcuggagggcaacgacagcgacaacgaccugagccuggaggacuucugaggacuagucccuguucccagagcccacuuuuuuuucuuuuuuugaaauaaaauagccugucuuucagaucuaaaaaaaaaaaaaaaaaaaaaaaaaaaaaaaaaaaaaaaaaaaaaaaaaaaaaaaaaaaaaaaaugcaucccccccccccccccccccccccccccccccaaaggcucuuuucagagccaccagaauu

SEQ ID NO: 10651 - RNA, 1002 nt, Artificial Sequence
  mRNA product Design a-1 comprising derived and/or modified sequence from HRSV(A2)__P03421.1__P (opt5)
gggagagucccgcagucggcguccagcggcucugcuuguucgugugugugucguugcaggccuuauucaagcuuaccauggagaaguucgcccccgaauuucacggcgaggacgcuaacaauagagccaccaaauuccuggaaagcaucaaggggaaauuuacauccccuaaggauccgaaaaagaaggacucuauuaucagcgugaacuccauugauaucgaggucacgaaagaaucucccauuaccagcaauuccacaaucaucaacccuaccaaugagacagacgauaccgcgggaaacaagcccaauuaccagcggaaaccucucguuucuuucaaggaggaccccacaccuagcgauaacccguuuuccaaacuguauaaggaaaccauugagacguucgacaauaacgaagaggagagcucuuacuccuaugaagagaucaaugaucaaaccaacgacaauauuacagcucgccuugauagaaucgacgaaaagcugagcgagauucucggcaugcugcauacccuugugguggccucugccgggcccacauccgcucgggauggaauccgcgacgccaugauuggccugagagaagagaugaucgagaaaauccggaccgaagcucucaugacgaacgaccgccuggaggccauggcgagacugcggaaugaagagagcgaaaagauggccaaagauacaucugacgaggucucccucaacccuaccagcgagaagcugaacaaucuucuggaagggaacgauuccgacaaugaucucucucuggaggacuuuugaggacuagucccuguucccagagcccacuuuuuuuucuuuuuuugaaauaaaauagccugucuuucagaucuaaaaaaaaaaaaaaaaaaaaaaaaaaaaaaaaaaaaaaaaaaaaaaaaaaaaaaaaaaaaaaaaugcaucccccccccccccccccccccccccccccccaaaggcucuuuucagagccaccagaauu

SEQ ID NO: 10652 - RNA, 1002 nt, Artificial Sequence
  mRNA product Design a-1 comprising derived and/or modified sequence from HRSV(A2)__P03421.1__P (opt6)
gggagagucccgcagucggcguccagcggcucugcuuguucgugugugugucguugcaggccuuauucaagcuuaccauggaaaaauucgcaccagaauuucacggagaagacgcaaacaacagagcaacaaaauucuuagaaucaaucaaaggaaaauucacaagcccaaaagacccaaaaaaaaaagacucaauaauaagcguaaacucaauagacauagaaguaacaaaagaaagcccaauaacaagcaacagcacaauaauaaacccaacaaacgaaacagaugacacagcuggaaauaaaccaaacuaccaaagaaaaccccuagucagcuucaaagaagaccccacaccaucagacaacccauucagcaaacuauauaaagaaacaauagaaacauuugacaacaacgaagaagaaucaucauacucauacgaagaaauaaacgaccaaacaaacgacaacauaaccgcaagauuagacagaauagaugaaaaacuaucagaaauacuaggaaugcuacacacauuaguaguagcaagcgcaggaccaacaucagcaagagacggaauaagagacgcaaugauaggacucagagaagaaaugauagaaaaaauaagaacagaagcacuaaugacaaacgacagauuagaagcaauggcaagacuaagaaaugaagaaucggaaaaaauggcaaaagacacaucagacgaaguaagccuaaacccaacaucagaaaaauuaaauaaccuacuagaaggaaacgacagcgacaacgacuuaucacuagaagacuucuaaggacuagucccuguucccagagcccacuuuuuuuucuuuuuuugaaauaaaauagccugucuuucagaucuaaaaaaaaaaaaaaaaaaaaaaaaaaaaaaaaaaaaaaaaaaaaaaaaaaaaaaaaaaaaaaaaugcaucccccccccccccccccccccccccccccccaaaggcucuuuucagagccaccagaauu

SEQ ID NO: 10653 - RNA, 1002 nt, Artificial Sequence
  mRNA product Design a-1 comprising derived and/or modified sequence from HRSV(A2)__P03421.1__P (opt11)
gggagagucccgcagucggcguccagcggcucugcuuguucgugugugugucguugcaggccuuauucaagcuuaccauggaaaaauucgcgcccgaguuccacggcgaggacgcgaacaaccgcgcgacaaaguuccuagaaucaaucaagggcaaauucacgagcccgaaagaccccaagaaaaaggacucaaucauaagcgugaacucgaucgacaucgaggucacgaaagagagcccgaucacaagcaacagcaccauaauaaacccgaccaacgaaacagacgacaccgcgggcaacaaaccgaacuaccaaagaaaaccgcucgugagcuucaaagaagacccgaccccaagcgacaacccguucucaaaacuauacaaggaaacgaucgagaccuucgacaacaacgaggaagagagcucguacucguacgaggaaauaaacgaccaaacaaacgacaacauaaccgcacgccuagacaggaucgacgaaaaacucucggaaauacucgggaugcuacacacgcucguggucgcgagcgcaggcccgaccucggccagggacggcaucagggacgcaaugauaggccugcgagaggaaaugaucgagaaaauacgcaccgaagcacucaugaccaacgacagacucgaagccauggccaggcucaggaacgaagaauccgaaaagauggcgaaagacaccucggacgaggucucgcucaaccccacgagcgagaaacugaacaaccuacuggaagggaacgacagcgacaacgaccuuucccucgaggacuucugaggacuagucccuguucccagagcccacuuuuuuuucuuuuuuugaaauaaaauagccugucuuucagaucuaaaaaaaaaaaaaaaaaaaaaaaaaaaaaaaaaaaaaaaaaaaaaaaaaaaaaaaaaaaaaaaaugcaucccccccccccccccccccccccccccccccaaaggcucuuuucagagccaccagaauu

SEQ ID NO: 10654 - RNA, 1021 nt, Artificial Sequence
  mRNA product Design a-2 comprising derived and/or modified sequence from HRSV(A2)__P03421.1__P (wt)
gggagaguccgcucagccagguugcagaagcggcuuagcguguguccuaaucuucucucugcguguagguaggccugugccgcaaacaagcuuaccauggaaaaguuugcuccugaauuccauggagaagaugcaaacaacagggcuacuaaauuccuagaaucaauaaagggcaaauucacaucacccaaagaucccaagaaaaaagauaguaucauaucugucaacucaauagauauagaaguaaccaaagaaagcccuauaacaucaaauucaacuauuaucaacccaacaaaugagacagaugauacugcagggaacaagcccaauuaucaaagaaaaccucuaguaaguuucaaagaagacccuacaccaagugauaaucccuuuucuaaacuauacaaagaaaccauagaaacauuugauaacaaugaagaagaauccagcuauucauacgaagaaauaaaugaucagacaaacgauaauauaacagcaagauuagauaggauugaugaaaaauuaagugaaauacuaggaaugcuucacacauuaguaguggcaagugcaggaccuacaucugcucgggaugguauaagagaugccaugauugguuuaagagaagaaaugauagaaaaaaucagaacugaagcauuaaugaccaaugacagauuagaagcuauggcaagacucaggaaugaggaaagugaaaagauggcaaaagacacaucagaugaagugucucucaauccaacaucagagaaauugaacaaccuauuggaagggaaugauagugacaaugaucuaucacuugaagauuucugaggacuagucccuguucccagagcccacuuuuuuuucuuuuuuugaaauaaaauagccugucuuucagaucuaaaaaaaaaaaaaaaaaaaaaaaaaaaaaaaaaaaaaaaaaaaaaaaaaaaaaaaaaaaaaaaaugcaucccccccccccccccccccccccccccccccaaaggcucuuuucagagccaccagaauu

SEQ ID NO: 10655 - RNA, 1021 nt, Artificial Sequence
  mRNA product Design a-2 comprising derived and/or modified sequence from HRSV(A2)__P03421.1__P (opt1)
gggagaguccgcucagccagguugcagaagcggcuuagcguguguccuaaucuucucucugcguguagguaggccugugccgcaaacaagcuuaccauggagaaguucgcccccgaguuccacggcgaggacgccaacaaccgcgcgaccaaguuccuggagagcaucaaggggaaguucaccuccccgaaggaccccaagaagaaggacagcaucaucuccgugaacagcaucgacaucgaggucacgaaggagucccccaucaccagcaacuccaccaucaucaaccccaccaacgagacggacgacaccgccggcaacaagccgaacuaccagcggaagccccucgugagcuucaaggaggaccccacccccuccgacaacccguucagcaagcuguacaaggagaccaucgagacguucgacaacaacgaggaggaguccagcuacuccuacgaggagaucaacgaccagaccaacgacaacaucaccgcccgccuggaccggaucgacgagaagcucagcgagauccuggggaugcugcacacccucguggucgccuccgccggccccacgagcgcgcgcgacgggauccgggacgccaugaucggccugcgcgaggagaugaucgagaagauccggaccgaggcccugaugaccaacgaccgccucgaggccauggcgcggcugcgcaacgaggaguccgagaagauggccaaggacaccagcgacgaggugucccugaaccccacgagcgagaagcucaacaaccugcuggagggcaacgacagcgacaacgaccucucccuggaggacuucugaggacuagucccuguucccagagcccacuuuuuuuucuuuuuuugaaauaaaauagccugucuuucagaucuaaaaaaaaaaaaaaaaaaaaaaaaaaaaaaaaaaaaaaaaaaaaaaaaaaaaaaaaaaaaaaaaugcaucccccccccccccccccccccccccccccccaaaggcucuuuucagagccaccagaauu

SEQ ID NO: 10656 - RNA, 1021 nt, Artificial Sequence
  mRNA product Design a-2 comprising derived and/or modified sequence from HRSV(A2)__P03421.1__P (opt2)
gggagaguccgcucagccagguugcagaagcggcuuagcguguguccuaaucuucucucugcguguagguaggccugugccgcaaacaagcuuaccauggagaaguucgcccccgaguuccacggcgaggacgccaacaaccgcgccaccaaguuccucgaguccaucaagggcaaguucaccucccccaaggaccccaagaagaaggacuccaucaucuccgucaacuccaucgacaucgaggucaccaaggagucccccaucaccuccaacuccaccaucaucaaccccaccaacgagaccgacgacaccgccggcaacaagcccaacuaccagcgcaagccccucgucuccuucaaggaggaccccacccccuccgacaaccccuucuccaagcucuacaaggagaccaucgagaccuucgacaacaacgaggaggaguccuccuacuccuacgaggagaucaacgaccagaccaacgacaacaucaccgcccgccucgaccgcaucgacgagaagcucuccgagauccucggcaugcuccacacccucgucgucgccuccgccggccccaccuccgcccgcgacggcauccgcgacgccaugaucggccuccgcgaggagaugaucgagaagauccgcaccgaggcccucaugaccaacgaccgccucgaggccauggcccgccuccgcaacgaggaguccgagaagauggccaaggacaccuccgacgaggucucccucaaccccaccuccgagaagcucaacaaccuccucgagggcaacgacuccgacaacgaccucucccucgaggacuucugaggacuagucccuguucccagagcccacuuuuuuuucuuuuuuugaaauaaaauagccugucuuucagaucuaaaaaaaaaaaaaaaaaaaaaaaaaaaaaaaaaaaaaaaaaaaaaaaaaaaaaaaaaaaaaaaaugcaucccccccccccccccccccccccccccccccaaaggcucuuuucagagccaccagaauu

SEQ ID NO: 10657 - RNA, 1021 nt, Artificial Sequence
  mRNA product Design a-2 comprising derived and/or modified sequence from HRSV(A2)__P03421.1__P (opt3)
gggagaguccgcucagccagguugcagaagcggcuuagcguguguccuaaucuucucucugcguguagguaggccugugccgcaaacaagcuuaccauggagaaguucgcccccgaauuucacggcgaggacgcuaacaauagagcaaccaaauuccuggaaagcaucaaggggaaauuuacauccccuaaggauccgaaaaagaaggacucuauuauaucagugaacaguaucgauauugaggucacuaaagaaagcccaaucacguccaauucuaccauuaucaaccccacaaaugagacugacgauaccgccggaaacaagccuaauuaccagaggaaaccacucguuucguucaaggaggaccccacaccuucagauaacccauuuagcaaacuuuauaaggaaaccauagagacuuucgacaauaacgaagaggagaguuccuacucuuaugaagagaucaaugaucaaacaaacgacaauauuaccgcgcggcuggaucgcaucgacgaaaaguugagcgagauuuuagguaugcugcauacgcuagugguagcuuccgccggccccacuucagcacgagaugggauccgugacgccaugauaggacucagagaagagaugauugagaaaaucaggaccgaagcucugaugacaaacgaccggcuugaggcaauggcccgccugagaaaugaagagagugaaaagauggcuaaagauacuagcgacgaggugucuuugaacccuaccuccgagaagcucaacaaucugcuggaaggcaacgauucagacaaugaucucagcuuagaggacuuuugaggacuagucccuguucccagagcccacuuuuuuuucuuuuuuugaaauaaaauagccugucuuucagaucuaaaaaaaaaaaaaaaaaaaaaaaaaaaaaaaaaaaaaaaaaaaaaaaaaaaaaaaaaaaaaaaaugcaucccccccccccccccccccccccccccccccaaaggcucuuuucagagccaccagaauu

SEQ ID NO: 10658 - RNA, 1021 nt, Artificial Sequence
  mRNA product Design a-2 comprising derived and/or modified sequence from HRSV(A2)__P03421.1__P (opt4)
gggagaguccgcucagccagguugcagaagcggcuuagcguguguccuaaucuucucucugcguguagguaggccugugccgcaaacaagcuuaccauggagaaguucgcccccgaguuccacggcgaggacgccaacaacagagccaccaaguuccuggagagcaucaagggcaaguucaccagccccaaggaccccaagaagaaggacagcaucaucagcgugaacagcaucgacaucgaggugaccaaggagagccccaucaccagcaacagcaccaucaucaaccccaccaacgagaccgacgacaccgccggcaacaagcccaacuaccagagaaagccccuggugagcuucaaggaggaccccacccccagcgacaaccccuucagcaagcuguacaaggagaccaucgagaccuucgacaacaacgaggaggagagcagcuacagcuacgaggagaucaacgaccagaccaacgacaacaucaccgccagacuggacagaaucgacgagaagcugagcgagauccugggcaugcugcacacccuggugguggccagcgccggccccaccagcgccagagacggcaucagagacgccaugaucggccugagagaggagaugaucgagaagaucagaaccgaggcccugaugaccaacgacagacuggaggccauggccagacugagaaacgaggagagcgagaagauggccaaggacaccagcgacgaggugagccugaaccccaccagcgagaagcugaacaaccugcuggagggcaacgacagcgacaacgaccugagccuggaggacuucugaggacuagucccuguucccagagcccacuuuuuuuucuuuuuuugaaauaaaauagccugucuuucagaucuaaaaaaaaaaaaaaaaaaaaaaaaaaaaaaaaaaaaaaaaaaaaaaaaaaaaaaaaaaaaaaaaugcaucccccccccccccccccccccccccccccccaaaggcucuuuucagagccaccagaauu

SEQ ID NO: 10659 - RNA, 1021 nt, Artificial Sequence
  mRNA product Design a-2 comprising derived and/or modified sequence from HRSV(A2)__P03421.1__P (opt5)
gggagaguccgcucagccagguugcagaagcggcuuagcguguguccuaaucuucucucugcguguagguaggccugugccgcaaacaagcuuaccauggagaaguucgcccccgaauuucacggcgaggacgcuaacaauagagccaccaaauuccuggaaagcaucaaggggaaauuuacauccccuaaggauccgaaaaagaaggacucuauuaucagcgugaacuccauugauaucgaggucacgaaagaaucucccauuaccagcaauuccacaaucaucaacccuaccaaugagacagacgauaccgcgggaaacaagcccaauuaccagcggaaaccucucguuucuuucaaggaggaccccacaccuagcgauaacccguuuuccaaacuguauaaggaaaccauugagacguucgacaauaacgaagaggagagcucuuacuccuaugaagagaucaaugaucaaaccaacgacaauauuacagcucgccuugauagaaucgacgaaaagcugagcgagauucucggcaugcugcauacccuugugguggccucugccgggcccacauccgcucgggauggaauccgcgacgccaugauuggccugagagaagagaugaucgagaaaauccggaccgaagcucucaugacgaacgaccgccuggaggccauggcgagacugcggaaugaagagagcgaaaagauggccaaagauacaucugacgaggucucccucaacccuaccagcgagaagcugaacaaucuucuggaagggaacgauuccgacaaugaucucucucuggaggacuuuugaggacuagucccuguucccagagcccacuuuuuuuucuuuuuuugaaauaaaauagccugucuuucagaucuaaaaaaaaaaaaaaaaaaaaaaaaaaaaaaaaaaaaaaaaaaaaaaaaaaaaaaaaaaaaaaaaugcaucccccccccccccccccccccccccccccccaaaggcucuuuucagagccaccagaauu

SEQ ID NO: 10660 - RNA, 1021 nt, Artificial Sequence
  mRNA product Design a-2 comprising derived and/or modified sequence from HRSV(A2)__P03421.1__P (opt6)
gggagaguccgcucagccagguugcagaagcggcuuagcguguguccuaaucuucucucugcguguagguaggccugugccgcaaacaagcuuaccauggaaaaauucgcaccagaauuucacggagaagacgcaaacaacagagcaacaaaauucuuagaaucaaucaaaggaaaauucacaagcccaaaagacccaaaaaaaaaagacucaauaauaagcguaaacucaauagacauagaaguaacaaaagaaagcccaauaacaagcaacagcacaauaauaaacccaacaaacgaaacagaugacacagcuggaaauaaaccaaacuaccaaagaaaaccccuagucagcuucaaagaagaccccacaccaucagacaacccauucagcaaacuauauaaagaaacaauagaaacauuugacaacaacgaagaagaaucaucauacucauacgaagaaauaaacgaccaaacaaacgacaacauaaccgcaagauuagacagaauagaugaaaaacuaucagaaauacuaggaaugcuacacacauuaguaguagcaagcgcaggaccaacaucagcaagagacggaauaagagacgcaaugauaggacucagagaagaaaugauagaaaaaauaagaacagaagcacuaaugacaaacgacagauuagaagcaauggcaagacuaagaaaugaagaaucggaaaaaauggcaaaagacacaucagacgaaguaagccuaaacccaacaucagaaaaauuaaauaaccuacuagaaggaaacgacagcgacaacgacuuaucacuagaagacuucuaaggacuagucccuguucccagagcccacuuuuuuuucuuuuuuugaaauaaaauagccugucuuucagaucuaaaaaaaaaaaaaaaaaaaaaaaaaaaaaaaaaaaaaaaaaaaaaaaaaaaaaaaaaaaaaaaaugcaucccccccccccccccccccccccccccccccaaaggcucuuuucagagccaccagaauu

SEQ ID NO: 10661 - RNA, 1021 nt, Artificial Sequence
  mRNA product Design a-2 comprising derived and/or modified sequence from HRSV(A2)__P03421.1__P (opt11)
gggagaguccgcucagccagguugcagaagcggcuuagcguguguccuaaucuucucucugcguguagguaggccugugccgcaaacaagcuuaccauggaaaaauucgcgcccgaguuccacggcgaggacgcgaacaaccgcgcgacaaaguuccuagaaucaaucaagggcaaauucacgagcccgaaagaccccaagaaaaaggacucaaucauaagcgugaacucgaucgacaucgaggucacgaaagagagcccgaucacaagcaacagcaccauaauaaacccgaccaacgaaacagacgacaccgcgggcaacaaaccgaacuaccaaagaaaaccgcucgugagcuucaaagaagacccgaccccaagcgacaacccguucucaaaacuauacaaggaaacgaucgagaccuucgacaacaacgaggaagagagcucguacucguacgaggaaauaaacgaccaaacaaacgacaacauaaccgcacgccuagacaggaucgacgaaaaacucucggaaauacucgggaugcuacacacgcucguggucgcgagcgcaggcccgaccucggccagggacggcaucagggacgcaaugauaggccugcgagaggaaaugaucgagaaaauacgcaccgaagcacucaugaccaacgacagacucgaagccauggccaggcucaggaacgaagaauccgaaaagauggcgaaagacaccucggacgaggucucgcucaaccccacgagcgagaaacugaacaaccuacuggaagggaacgacagcgacaacgaccuuucccucgaggacuucugaggacuagucccuguucccagagcccacuuuuuuuucuuuuuuugaaauaaaauagccugucuuucagaucuaaaaaaaaaaaaaaaaaaaaaaaaaaaaaaaaaaaaaaaaaaaaaaaaaaaaaaaaaaaaaaaaugcaucccccccccccccccccccccccccccccccaaaggcucuuuucagagccaccagaauu

SEQ ID NO: 10662 - RNA, 1099 nt, Artificial Sequence
  mRNA product Design a-3 comprising derived and/or modified sequence from HRSV(A2)__P03421.1__P (wt)
gggagagggcgcuuggcuugcaaggacccugagcugcggcauugaagcacacccaacccaacucgacugaagucagccucacugaaccggaucugagaaucuucucucucugggcuugccagggcucuccgaaccuagcuagcauccucuucaauuccaacuagaaagcuuaccauggaaaaguuugcuccugaauuccauggagaagaugcaaacaacagggcuacuaaauuccuagaaucaauaaagggcaaauucacaucacccaaagaucccaagaaaaaagauaguaucauaucugucaacucaauagauauagaaguaaccaaagaaagcccuauaacaucaaauucaacuauuaucaacccaacaaaugagacagaugauacugcagggaacaagcccaauuaucaaagaaaaccucuaguaaguuucaaagaagacccuacaccaagugauaaucccuuuucuaaacuauacaaagaaaccauagaaacauuugauaacaaugaagaagaauccagcuauucauacgaagaaauaaaugaucagacaaacgauaauauaacagcaagauuagauaggauugaugaaaaauuaagugaaauacuaggaaugcuucacacauuaguaguggcaagugcaggaccuacaucugcucgggaugguauaagagaugccaugauugguuuaagagaagaaaugauagaaaaaaucagaacugaagcauuaaugaccaaugacagauuagaagcuauggcaagacucaggaaugaggaaagugaaaagauggcaaaagacacaucagaugaagugucucucaauccaacaucagagaaauugaacaaccuauuggaagggaaugauagugacaaugaucuaucacuugaagauuucugaggacuagucccuguucccagagcccacuuuuuuuucuuuuuuugaaauaaaauagccugucuuucagaucuaaaaaaaaaaaaaaaaaaaaaaaaaaaaaaaaaaaaaaaaaaaaaaaaaaaaaaaaaaaaaaaaugcaucccccccccccccccccccccccccccccccaaaggcucuuuucagagccaccagaauu

SEQ ID NO: 10663 - RNA, 1099 nt, Artificial Sequence
  mRNA product Design a-3 comprising derived and/or modified sequence from HRSV(A2)__P03421.1__P (opt1)
gggagagggcgcuuggcuugcaaggacccugagcugcggcauugaagcacacccaacccaacucgacugaagucagccucacugaaccggaucugagaaucuucucucucugggcuugccagggcucuccgaaccuagcuagcauccucuucaauuccaacuagaaagcuuaccauggagaaguucgcccccgaguuccacggcgaggacgccaacaaccgcgcgaccaaguuccuggagagcaucaaggggaaguucaccuccccgaaggaccccaagaagaaggacagcaucaucuccgugaacagcaucgacaucgaggucacgaaggagucccccaucaccagcaacuccaccaucaucaaccccaccaacgagacggacgacaccgccggcaacaagccgaacuaccagcggaagccccucgugagcuucaaggaggaccccacccccuccgacaacccguucagcaagcuguacaaggagaccaucgagacguucgacaacaacgaggaggaguccagcuacuccuacgaggagaucaacgaccagaccaacgacaacaucaccgcccgccuggaccggaucgacgagaagcucagcgagauccuggggaugcugcacacccucguggucgccuccgccggccccacgagcgcgcgcgacgggauccgggacgccaugaucggccugcgcgaggagaugaucgagaagauccggaccgaggcccugaugaccaacgaccgccucgaggccauggcgcggcugcgcaacgaggaguccgagaagauggccaaggacaccagcgacgaggugucccugaaccccacgagcgagaagcucaacaaccugcuggagggcaacgacagcgacaacgaccucucccuggaggacuucugaggacuagucccuguucccagagcccacuuuuuuuucuuuuuuugaaauaaaauagccugucuuucagaucuaaaaaaaaaaaaaaaaaaaaaaaaaaaaaaaaaaaaaaaaaaaaaaaaaaaaaaaaaaaaaaaaugcaucccccccccccccccccccccccccccccccaaaggcucuuuucagagccaccagaauu

SEQ ID NO: 10664 - RNA, 1099 nt, Artificial Sequence
  mRNA product Design a-3 comprising derived and/or modified sequence from HRSV(A2)__P03421.1__P (opt2)
gggagagggcgcuuggcuugcaaggacccugagcugcggcauugaagcacacccaacccaacucgacugaagucagccucacugaaccggaucugagaaucuucucucucugggcuugccagggcucuccgaaccuagcuagcauccucuucaauuccaacuagaaagcuuaccauggagaaguucgcccccgaguuccacggcgaggacgccaacaaccgcgccaccaaguuccucgaguccaucaagggcaaguucaccucccccaaggaccccaagaagaaggacuccaucaucuccgucaacuccaucgacaucgaggucaccaaggagucccccaucaccuccaacuccaccaucaucaaccccaccaacgagaccgacgacaccgccggcaacaagcccaacuaccagcgcaagccccucgucuccuucaaggaggaccccacccccuccgacaaccccuucuccaagcucuacaaggagaccaucgagaccuucgacaacaacgaggaggaguccuccuacuccuacgaggagaucaacgaccagaccaacgacaacaucaccgcccgccucgaccgcaucgacgagaagcucuccgagauccucggcaugcuccacacccucgucgucgccuccgccggccccaccuccgcccgcgacggcauccgcgacgccaugaucggccuccgcgaggagaugaucgagaagauccgcaccgaggcccucaugaccaacgaccgccucgaggccauggcccgccuccgcaacgaggaguccgagaagauggccaaggacaccuccgacgaggucucccucaaccccaccuccgagaagcucaacaaccuccucgagggcaacgacuccgacaacgaccucucccucgaggacuucugaggacuagucccuguucccagagcccacuuuuuuuucuuuuuuugaaauaaaauagccugucuuucagaucuaaaaaaaaaaaaaaaaaaaaaaaaaaaaaaaaaaaaaaaaaaaaaaaaaaaaaaaaaaaaaaaaugcaucccccccccccccccccccccccccccccccaaaggcucuuuucagagccaccagaauu

SEQ ID NO: 10665 - RNA, 1099 nt, Artificial Sequence
  mRNA product Design a-3 comprising derived and/or modified sequence from HRSV(A2)__P03421.1__P (opt3)
gggagagggcgcuuggcuugcaaggacccugagcugcggcauugaagcacacccaacccaacucgacugaagucagccucacugaaccggaucugagaaucuucucucucugggcuugccagggcucuccgaaccuagcuagcauccucuucaauuccaacuagaaagcuuaccauggagaaguucgcccccgaauuucacggcgaggacgcuaacaauagagcaaccaaauuccuggaaagcaucaaggggaaauuuacauccccuaaggauccgaaaaagaaggacucuauuauaucagugaacaguaucgauauugaggucacuaaagaaagcccaaucacguccaauucuaccauuaucaaccccacaaaugagacugacgauaccgccggaaacaagccuaauuaccagaggaaaccacucguuucguucaaggaggaccccacaccuucagauaacccauuuagcaaacuuuauaaggaaaccauagagacuuucgacaauaacgaagaggagaguuccuacucuuaugaagagaucaaugaucaaacaaacgacaauauuaccgcgcggcuggaucgcaucgacgaaaaguugagcgagauuuuagguaugcugcauacgcuagugguagcuuccgccggccccacuucagcacgagaugggauccgugacgccaugauaggacucagagaagagaugauugagaaaaucaggaccgaagcucugaugacaaacgaccggcuugaggcaauggcccgccugagaaaugaagagagugaaaagauggcuaaagauacuagcgacgaggugucuuugaacccuaccuccgagaagcucaacaaucugcuggaaggcaacgauucagacaaugaucucagcuuagaggacuuuugaggacuagucccuguucccagagcccacuuuuuuuucuuuuuuugaaauaaaauagccugucuuucagaucuaaaaaaaaaaaaaaaaaaaaaaaaaaaaaaaaaaaaaaaaaaaaaaaaaaaaaaaaaaaaaaaaugcaucccccccccccccccccccccccccccccccaaaggcucuuuucagagccaccagaauu

SEQ ID NO: 10666 - RNA, 1099 nt, Artificial Sequence
  mRNA product Design a-3 comprising derived and/or modified sequence from HRSV(A2)__P03421.1__P (opt4)
gggagagggcgcuuggcuugcaaggacccugagcugcggcauugaagcacacccaacccaacucgacugaagucagccucacugaaccggaucugagaaucuucucucucugggcuugccagggcucuccgaaccuagcuagcauccucuucaauuccaacuagaaagcuuaccauggagaaguucgcccccgaguuccacggcgaggacgccaacaacagagccaccaaguuccuggagagcaucaagggcaaguucaccagccccaaggaccccaagaagaaggacagcaucaucagcgugaacagcaucgacaucgaggugaccaaggagagccccaucaccagcaacagcaccaucaucaaccccaccaacgagaccgacgacaccgccggcaacaagcccaacuaccagagaaagccccuggugagcuucaaggaggaccccacccccagcgacaaccccuucagcaagcuguacaaggagaccaucgagaccuucgacaacaacgaggaggagagcagcuacagcuacgaggagaucaacgaccagaccaacgacaacaucaccgccagacuggacagaaucgacgagaagcugagcgagauccugggcaugcugcacacccuggugguggccagcgccggccccaccagcgccagagacggcaucagagacgccaugaucggccugagagaggagaugaucgagaagaucagaaccgaggcccugaugaccaacgacagacuggaggccauggccagacugagaaacgaggagagcgagaagauggccaaggacaccagcgacgaggugagccugaaccccaccagcgagaagcugaacaaccugcuggagggcaacgacagcgacaacgaccugagccuggaggacuucugaggacuagucccuguucccagagcccacuuuuuuuucuuuuuuugaaauaaaauagccugucuuucagaucuaaaaaaaaaaaaaaaaaaaaaaaaaaaaaaaaaaaaaaaaaaaaaaaaaaaaaaaaaaaaaaaaugcaucccccccccccccccccccccccccccccccaaaggcucuuuucagagccaccagaauu

SEQ ID NO: 10667 - RNA, 1099 nt, Artificial Sequence
  mRNA product Design a-3 comprising derived and/or modified sequence from HRSV(A2)__P03421.1__P (opt5)
gggagagggcgcuuggcuugcaaggacccugagcugcggcauugaagcacacccaacccaacucgacugaagucagccucacugaaccggaucugagaaucuucucucucugggcuugccagggcucuccgaaccuagcuagcauccucuucaauuccaacuagaaagcuuaccauggagaaguucgcccccgaauuucacggcgaggacgcuaacaauagagccaccaaauuccuggaaagcaucaaggggaaauuuacauccccuaaggauccgaaaaagaaggacucuauuaucagcgugaacuccauugauaucgaggucacgaaagaaucucccauuaccagcaauuccacaaucaucaacccuaccaaugagacagacgauaccgcgggaaacaagcccaauuaccagcggaaaccucucguuucuuucaaggaggaccccacaccuagcgauaacccguuuuccaaacuguauaaggaaaccauugagacguucgacaauaacgaagaggagagcucuuacuccuaugaagagaucaaugaucaaaccaacgacaauauuacagcucgccuugauagaaucgacgaaaagcugagcgagauucucggcaugcugcauacccuugugguggccucugccgggcccacauccgcucgggauggaauccgcgacgccaugauuggccugagagaagagaugaucgagaaaauccggaccgaagcucucaugacgaacgaccgccuggaggccauggcgagacugcggaaugaagagagcgaaaagauggccaaagauacaucugacgaggucucccucaacccuaccagcgagaagcugaacaaucuucuggaagggaacgauuccgacaaugaucucucucuggaggacuuuugaggacuagucccuguucccagagcccacuuuuuuuucuuuuuuugaaauaaaauagccugucuuucagaucuaaaaaaaaaaaaaaaaaaaaaaaaaaaaaaaaaaaaaaaaaaaaaaaaaaaaaaaaaaaaaaaaugcaucccccccccccccccccccccccccccccccaaaggcucuuuucagagccaccagaauu

SEQ ID NO: 10668 - RNA, 1099 nt, Artificial Sequence
  mRNA product Design a-3 comprising derived and/or modified sequence from HRSV(A2)__P03421.1__P (opt6)
gggagagggcgcuuggcuugcaaggacccugagcugcggcauugaagcacacccaacccaacucgacugaagucagccucacugaaccggaucugagaaucuucucucucugggcuugccagggcucuccgaaccuagcuagcauccucuucaauuccaacuagaaagcuuaccauggaaaaauucgcaccagaauuucacggagaagacgcaaacaacagagcaacaaaauucuuagaaucaaucaaaggaaaauucacaagcccaaaagacccaaaaaaaaaagacucaauaauaagcguaaacucaauagacauagaaguaacaaaagaaagcccaauaacaagcaacagcacaauaauaaacccaacaaacgaaacagaugacacagcuggaaauaaaccaaacuaccaaagaaaaccccuagucagcuucaaagaagaccccacaccaucagacaacccauucagcaaacuauauaaagaaacaauagaaacauuugacaacaacgaagaagaaucaucauacucauacgaagaaauaaacgaccaaacaaacgacaacauaaccgcaagauuagacagaauagaugaaaaacuaucagaaauacuaggaaugcuacacacauuaguaguagcaagcgcaggaccaacaucagcaagagacggaauaagagacgcaaugauaggacucagagaagaaaugauagaaaaaauaagaacagaagcacuaaugacaaacgacagauuagaagcaauggcaagacuaagaaaugaagaaucggaaaaaauggcaaaagacacaucagacgaaguaagccuaaacccaacaucagaaaaauuaaauaaccuacuagaaggaaacgacagcgacaacgacuuaucacuagaagacuucuaaggacuagucccuguucccagagcccacuuuuuuuucuuuuuuugaaauaaaauagccugucuuucagaucuaaaaaaaaaaaaaaaaaaaaaaaaaaaaaaaaaaaaaaaaaaaaaaaaaaaaaaaaaaaaaaaaugcaucccccccccccccccccccccccccccccccaaaggcucuuuucagagccaccagaauu

SEQ ID NO: 10669 - RNA, 1099 nt, Artificial Sequence
  mRNA product Design a-3 comprising derived and/or modified sequence from HRSV(A2)__P03421.1__P (opt11)
gggagagggcgcuuggcuugcaaggacccugagcugcggcauugaagcacacccaacccaacucgacugaagucagccucacugaaccggaucugagaaucuucucucucugggcuugccagggcucuccgaaccuagcuagcauccucuucaauuccaacuagaaagcuuaccauggaaaaauucgcgcccgaguuccacggcgaggacgcgaacaaccgcgcgacaaaguuccuagaaucaaucaagggcaaauucacgagcccgaaagaccccaagaaaaaggacucaaucauaagcgugaacucgaucgacaucgaggucacgaaagagagcccgaucacaagcaacagcaccauaauaaacccgaccaacgaaacagacgacaccgcgggcaacaaaccgaacuaccaaagaaaaccgcucgugagcuucaaagaagacccgaccccaagcgacaacccguucucaaaacuauacaaggaaacgaucgagaccuucgacaacaacgaggaagagagcucguacucguacgaggaaauaaacgaccaaacaaacgacaacauaaccgcacgccuagacaggaucgacgaaaaacucucggaaauacucgggaugcuacacacgcucguggucgcgagcgcaggcccgaccucggccagggacggcaucagggacgcaaugauaggccugcgagaggaaaugaucgagaaaauacgcaccgaagcacucaugaccaacgacagacucgaagccauggccaggcucaggaacgaagaauccgaaaagauggcgaaagacaccucggacgaggucucgcucaaccccacgagcgagaaacugaacaaccuacuggaagggaacgacagcgacaacgaccuuucccucgaggacuucugaggacuagucccuguucccagagcccacuuuuuuuucuuuuuuugaaauaaaauagccugucuuucagaucuaaaaaaaaaaaaaaaaaaaaaaaaaaaaaaaaaaaaaaaaaaaaaaaaaaaaaaaaaaaaaaaaugcaucccccccccccccccccccccccccccccccaaaggcucuuuucagagccaccagaauu

SEQ ID NO: 10670 - RNA, 1048 nt, Artificial Sequence
  mRNA product Design a-4 comprising derived and/or modified sequence from HRSV(A2)__P03421.1__P (wt)
gggagacuccugucgggcggaaguaggaggaguagaguuuaaaaacaguacucuuuuuccgguucgggacguaguugaagcaacgacaagccggauaaccgcucuugagacaggaagcuuaccauggaaaaguuugcuccugaauuccauggagaagaugcaaacaacagggcuacuaaauuccuagaaucaauaaagggcaaauucacaucacccaaagaucccaagaaaaaagauaguaucauaucugucaacucaauagauauagaaguaaccaaagaaagcccuauaacaucaaauucaacuauuaucaacccaacaaaugagacagaugauacugcagggaacaagcccaauuaucaaagaaaaccucuaguaaguuucaaagaagacccuacaccaagugauaaucccuuuucuaaacuauacaaagaaaccauagaaacauuugauaacaaugaagaagaauccagcuauucauacgaagaaauaaaugaucagacaaacgauaauauaacagcaagauuagauaggauugaugaaaaauuaagugaaauacuaggaaugcuucacacauuaguaguggcaagugcaggaccuacaucugcucgggaugguauaagagaugccaugauugguuuaagagaagaaaugauagaaaaaaucagaacugaagcauuaaugaccaaugacagauuagaagcuauggcaagacucaggaaugaggaaagugaaaagauggcaaaagacacaucagaugaagugucucucaauccaacaucagagaaauugaacaaccuauuggaagggaaugauagugacaaugaucuaucacuugaagauuucugaggacuagucccuguucccagagcccacuuuuuuuucuuuuuuugaaauaaaauagccugucuuucagaucuaaaaaaaaaaaaaaaaaaaaaaaaaaaaaaaaaaaaaaaaaaaaaaaaaaaaaaaaaaaaaaaaugcaucccccccccccccccccccccccccccccccaaaggcucuuuucagagccaccagaauu

SEQ ID NO: 10671 - RNA, 1048 nt, Artificial Sequence
  mRNA product Design a-4 comprising derived and/or modified sequence from HRSV(A2)__P03421.1__P (opt1)
gggagacuccugucgggcggaaguaggaggaguagaguuuaaaaacaguacucuuuuuccgguucgggacguaguugaagcaacgacaagccggauaaccgcucuugagacaggaagcuuaccauggagaaguucgcccccgaguuccacggcgaggacgccaacaaccgcgcgaccaaguuccuggagagcaucaaggggaaguucaccuccccgaaggaccccaagaagaaggacagcaucaucuccgugaacagcaucgacaucgaggucacgaaggagucccccaucaccagcaacuccaccaucaucaaccccaccaacgagacggacgacaccgccggcaacaagccgaacuaccagcggaagccccucgugagcuucaaggaggaccccacccccuccgacaacccguucagcaagcuguacaaggagaccaucgagacguucgacaacaacgaggaggaguccagcuacuccuacgaggagaucaacgaccagaccaacgacaacaucaccgcccgccuggaccggaucgacgagaagcucagcgagauccuggggaugcugcacacccucguggucgccuccgccggccccacgagcgcgcgcgacgggauccgggacgccaugaucggccugcgcgaggagaugaucgagaagauccggaccgaggcccugaugaccaacgaccgccucgaggccauggcgcggcugcgcaacgaggaguccgagaagauggccaaggacaccagcgacgaggugucccugaaccccacgagcgagaagcucaacaaccugcuggagggcaacgacagcgacaacgaccucucccuggaggacuucugaggacuagucccuguucccagagcccacuuuuuuuucuuuuuuugaaauaaaauagccugucuuucagaucuaaaaaaaaaaaaaaaaaaaaaaaaaaaaaaaaaaaaaaaaaaaaaaaaaaaaaaaaaaaaaaaaugcaucccccccccccccccccccccccccccccccaaaggcucuuuucagagccaccagaauu

SEQ ID NO: 10672 - RNA, 1048 nt, Artificial Sequence
  mRNA product Design a-4 comprising derived and/or modified sequence from HRSV(A2)__P03421.1__P (opt2)
gggagacuccugucgggcggaaguaggaggaguagaguuuaaaaacaguacucuuuuuccgguucgggacguaguugaagcaacgacaagccggauaaccgcucuugagacaggaagcuuaccauggagaaguucgcccccgaguuccacggcgaggacgccaacaaccgcgccaccaaguuccucgaguccaucaagggcaaguucaccucccccaaggaccccaagaagaaggacuccaucaucuccgucaacuccaucgacaucgaggucaccaaggagucccccaucaccuccaacuccaccaucaucaaccccaccaacgagaccgacgacaccgccggcaacaagcccaacuaccagcgcaagccccucgucuccuucaaggaggaccccacccccuccgacaaccccuucuccaagcucuacaaggagaccaucgagaccuucgacaacaacgaggaggaguccuccuacuccuacgaggagaucaacgaccagaccaacgacaacaucaccgcccgccucgaccgcaucgacgagaagcucuccgagauccucggcaugcuccacacccucgucgucgccuccgccggccccaccuccgcccgcgacggcauccgcgacgccaugaucggccuccgcgaggagaugaucgagaagauccgcaccgaggcccucaugaccaacgaccgccucgaggccauggcccgccuccgcaacgaggaguccgagaagauggccaaggacaccuccgacgaggucucccucaaccccaccuccgagaagcucaacaaccuccucgagggcaacgacuccgacaacgaccucucccucgaggacuucugaggacuagucccuguucccagagcccacuuuuuuuucuuuuuuugaaauaaaauagccugucuuucagaucuaaaaaaaaaaaaaaaaaaaaaaaaaaaaaaaaaaaaaaaaaaaaaaaaaaaaaaaaaaaaaaaaugcaucccccccccccccccccccccccccccccccaaaggcucuuuucagagccaccagaauu

SEQ ID NO: 10673 - RNA, 1048 nt, Artificial Sequence
  mRNA product Design a-4 comprising derived and/or modified sequence from HRSV(A2)__P03421.1__P (opt3)
gggagacuccugucgggcggaaguaggaggaguagaguuuaaaaacaguacucuuuuuccgguucgggacguaguugaagcaacgacaagccggauaaccgcucuugagacaggaagcuuaccauggagaaguucgcccccgaauuucacggcgaggacgcuaacaauagagcaaccaaauuccuggaaagcaucaaggggaaauuuacauccccuaaggauccgaaaaagaaggacucuauuauaucagugaacaguaucgauauugaggucacuaaagaaagcccaaucacguccaauucuaccauuaucaaccccacaaaugagacugacgauaccgccggaaacaagccuaauuaccagaggaaaccacucguuucguucaaggaggaccccacaccuucagauaacccauuuagcaaacuuuauaaggaaaccauagagacuuucgacaauaacgaagaggagaguuccuacucuuaugaagagaucaaugaucaaacaaacgacaauauuaccgcgcggcuggaucgcaucgacgaaaaguugagcgagauuuuagguaugcugcauacgcuagugguagcuuccgccggccccacuucagcacgagaugggauccgugacgccaugauaggacucagagaagagaugauugagaaaaucaggaccgaagcucugaugacaaacgaccggcuugaggcaauggcccgccugagaaaugaagagagugaaaagauggcuaaagauacuagcgacgaggugucuuugaacccuaccuccgagaagcucaacaaucugcuggaaggcaacgauucagacaaugaucucagcuuagaggacuuuugaggacuagucccuguucccagagcccacuuuuuuuucuuuuuuugaaauaaaauagccugucuuucagaucuaaaaaaaaaaaaaaaaaaaaaaaaaaaaaaaaaaaaaaaaaaaaaaaaaaaaaaaaaaaaaaaaugcaucccccccccccccccccccccccccccccccaaaggcucuuuucagagccaccagaauu

SEQ ID NO: 10674 - RNA, 1048 nt, Artificial Sequence
  mRNA product Design a-4 comprising derived and/or modified sequence from HRSV(A2)__P03421.1__P (opt4)
gggagacuccugucgggcggaaguaggaggaguagaguuuaaaaacaguacucuuuuuccgguucgggacguaguugaagcaacgacaagccggauaaccgcucuugagacaggaagcuuaccauggagaaguucgcccccgaguuccacggcgaggacgccaacaacagagccaccaaguuccuggagagcaucaagggcaaguucaccagccccaaggaccccaagaagaaggacagcaucaucagcgugaacagcaucgacaucgaggugaccaaggagagccccaucaccagcaacagcaccaucaucaaccccaccaacgagaccgacgacaccgccggcaacaagcccaacuaccagagaaagccccuggugagcuucaaggaggaccccacccccagcgacaaccccuucagcaagcuguacaaggagaccaucgagaccuucgacaacaacgaggaggagagcagcuacagcuacgaggagaucaacgaccagaccaacgacaacaucaccgccagacuggacagaaucgacgagaagcugagcgagauccugggcaugcugcacacccuggugguggccagcgccggccccaccagcgccagagacggcaucagagacgccaugaucggccugagagaggagaugaucgagaagaucagaaccgaggcccugaugaccaacgacagacuggaggccauggccagacugagaaacgaggagagcgagaagauggccaaggacaccagcgacgaggugagccugaaccccaccagcgagaagcugaacaaccugcuggagggcaacgacagcgacaacgaccugagccuggaggacuucugaggacuagucccuguucccagagcccacuuuuuuuucuuuuuuugaaauaaaauagccugucuuucagaucuaaaaaaaaaaaaaaaaaaaaaaaaaaaaaaaaaaaaaaaaaaaaaaaaaaaaaaaaaaaaaaaaugcaucccccccccccccccccccccccccccccccaaaggcucuuuucagagccaccagaauu

SEQ ID NO: 10675 - RNA, 1048 nt, Artificial Sequence
  mRNA product Design a-4 comprising derived and/or modified sequence from HRSV(A2)__P03421.1__P (opt5)
gggagacuccugucgggcggaaguaggaggaguagaguuuaaaaacaguacucuuuuuccgguucgggacguaguugaagcaacgacaagccggauaaccgcucuugagacaggaagcuuaccauggagaaguucgcccccgaauuucacggcgaggacgcuaacaauagagccaccaaauuccuggaaagcaucaaggggaaauuuacauccccuaaggauccgaaaaagaaggacucuauuaucagcgugaacuccauugauaucgaggucacgaaagaaucucccauuaccagcaauuccacaaucaucaacccuaccaaugagacagacgauaccgcgggaaacaagcccaauuaccagcggaaaccucucguuucuuucaaggaggaccccacaccuagcgauaacccguuuuccaaacuguauaaggaaaccauugagacguucgacaauaacgaagaggagagcucuuacuccuaugaagagaucaaugaucaaaccaacgacaauauuacagcucgccuugauagaaucgacgaaaagcugagcgagauucucggcaugcugcauacccuugugguggccucugccgggcccacauccgcucgggauggaauccgcgacgccaugauuggccugagagaagagaugaucgagaaaauccggaccgaagcucucaugacgaacgaccgccuggaggccauggcgagacugcggaaugaagagagcgaaaagauggccaaagauacaucugacgaggucucccucaacccuaccagcgagaagcugaacaaucuucuggaagggaacgauuccgacaaugaucucucucuggaggacuuuugaggacuagucccuguucccagagcccacuuuuuuuucuuuuuuugaaauaaaauagccugucuuucagaucuaaaaaaaaaaaaaaaaaaaaaaaaaaaaaaaaaaaaaaaaaaaaaaaaaaaaaaaaaaaaaaaaugcaucccccccccccccccccccccccccccccccaaaggcucuuuucagagccaccagaauu

SEQ ID NO: 10676 - RNA, 1048 nt, Artificial Sequence
  mRNA product Design a-4 comprising derived and/or modified sequence from HRSV(A2)__P03421.1__P (opt6)
gggagacuccugucgggcggaaguaggaggaguagaguuuaaaaacaguacucuuuuuccgguucgggacguaguugaagcaacgacaagccggauaaccgcucuugagacaggaagcuuaccauggaaaaauucgcaccagaauuucacggagaagacgcaaacaacagagcaacaaaauucuuagaaucaaucaaaggaaaauucacaagcccaaaagacccaaaaaaaaaagacucaauaauaagcguaaacucaauagacauagaaguaacaaaagaaagcccaauaacaagcaacagcacaauaauaaacccaacaaacgaaacagaugacacagcuggaaauaaaccaaacuaccaaagaaaaccccuagucagcuucaaagaagaccccacaccaucagacaacccauucagcaaacuauauaaagaaacaauagaaacauuugacaacaacgaagaagaaucaucauacucauacgaagaaauaaacgaccaaacaaacgacaacauaaccgcaagauuagacagaauagaugaaaaacuaucagaaauacuaggaaugcuacacacauuaguaguagcaagcgcaggaccaacaucagcaagagacggaauaagagacgcaaugauaggacucagagaagaaaugauagaaaaaauaagaacagaagcacuaaugacaaacgacagauuagaagcaauggcaagacuaagaaaugaagaaucggaaaaaauggcaaaagacacaucagacgaaguaagccuaaacccaacaucagaaaaauuaaauaaccuacuagaaggaaacgacagcgacaacgacuuaucacuagaagacuucuaaggacuagucccuguucccagagcccacuuuuuuuucuuuuuuugaaauaaaauagccugucuuucagaucuaaaaaaaaaaaaaaaaaaaaaaaaaaaaaaaaaaaaaaaaaaaaaaaaaaaaaaaaaaaaaaaaugcaucccccccccccccccccccccccccccccccaaaggcucuuuucagagccaccagaauu

SEQ ID NO: 10677 - RNA, 1048 nt, Artificial Sequence
  mRNA product Design a-4 comprising derived and/or modified sequence from HRSV(A2)__P03421.1__P (opt11)
gggagacuccugucgggcggaaguaggaggaguagaguuuaaaaacaguacucuuuuuccgguucgggacguaguugaagcaacgacaagccggauaaccgcucuugagacaggaagcuuaccauggaaaaauucgcgcccgaguuccacggcgaggacgcgaacaaccgcgcgacaaaguuccuagaaucaaucaagggcaaauucacgagcccgaaagaccccaagaaaaaggacucaaucauaagcgugaacucgaucgacaucgaggucacgaaagagagcccgaucacaagcaacagcaccauaauaaacccgaccaacgaaacagacgacaccgcgggcaacaaaccgaacuaccaaagaaaaccgcucgugagcuucaaagaagacccgaccccaagcgacaacccguucucaaaacuauacaaggaaacgaucgagaccuucgacaacaacgaggaagagagcucguacucguacgaggaaauaaacgaccaaacaaacgacaacauaaccgcacgccuagacaggaucgacgaaaaacucucggaaauacucgggaugcuacacacgcucguggucgcgagcgcaggcccgaccucggccagggacggcaucagggacgcaaugauaggccugcgagaggaaaugaucgagaaaauacgcaccgaagcacucaugaccaacgacagacucgaagccauggccaggcucaggaacgaagaauccgaaaagauggcgaaagacaccucggacgaggucucgcucaaccccacgagcgagaaacugaacaaccuacuggaagggaacgacagcgacaacgaccuuucccucgaggacuucugaggacuagucccuguucccagagcccacuuuuuuuucuuuuuuugaaauaaaauagccugucuuucagaucuaaaaaaaaaaaaaaaaaaaaaaaaaaaaaaaaaaaaaaaaaaaaaaaaaaaaaaaaaaaaaaaaugcaucccccccccccccccccccccccccccccccaaaggcucuuuucagagccaccagaauu

SEQ ID NO: 10678 - RNA, 994 nt, Artificial Sequence
  mRNA product Design a-5 comprising derived and/or modified sequence from HRSV(A2)__P03421.1__P (wt)
gggagacuuucccauucuguagcagaauuugguguugccuguggucuuggucccgcggagaagcuuaccauggaaaaguuugcuccugaauuccauggagaagaugcaaacaacagggcuacuaaauuccuagaaucaauaaagggcaaauucacaucacccaaagaucccaagaaaaaagauaguaucauaucugucaacucaauagauauagaaguaaccaaagaaagcccuauaacaucaaauucaacuauuaucaacccaacaaaugagacagaugauacugcagggaacaagcccaauuaucaaagaaaaccucuaguaaguuucaaagaagacccuacaccaagugauaaucccuuuucuaaacuauacaaagaaaccauagaaacauuugauaacaaugaagaagaauccagcuauucauacgaagaaauaaaugaucagacaaacgauaauauaacagcaagauuagauaggauugaugaaaaauuaagugaaauacuaggaaugcuucacacauuaguaguggcaagugcaggaccuacaucugcucgggaugguauaagagaugccaugauugguuuaagagaagaaaugauagaaaaaaucagaacugaagcauuaaugaccaaugacagauuagaagcuauggcaagacucaggaaugaggaaagugaaaagauggcaaaagacacaucagaugaagugucucucaauccaacaucagagaaauugaacaaccuauuggaagggaaugauagugacaaugaucuaucacuugaagauuucugaggacuagucccuguucccagagcccacuuuuuuuucuuuuuuugaaauaaaauagccugucuuucagaucuaaaaaaaaaaaaaaaaaaaaaaaaaaaaaaaaaaaaaaaaaaaaaaaaaaaaaaaaaaaaaaaaugcaucccccccccccccccccccccccccccccccaaaggcucuuuucagagccaccagaauu

SEQ ID NO: 10679 - RNA, 994 nt, Artificial Sequence
  mRNA product Design a-5 comprising derived and/or modified sequence from HRSV(A2)__P03421.1__P (opt1)
gggagacuuucccauucuguagcagaauuugguguugccuguggucuuggucccgcggagaagcuuaccauggagaaguucgcccccgaguuccacggcgaggacgccaacaaccgcgcgaccaaguuccuggagagcaucaaggggaaguucaccuccccgaaggaccccaagaagaaggacagcaucaucuccgugaacagcaucgacaucgaggucacgaaggagucccccaucaccagcaacuccaccaucaucaaccccaccaacgagacggacgacaccgccggcaacaagccgaacuaccagcggaagccccucgugagcuucaaggaggaccccacccccuccgacaacccguucagcaagcuguacaaggagaccaucgagacguucgacaacaacgaggaggaguccagcuacuccuacgaggagaucaacgaccagaccaacgacaacaucaccgcccgccuggaccggaucgacgagaagcucagcgagauccuggggaugcugcacacccucguggucgccuccgccggccccacgagcgcgcgcgacgggauccgggacgccaugaucggccugcgcgaggagaugaucgagaagauccggaccgaggcccugaugaccaacgaccgccucgaggccauggcgcggcugcgcaacgaggaguccgagaagauggccaaggacaccagcgacgaggugucccugaaccccacgagcgagaagcucaacaaccugcuggagggcaacgacagcgacaacgaccucucccuggaggacuucugaggacuagucccuguucccagagcccacuuuuuuuucuuuuuuugaaauaaaauagccugucuuucagaucuaaaaaaaaaaaaaaaaaaaaaaaaaaaaaaaaaaaaaaaaaaaaaaaaaaaaaaaaaaaaaaaaugcaucccccccccccccccccccccccccccccccaaaggcucuuuucagagccaccagaauu

SEQ ID NO: 10680 - RNA, 994 nt, Artificial Sequence
  mRNA product Design a-5 comprising derived and/or modified sequence from HRSV(A2)__P03421.1__P (opt2)
gggagacuuucccauucuguagcagaauuugguguugccuguggucuuggucccgcggagaagcuuaccauggagaaguucgcccccgaguuccacggcgaggacgccaacaaccgcgccaccaaguuccucgaguccaucaagggcaaguucaccucccccaaggaccccaagaagaaggacuccaucaucuccgucaacuccaucgacaucgaggucaccaaggagucccccaucaccuccaacuccaccaucaucaaccccaccaacgagaccgacgacaccgccggcaacaagcccaacuaccagcgcaagccccucgucuccuucaaggaggaccccacccccuccgacaaccccuucuccaagcucuacaaggagaccaucgagaccuucgacaacaacgaggaggaguccuccuacuccuacgaggagaucaacgaccagaccaacgacaacaucaccgcccgccucgaccgcaucgacgagaagcucuccgagauccucggcaugcuccacacccucgucgucgccuccgccggccccaccuccgcccgcgacggcauccgcgacgccaugaucggccuccgcgaggagaugaucgagaagauccgcaccgaggcccucaugaccaacgaccgccucgaggccauggcccgccuccgcaacgaggaguccgagaagauggccaaggacaccuccgacgaggucucccucaaccccaccuccgagaagcucaacaaccuccucgagggcaacgacuccgacaacgaccucucccucgaggacuucugaggacuagucccuguucccagagcccacuuuuuuuucuuuuuuugaaauaaaauagccugucuuucagaucuaaaaaaaaaaaaaaaaaaaaaaaaaaaaaaaaaaaaaaaaaaaaaaaaaaaaaaaaaaaaaaaaugcaucccccccccccccccccccccccccccccccaaaggcucuuuucagagccaccagaauu

SEQ ID NO: 10681 - RNA, 994 nt, Artificial Sequence
  mRNA product Design a-5 comprising derived and/or modified sequence from HRSV(A2)__P03421.1__P (opt3)
gggagacuuucccauucuguagcagaauuugguguugccuguggucuuggucccgcggagaagcuuaccauggagaaguucgcccccgaauuucacggcgaggacgcuaacaauagagcaaccaaauuccuggaaagcaucaaggggaaauuuacauccccuaaggauccgaaaaagaaggacucuauuauaucagugaacaguaucgauauugaggucacuaaagaaagcccaaucacguccaauucuaccauuaucaaccccacaaaugagacugacgauaccgccggaaacaagccuaauuaccagaggaaaccacucguuucguucaaggaggaccccacaccuucagauaacccauuuagcaaacuuuauaaggaaaccauagagacuuucgacaauaacgaagaggagaguuccuacucuuaugaagagaucaaugaucaaacaaacgacaauauuaccgcgcggcuggaucgcaucgacgaaaaguugagcgagauuuuagguaugcugcauacgcuagugguagcuuccgccggccccacuucagcacgagaugggauccgugacgccaugauaggacucagagaagagaugauugagaaaaucaggaccgaagcucugaugacaaacgaccggcuugaggcaauggcccgccugagaaaugaagagagugaaaagauggcuaaagauacuagcgacgaggugucuuugaacccuaccuccgagaagcucaacaaucugcuggaaggcaacgauucagacaaugaucucagcuuagaggacuuuugaggacuagucccuguucccagagcccacuuuuuuuucuuuuuuugaaauaaaauagccugucuuucagaucuaaaaaaaaaaaaaaaaaaaaaaaaaaaaaaaaaaaaaaaaaaaaaaaaaaaaaaaaaaaaaaaaugcaucccccccccccccccccccccccccccccccaaaggcucuuuucagagccaccagaauu

SEQ ID NO: 10682 - RNA, 994 nt, Artificial Sequence
  mRNA product Design a-5 comprising derived and/or modified sequence from HRSV(A2)__P03421.1__P (opt4)
gggagacuuucccauucuguagcagaauuugguguugccuguggucuuggucccgcggagaagcuuaccauggagaaguucgcccccgaguuccacggcgaggacgccaacaacagagccaccaaguuccuggagagcaucaagggcaaguucaccagccccaaggaccccaagaagaaggacagcaucaucagcgugaacagcaucgacaucgaggugaccaaggagagccccaucaccagcaacagcaccaucaucaaccccaccaacgagaccgacgacaccgccggcaacaagcccaacuaccagagaaagccccuggugagcuucaaggaggaccccacccccagcgacaaccccuucagcaagcuguacaaggagaccaucgagaccuucgacaacaacgaggaggagagcagcuacagcuacgaggagaucaacgaccagaccaacgacaacaucaccgccagacuggacagaaucgacgagaagcugagcgagauccugggcaugcugcacacccuggugguggccagcgccggccccaccagcgccagagacggcaucagagacgccaugaucggccugagagaggagaugaucgagaagaucagaaccgaggcccugaugaccaacgacagacuggaggccauggccagacugagaaacgaggagagcgagaagauggccaaggacaccagcgacgaggugagccugaaccccaccagcgagaagcugaacaaccugcuggagggcaacgacagcgacaacgaccugagccuggaggacuucugaggacuagucccuguucccagagcccacuuuuuuuucuuuuuuugaaauaaaauagccugucuuucagaucuaaaaaaaaaaaaaaaaaaaaaaaaaaaaaaaaaaaaaaaaaaaaaaaaaaaaaaaaaaaaaaaaugcaucccccccccccccccccccccccccccccccaaaggcucuuuucagagccaccagaauu

SEQ ID NO: 10683 - RNA, 994 nt, Artificial Sequence
  mRNA product Design a-5 comprising derived and/or modified sequence from HRSV(A2)__P03421.1__P (opt5)
gggagacuuucccauucuguagcagaauuugguguugccuguggucuuggucccgcggagaagcuuaccauggagaaguucgcccccgaauuucacggcgaggacgcuaacaauagagccaccaaauuccuggaaagcaucaaggggaaauuuacauccccuaaggauccgaaaaagaaggacucuauuaucagcgugaacuccauugauaucgaggucacgaaagaaucucccauuaccagcaauuccacaaucaucaacccuaccaaugagacagacgauaccgcgggaaacaagcccaauuaccagcggaaaccucucguuucuuucaaggaggaccccacaccuagcgauaacccguuuuccaaacuguauaaggaaaccauugagacguucgacaauaacgaagaggagagcucuuacuccuaugaagagaucaaugaucaaaccaacgacaauauuacagcucgccuugauagaaucgacgaaaagcugagcgagauucucggcaugcugcauacccuugugguggccucugccgggcccacauccgcucgggauggaauccgcgacgccaugauuggccugagagaagagaugaucgagaaaauccggaccgaagcucucaugacgaacgaccgccuggaggccauggcgagacugcggaaugaagagagcgaaaagauggccaaagauacaucugacgaggucucccucaacccuaccagcgagaagcugaacaaucuucuggaagggaacgauuccgacaaugaucucucucuggaggacuuuugaggacuagucccuguucccagagcccacuuuuuuuucuuuuuuugaaauaaaauagccugucuuucagaucuaaaaaaaaaaaaaaaaaaaaaaaaaaaaaaaaaaaaaaaaaaaaaaaaaaaaaaaaaaaaaaaaugcaucccccccccccccccccccccccccccccccaaaggcucuuuucagagccaccagaauu

SEQ ID NO: 10684 - RNA, 994 nt, Artificial Sequence
  mRNA product Design a-5 comprising derived and/or modified sequence from HRSV(A2)__P03421.1__P (opt6)
gggagacuuucccauucuguagcagaauuugguguugccuguggucuuggucccgcggagaagcuuaccauggaaaaauucgcaccagaauuucacggagaagacgcaaacaacagagcaacaaaauucuuagaaucaaucaaaggaaaauucacaagcccaaaagacccaaaaaaaaaagacucaauaauaagcguaaacucaauagacauagaaguaacaaaagaaagcccaauaacaagcaacagcacaauaauaaacccaacaaacgaaacagaugacacagcuggaaauaaaccaaacuaccaaagaaaaccccuagucagcuucaaagaagaccccacaccaucagacaacccauucagcaaacuauauaaagaaacaauagaaacauuugacaacaacgaagaagaaucaucauacucauacgaagaaauaaacgaccaaacaaacgacaacauaaccgcaagauuagacagaauagaugaaaaacuaucagaaauacuaggaaugcuacacacauuaguaguagcaagcgcaggaccaacaucagcaagagacggaauaagagacgcaaugauaggacucagagaagaaaugauagaaaaaauaagaacagaagcacuaaugacaaacgacagauuagaagcaauggcaagacuaagaaaugaagaaucggaaaaaauggcaaaagacacaucagacgaaguaagccuaaacccaacaucagaaaaauuaaauaaccuacuagaaggaaacgacagcgacaacgacuuaucacuagaagacuucuaaggacuagucccuguucccagagcccacuuuuuuuucuuuuuuugaaauaaaauagccugucuuucagaucuaaaaaaaaaaaaaaaaaaaaaaaaaaaaaaaaaaaaaaaaaaaaaaaaaaaaaaaaaaaaaaaaugcaucccccccccccccccccccccccccccccccaaaggcucuuuucagagccaccagaauu

SEQ ID NO: 10685 - RNA, 994 nt, Artificial Sequence
  mRNA product Design a-5 comprising derived and/or modified sequence from HRSV(A2)__P03421.1__P (opt11)
gggagacuuucccauucuguagcagaauuugguguugccuguggucuuggucccgcggagaagcuuaccauggaaaaauucgcgcccgaguuccacggcgaggacgcgaacaaccgcgcgacaaaguuccuagaaucaaucaagggcaaauucacgagcccgaaagaccccaagaaaaaggacucaaucauaagcgugaacucgaucgacaucgaggucacgaaagagagcccgaucacaagcaacagcaccauaauaaacccgaccaacgaaacagacgacaccgcgggcaacaaaccgaacuaccaaagaaaaccgcucgugagcuucaaagaagacccgaccccaagcgacaacccguucucaaaacuauacaaggaaacgaucgagaccuucgacaacaacgaggaagagagcucguacucguacgaggaaauaaacgaccaaacaaacgacaacauaaccgcacgccuagacaggaucgacgaaaaacucucggaaauacucgggaugcuacacacgcucguggucgcgagcgcaggcccgaccucggccagggacggcaucagggacgcaaugauaggccugcgagaggaaaugaucgagaaaauacgcaccgaagcacucaugaccaacgacagacucgaagccauggccaggcucaggaacgaagaauccgaaaagauggcgaaagacaccucggacgaggucucgcucaaccccacgagcgagaaacugaacaaccuacuggaagggaacgacagcgacaacgaccuuucccucgaggacuucugaggacuagucccuguucccagagcccacuuuuuuuucuuuuuuugaaauaaaauagccugucuuucagaucuaaaaaaaaaaaaaaaaaaaaaaaaaaaaaaaaaaaaaaaaaaaaaaaaaaaaaaaaaaaaaaaaugcaucccccccccccccccccccccccccccccccaaaggcucuuuucagagccaccagaauu

SEQ ID NO: 10686 - RNA, 1175 nt, Artificial Sequence
  mRNA product Design b-1 comprising derived and/or modified sequence from HRSV(A2)__P03421.1__P (wt)
gggagacggagacggccugcaggaccugcucucucagcccucagccgaggccuacgccgagccgagugcgcagccgacgaccgggaggagccgcagccuucaacucugagguacugugauccgcgcugcccgccgggccgccccaguccgcugcugcggcaccuccuucccucgcgcccucuucgcucgccagcgccuucccugugagccugcgucaccgcggccgccaagcuuaccauggaaaaguuugcuccugaauuccauggagaagaugcaaacaacagggcuacuaaauuccuagaaucaauaaagggcaaauucacaucacccaaagaucccaagaaaaaagauaguaucauaucugucaacucaauagauauagaaguaaccaaagaaagcccuauaacaucaaauucaacuauuaucaacccaacaaaugagacagaugauacugcagggaacaagcccaauuaucaaagaaaaccucuaguaaguuucaaagaagacccuacaccaagugauaaucccuuuucuaaacuauacaaagaaaccauagaaacauuugauaacaaugaagaagaauccagcuauucauacgaagaaauaaaugaucagacaaacgauaauauaacagcaagauuagauaggauugaugaaaaauuaagugaaauacuaggaaugcuucacacauuaguaguggcaagugcaggaccuacaucugcucgggaugguauaagagaugccaugauugguuuaagagaagaaaugauagaaaaaaucagaacugaagcauuaaugaccaaugacagauuagaagcuauggcaagacucaggaaugaggaaagugaaaagauggcaaaagacacaucagaugaagugucucucaauccaacaucagagaaauugaacaaccuauuggaagggaaugauagugacaaugaucuaucacuugaagauuucugaggacuaguguccaccugucccuccugggcugcuggauugucucguuuuccugccaaauaaacaggaucagcgcuuuacagaucuaaaaaaaaaaaaaaaaaaaaaaaaaaaaaaaaaaaaaaaaaaaaaaaaaaaaaaaaaaaaaaaaugcaucccccccccccccccccccccccccccccccaaaggcucuuuucagagccaccagaauu

SEQ ID NO: 10687 - RNA, 1175 nt, Artificial Sequence
  mRNA product Design b-1 comprising derived and/or modified sequence from HRSV(A2)__P03421.1__P (opt1)
gggagacggagacggccugcaggaccugcucucucagcccucagccgaggccuacgccgagccgagugcgcagccgacgaccgggaggagccgcagccuucaacucugagguacugugauccgcgcugcccgccgggccgccccaguccgcugcugcggcaccuccuucccucgcgcccucuucgcucgccagcgccuucccugugagccugcgucaccgcggccgccaagcuuaccauggagaaguucgcccccgaguuccacggcgaggacgccaacaaccgcgcgaccaaguuccuggagagcaucaaggggaaguucaccuccccgaaggaccccaagaagaaggacagcaucaucuccgugaacagcaucgacaucgaggucacgaaggagucccccaucaccagcaacuccaccaucaucaaccccaccaacgagacggacgacaccgccggcaacaagccgaacuaccagcggaagccccucgugagcuucaaggaggaccccacccccuccgacaacccguucagcaagcuguacaaggagaccaucgagacguucgacaacaacgaggaggaguccagcuacuccuacgaggagaucaacgaccagaccaacgacaacaucaccgcccgccuggaccggaucgacgagaagcucagcgagauccuggggaugcugcacacccucguggucgccuccgccggccccacgagcgcgcgcgacgggauccgggacgccaugaucggccugcgcgaggagaugaucgagaagauccggaccgaggcccugaugaccaacgaccgccucgaggccauggcgcggcugcgcaacgaggaguccgagaagauggccaaggacaccagcgacgaggugucccugaaccccacgagcgagaagcucaacaaccugcuggagggcaacgacagcgacaacgaccucucccuggaggacuucugaggacuaguguccaccugucccuccugggcugcuggauugucucguuuuccugccaaauaaacaggaucagcgcuuuacagaucuaaaaaaaaaaaaaaaaaaaaaaaaaaaaaaaaaaaaaaaaaaaaaaaaaaaaaaaaaaaaaaaaugcaucccccccccccccccccccccccccccccccaaaggcucuuuucagagccaccagaauu

SEQ ID NO: 10688 - RNA, 1175 nt, Artificial Sequence
  mRNA product Design b-1 comprising derived and/or modified sequence from HRSV(A2)__P03421.1__P (opt2)
gggagacggagacggccugcaggaccugcucucucagcccucagccgaggccuacgccgagccgagugcgcagccgacgaccgggaggagccgcagccuucaacucugagguacugugauccgcgcugcccgccgggccgccccaguccgcugcugcggcaccuccuucccucgcgcccucuucgcucgccagcgccuucccugugagccugcgucaccgcggccgccaagcuuaccauggagaaguucgcccccgaguuccacggcgaggacgccaacaaccgcgccaccaaguuccucgaguccaucaagggcaaguucaccucccccaaggaccccaagaagaaggacuccaucaucuccgucaacuccaucgacaucgaggucaccaaggagucccccaucaccuccaacuccaccaucaucaaccccaccaacgagaccgacgacaccgccggcaacaagcccaacuaccagcgcaagccccucgucuccuucaaggaggaccccacccccuccgacaaccccuucuccaagcucuacaaggagaccaucgagaccuucgacaacaacgaggaggaguccuccuacuccuacgaggagaucaacgaccagaccaacgacaacaucaccgcccgccucgaccgcaucgacgagaagcucuccgagauccucggcaugcuccacacccucgucgucgccuccgccggccccaccuccgcccgcgacggcauccgcgacgccaugaucggccuccgcgaggagaugaucgagaagauccgcaccgaggcccucaugaccaacgaccgccucgaggccauggcccgccuccgcaacgaggaguccgagaagauggccaaggacaccuccgacgaggucucccucaaccccaccuccgagaagcucaacaaccuccucgagggcaacgacuccgacaacgaccucucccucgaggacuucugaggacuaguguccaccugucccuccugggcugcuggauugucucguuuuccugccaaauaaacaggaucagcgcuuuacagaucuaaaaaaaaaaaaaaaaaaaaaaaaaaaaaaaaaaaaaaaaaaaaaaaaaaaaaaaaaaaaaaaaugcaucccccccccccccccccccccccccccccccaaaggcucuuuucagagccaccagaauu

SEQ ID NO: 10689 - RNA, 1175 nt, Artificial Sequence
  mRNA product Design b-1 comprising derived and/or modified sequence from HRSV(A2)__P03421.1__P (opt3)
gggagacggagacggccugcaggaccugcucucucagcccucagccgaggccuacgccgagccgagugcgcagccgacgaccgggaggagccgcagccuucaacucugagguacugugauccgcgcugcccgccgggccgccccaguccgcugcugcggcaccuccuucccucgcgcccucuucgcucgccagcgccuucccugugagccugcgucaccgcggccgccaagcuuaccauggagaaguucgcccccgaauuucacggcgaggacgcuaacaauagagcaaccaaauuccuggaaagcaucaaggggaaauuuacauccccuaaggauccgaaaaagaaggacucuauuauaucagugaacaguaucgauauugaggucacuaaagaaagcccaaucacguccaauucuaccauuaucaaccccacaaaugagacugacgauaccgccggaaacaagccuaauuaccagaggaaaccacucguuucguucaaggaggaccccacaccuucagauaacccauuuagcaaacuuuauaaggaaaccauagagacuuucgacaauaacgaagaggagaguuccuacucuuaugaagagaucaaugaucaaacaaacgacaauauuaccgcgcggcuggaucgcaucgacgaaaaguugagcgagauuuuagguaugcugcauacgcuagugguagcuuccgccggccccacuucagcacgagaugggauccgugacgccaugauaggacucagagaagagaugauugagaaaaucaggaccgaagcucugaugacaaacgaccggcuugaggcaauggcccgccugagaaaugaagagagugaaaagauggcuaaagauacuagcgacgaggugucuuugaacccuaccuccgagaagcucaacaaucugcuggaaggcaacgauucagacaaugaucucagcuuagaggacuuuugaggacuaguguccaccugucccuccugggcugcuggauugucucguuuuccugccaaauaaacaggaucagcgcuuuacagaucuaaaaaaaaaaaaaaaaaaaaaaaaaaaaaaaaaaaaaaaaaaaaaaaaaaaaaaaaaaaaaaaaugcaucccccccccccccccccccccccccccccccaaaggcucuuuucagagccaccagaauu

SEQ ID NO: 10690 - RNA, 1175 nt, Artificial Sequence
  mRNA product Design b-1 comprising derived and/or modified sequence from HRSV(A2)__P03421.1__P (opt4)
gggagacggagacggccugcaggaccugcucucucagcccucagccgaggccuacgccgagccgagugcgcagccgacgaccgggaggagccgcagccuucaacucugagguacugugauccgcgcugcccgccgggccgccccaguccgcugcugcggcaccuccuucccucgcgcccucuucgcucgccagcgccuucccugugagccugcgucaccgcggccgccaagcuuaccauggagaaguucgcccccgaguuccacggcgaggacgccaacaacagagccaccaaguuccuggagagcaucaagggcaaguucaccagccccaaggaccccaagaagaaggacagcaucaucagcgugaacagcaucgacaucgaggugaccaaggagagccccaucaccagcaacagcaccaucaucaaccccaccaacgagaccgacgacaccgccggcaacaagcccaacuaccagagaaagccccuggugagcuucaaggaggaccccacccccagcgacaaccccuucagcaagcuguacaaggagaccaucgagaccuucgacaacaacgaggaggagagcagcuacagcuacgaggagaucaacgaccagaccaacgacaacaucaccgccagacuggacagaaucgacgagaagcugagcgagauccugggcaugcugcacacccuggugguggccagcgccggccccaccagcgccagagacggcaucagagacgccaugaucggccugagagaggagaugaucgagaagaucagaaccgaggcccugaugaccaacgacagacuggaggccauggccagacugagaaacgaggagagcgagaagauggccaaggacaccagcgacgaggugagccugaaccccaccagcgagaagcugaacaaccugcuggagggcaacgacagcgacaacgaccugagccuggaggacuucugaggacuaguguccaccugucccuccugggcugcuggauugucucguuuuccugccaaauaaacaggaucagcgcuuuacagaucuaaaaaaaaaaaaaaaaaaaaaaaaaaaaaaaaaaaaaaaaaaaaaaaaaaaaaaaaaaaaaaaaugcaucccccccccccccccccccccccccccccccaaaggcucuuuucagagccaccagaauu

SEQ ID NO: 10691 - RNA, 1175 nt, Artificial Sequence
  mRNA product Design b-1 comprising derived and/or modified sequence from HRSV(A2)__P03421.1__P (opt5)
gggagacggagacggccugcaggaccugcucucucagcccucagccgaggccuacgccgagccgagugcgcagccgacgaccgggaggagccgcagccuucaacucugagguacugugauccgcgcugcccgccgggccgccccaguccgcugcugcggcaccuccuucccucgcgcccucuucgcucgccagcgccuucccugugagccugcgucaccgcggccgccaagcuuaccauggagaaguucgcccccgaauuucacggcgaggacgcuaacaauagagccaccaaauuccuggaaagcaucaaggggaaauuuacauccccuaaggauccgaaaaagaaggacucuauuaucagcgugaacuccauugauaucgaggucacgaaagaaucucccauuaccagcaauuccacaaucaucaacccuaccaaugagacagacgauaccgcgggaaacaagcccaauuaccagcggaaaccucucguuucuuucaaggaggaccccacaccuagcgauaacccguuuuccaaacuguauaaggaaaccauugagacguucgacaauaacgaagaggagagcucuuacuccuaugaagagaucaaugaucaaaccaacgacaauauuacagcucgccuugauagaaucgacgaaaagcugagcgagauucucggcaugcugcauacccuugugguggccucugccgggcccacauccgcucgggauggaauccgcgacgccaugauuggccugagagaagagaugaucgagaaaauccggaccgaagcucucaugacgaacgaccgccuggaggccauggcgagacugcggaaugaagagagcgaaaagauggccaaagauacaucugacgaggucucccucaacccuaccagcgagaagcugaacaaucuucuggaagggaacgauuccgacaaugaucucucucuggaggacuuuugaggacuaguguccaccugucccuccugggcugcuggauugucucguuuuccugccaaauaaacaggaucagcgcuuuacagaucuaaaaaaaaaaaaaaaaaaaaaaaaaaaaaaaaaaaaaaaaaaaaaaaaaaaaaaaaaaaaaaaaugcaucccccccccccccccccccccccccccccccaaaggcucuuuucagagccaccagaauu

SEQ ID NO: 10692 - RNA, 1175 nt, Artificial Sequence
  mRNA product Design b-1 comprising derived and/or modified sequence from HRSV(A2)__P03421.1__P (opt6)
gggagacggagacggccugcaggaccugcucucucagcccucagccgaggccuacgccgagccgagugcgcagccgacgaccgggaggagccgcagccuucaacucugagguacugugauccgcgcugcccgccgggccgccccaguccgcugcugcggcaccuccuucccucgcgcccucuucgcucgccagcgccuucccugugagccugcgucaccgcggccgccaagcuuaccauggaaaaauucgcaccagaauuucacggagaagacgcaaacaacagagcaacaaaauucuuagaaucaaucaaaggaaaauucacaagcccaaaagacccaaaaaaaaaagacucaauaauaagcguaaacucaauagacauagaaguaacaaaagaaagcccaauaacaagcaacagcacaauaauaaacccaacaaacgaaacagaugacacagcuggaaauaaaccaaacuaccaaagaaaaccccuagucagcuucaaagaagaccccacaccaucagacaacccauucagcaaacuauauaaagaaacaauagaaacauuugacaacaacgaagaagaaucaucauacucauacgaagaaauaaacgaccaaacaaacgacaacauaaccgcaagauuagacagaauagaugaaaaacuaucagaaauacuaggaaugcuacacacauuaguaguagcaagcgcaggaccaacaucagcaagagacggaauaagagacgcaaugauaggacucagagaagaaaugauagaaaaaauaagaacagaagcacuaaugacaaacgacagauuagaagcaauggcaagacuaagaaaugaagaaucggaaaaaauggcaaaagacacaucagacgaaguaagccuaaacccaacaucagaaaaauuaaauaaccuacuagaaggaaacgacagcgacaacgacuuaucacuagaagacuucuaaggacuaguguccaccugucccuccugggcugcuggauugucucguuuuccugccaaauaaacaggaucagcgcuuuacagaucuaaaaaaaaaaaaaaaaaaaaaaaaaaaaaaaaaaaaaaaaaaaaaaaaaaaaaaaaaaaaaaaaugcaucccccccccccccccccccccccccccccccaaaggcucuuuucagagccaccagaauu

SEQ ID NO: 10693 - RNA, 1175 nt, Artificial Sequence
  mRNA product Design b-1 comprising derived and/or modified sequence from HRSV(A2)__P03421.1__P (opt11)
gggagacggagacggccugcaggaccugcucucucagcccucagccgaggccuacgccgagccgagugcgcagccgacgaccgggaggagccgcagccuucaacucugagguacugugauccgcgcugcccgccgggccgccccaguccgcugcugcggcaccuccuucccucgcgcccucuucgcucgccagcgccuucccugugagccugcgucaccgcggccgccaagcuuaccauggaaaaauucgcgcccgaguuccacggcgaggacgcgaacaaccgcgcgacaaaguuccuagaaucaaucaagggcaaauucacgagcccgaaagaccccaagaaaaaggacucaaucauaagcgugaacucgaucgacaucgaggucacgaaagagagcccgaucacaagcaacagcaccauaauaaacccgaccaacgaaacagacgacaccgcgggcaacaaaccgaacuaccaaagaaaaccgcucgugagcuucaaagaagacccgaccccaagcgacaacccguucucaaaacuauacaaggaaacgaucgagaccuucgacaacaacgaggaagagagcucguacucguacgaggaaauaaacgaccaaacaaacgacaacauaaccgcacgccuagacaggaucgacgaaaaacucucggaaauacucgggaugcuacacacgcucguggucgcgagcgcaggcccgaccucggccagggacggcaucagggacgcaaugauaggccugcgagaggaaaugaucgagaaaauacgcaccgaagcacucaugaccaacgacagacucgaagccauggccaggcucaggaacgaagaauccgaaaagauggcgaaagacaccucggacgaggucucgcucaaccccacgagcgagaaacugaacaaccuacuggaagggaacgacagcgacaacgaccuuucccucgaggacuucugaggacuaguguccaccugucccuccugggcugcuggauugucucguuuuccugccaaauaaacaggaucagcgcuuuacagaucuaaaaaaaaaaaaaaaaaaaaaaaaaaaaaaaaaaaaaaaaaaaaaaaaaaaaaaaaaaaaaaaaugcaucccccccccccccccccccccccccccccccaaaggcucuuuucagagccaccagaauu

SEQ ID NO: 10694 - RNA, 995 nt, Artificial Sequence
  mRNA product Design b-2 comprising derived and/or modified sequence from HRSV(A2)__P03421.1__P (wt)
gggagagccucugcuggaguccggggaguggcguuggcugcuagagcgaagcuuaccauggaaaaguuugcuccugaauuccauggagaagaugcaaacaacagggcuacuaaauuccuagaaucaauaaagggcaaauucacaucacccaaagaucccaagaaaaaagauaguaucauaucugucaacucaauagauauagaaguaaccaaagaaagcccuauaacaucaaauucaacuauuaucaacccaacaaaugagacagaugauacugcagggaacaagcccaauuaucaaagaaaaccucuaguaaguuucaaagaagacccuacaccaagugauaaucccuuuucuaaacuauacaaagaaaccauagaaacauuugauaacaaugaagaagaauccagcuauucauacgaagaaauaaaugaucagacaaacgauaauauaacagcaagauuagauaggauugaugaaaaauuaagugaaauacuaggaaugcuucacacauuaguaguggcaagugcaggaccuacaucugcucgggaugguauaagagaugccaugauugguuuaagagaagaaaugauagaaaaaaucagaacugaagcauuaaugaccaaugacagauuagaagcuauggcaagacucaggaaugaggaaagugaaaagauggcaaaagacacaucagaugaagugucucucaauccaacaucagagaaauugaacaaccuauuggaagggaaugauagugacaaugaucuaucacuugaagauuucugaggacuaguguccaccugucccuccugggcugcuggauugucucguuuuccugccaaauaaacaggaucagcgcuuuacagaucuaaaaaaaaaaaaaaaaaaaaaaaaaaaaaaaaaaaaaaaaaaaaaaaaaaaaaaaaaaaaaaaaugcaucccccccccccccccccccccccccccccccaaaggcucuuuucagagccaccagaauu

SEQ ID NO: 10695 - RNA, 995 nt, Artificial Sequence
  mRNA product Design b-2 comprising derived and/or modified sequence from HRSV(A2)__P03421.1__P (opt1)
gggagagccucugcuggaguccggggaguggcguuggcugcuagagcgaagcuuaccauggagaaguucgcccccgaguuccacggcgaggacgccaacaaccgcgcgaccaaguuccuggagagcaucaaggggaaguucaccuccccgaaggaccccaagaagaaggacagcaucaucuccgugaacagcaucgacaucgaggucacgaaggagucccccaucaccagcaacuccaccaucaucaaccccaccaacgagacggacgacaccgccggcaacaagccgaacuaccagcggaagccccucgugagcuucaaggaggaccccacccccuccgacaacccguucagcaagcuguacaaggagaccaucgagacguucgacaacaacgaggaggaguccagcuacuccuacgaggagaucaacgaccagaccaacgacaacaucaccgcccgccuggaccggaucgacgagaagcucagcgagauccuggggaugcugcacacccucguggucgccuccgccggccccacgagcgcgcgcgacgggauccgggacgccaugaucggccugcgcgaggagaugaucgagaagauccggaccgaggcccugaugaccaacgaccgccucgaggccauggcgcggcugcgcaacgaggaguccgagaagauggccaaggacaccagcgacgaggugucccugaaccccacgagcgagaagcucaacaaccugcuggagggcaacgacagcgacaacgaccucucccuggaggacuucugaggacuaguguccaccugucccuccugggcugcuggauugucucguuuuccugccaaauaaacaggaucagcgcuuuacagaucuaaaaaaaaaaaaaaaaaaaaaaaaaaaaaaaaaaaaaaaaaaaaaaaaaaaaaaaaaaaaaaaaugcaucccccccccccccccccccccccccccccccaaaggcucuuuucagagccaccagaauu

SEQ ID NO: 10696 - RNA, 995 nt, Artificial Sequence
  mRNA product Design b-2 comprising derived and/or modified sequence from HRSV(A2)__P03421.1__P (opt2)
gggagagccucugcuggaguccggggaguggcguuggcugcuagagcgaagcuuaccauggagaaguucgcccccgaguuccacggcgaggacgccaacaaccgcgccaccaaguuccucgaguccaucaagggcaaguucaccucccccaaggaccccaagaagaaggacuccaucaucuccgucaacuccaucgacaucgaggucaccaaggagucccccaucaccuccaacuccaccaucaucaaccccaccaacgagaccgacgacaccgccggcaacaagcccaacuaccagcgcaagccccucgucuccuucaaggaggaccccacccccuccgacaaccccuucuccaagcucuacaaggagaccaucgagaccuucgacaacaacgaggaggaguccuccuacuccuacgaggagaucaacgaccagaccaacgacaacaucaccgcccgccucgaccgcaucgacgagaagcucuccgagauccucggcaugcuccacacccucgucgucgccuccgccggccccaccuccgcccgcgacggcauccgcgacgccaugaucggccuccgcgaggagaugaucgagaagauccgcaccgaggcccucaugaccaacgaccgccucgaggccauggcccgccuccgcaacgaggaguccgagaagauggccaaggacaccuccgacgaggucucccucaaccccaccuccgagaagcucaacaaccuccucgagggcaacgacuccgacaacgaccucucccucgaggacuucugaggacuaguguccaccugucccuccugggcugcuggauugucucguuuuccugccaaauaaacaggaucagcgcuuuacagaucuaaaaaaaaaaaaaaaaaaaaaaaaaaaaaaaaaaaaaaaaaaaaaaaaaaaaaaaaaaaaaaaaugcaucccccccccccccccccccccccccccccccaaaggcucuuuucagagccaccagaauu

SEQ ID NO: 10697 - RNA, 995 nt, Artificial Sequence
  mRNA product Design b-2 comprising derived and/or modified sequence from HRSV(A2)__P03421.1__P (opt3)
gggagagccucugcuggaguccggggaguggcguuggcugcuagagcgaagcuuaccauggagaaguucgcccccgaauuucacggcgaggacgcuaacaauagagcaaccaaauuccuggaaagcaucaaggggaaauuuacauccccuaaggauccgaaaaagaaggacucuauuauaucagugaacaguaucgauauugaggucacuaaagaaagcccaaucacguccaauucuaccauuaucaaccccacaaaugagacugacgauaccgccggaaacaagccuaauuaccagaggaaaccacucguuucguucaaggaggaccccacaccuucagauaacccauuuagcaaacuuuauaaggaaaccauagagacuuucgacaauaacgaagaggagaguuccuacucuuaugaagagaucaaugaucaaacaaacgacaauauuaccgcgcggcuggaucgcaucgacgaaaaguugagcgagauuuuagguaugcugcauacgcuagugguagcuuccgccggccccacuucagcacgagaugggauccgugacgccaugauaggacucagagaagagaugauugagaaaaucaggaccgaagcucugaugacaaacgaccggcuugaggcaauggcccgccugagaaaugaagagagugaaaagauggcuaaagauacuagcgacgaggugucuuugaacccuaccuccgagaagcucaacaaucugcuggaaggcaacgauucagacaaugaucucagcuuagaggacuuuugaggacuaguguccaccugucccuccugggcugcuggauugucucguuuuccugccaaauaaacaggaucagcgcuuuacagaucuaaaaaaaaaaaaaaaaaaaaaaaaaaaaaaaaaaaaaaaaaaaaaaaaaaaaaaaaaaaaaaaaugcaucccccccccccccccccccccccccccccccaaaggcucuuuucagagccaccagaauu

SEQ ID NO: 10698 - RNA, 995 nt, Artificial Sequence
  mRNA product Design b-2 comprising derived and/or modified sequence from HRSV(A2)__P03421.1__P (opt4)
gggagagccucugcuggaguccggggaguggcguuggcugcuagagcgaagcuuaccauggagaaguucgcccccgaguuccacggcgaggacgccaacaacagagccaccaaguuccuggagagcaucaagggcaaguucaccagccccaaggaccccaagaagaaggacagcaucaucagcgugaacagcaucgacaucgaggugaccaaggagagccccaucaccagcaacagcaccaucaucaaccccaccaacgagaccgacgacaccgccggcaacaagcccaacuaccagagaaagccccuggugagcuucaaggaggaccccacccccagcgacaaccccuucagcaagcuguacaaggagaccaucgagaccuucgacaacaacgaggaggagagcagcuacagcuacgaggagaucaacgaccagaccaacgacaacaucaccgccagacuggacagaaucgacgagaagcugagcgagauccugggcaugcugcacacccuggugguggccagcgccggccccaccagcgccagagacggcaucagagacgccaugaucggccugagagaggagaugaucgagaagaucagaaccgaggcccugaugaccaacgacagacuggaggccauggccagacugagaaacgaggagagcgagaagauggccaaggacaccagcgacgaggugagccugaaccccaccagcgagaagcugaacaaccugcuggagggcaacgacagcgacaacgaccugagccuggaggacuucugaggacuaguguccaccugucccuccugggcugcuggauugucucguuuuccugccaaauaaacaggaucagcgcuuuacagaucuaaaaaaaaaaaaaaaaaaaaaaaaaaaaaaaaaaaaaaaaaaaaaaaaaaaaaaaaaaaaaaaaugcaucccccccccccccccccccccccccccccccaaaggcucuuuucagagccaccagaauu

SEQ ID NO: 10699 - RNA, 995 nt, Artificial Sequence
  mRNA product Design b-2 comprising derived and/or modified sequence from HRSV(A2)__P03421.1__P (opt5)
gggagagccucugcuggaguccggggaguggcguuggcugcuagagcgaagcuuaccauggagaaguucgcccccgaauuucacggcgaggacgcuaacaauagagccaccaaauuccuggaaagcaucaaggggaaauuuacauccccuaaggauccgaaaaagaaggacucuauuaucagcgugaacuccauugauaucgaggucacgaaagaaucucccauuaccagcaauuccacaaucaucaacccuaccaaugagacagacgauaccgcgggaaacaagcccaauuaccagcggaaaccucucguuucuuucaaggaggaccccacaccuagcgauaacccguuuuccaaacuguauaaggaaaccauugagacguucgacaauaacgaagaggagagcucuuacuccuaugaagagaucaaugaucaaaccaacgacaauauuacagcucgccuugauagaaucgacgaaaagcugagcgagauucucggcaugcugcauacccuugugguggccucugccgggcccacauccgcucgggauggaauccgcgacgccaugauuggccugagagaagagaugaucgagaaaauccggaccgaagcucucaugacgaacgaccgccuggaggccauggcgagacugcggaaugaagagagcgaaaagauggccaaagauacaucugacgaggucucccucaacccuaccagcgagaagcugaacaaucuucuggaagggaacgauuccgacaaugaucucucucuggaggacuuuugaggacuaguguccaccugucccuccugggcugcuggauugucucguuuuccugccaaauaaacaggaucagcgcuuuacagaucuaaaaaaaaaaaaaaaaaaaaaaaaaaaaaaaaaaaaaaaaaaaaaaaaaaaaaaaaaaaaaaaaugcaucccccccccccccccccccccccccccccccaaaggcucuuuucagagccaccagaauu

SEQ ID NO: 10700 - RNA, 995 nt, Artificial Sequence
  mRNA product Design b-2 comprising derived and/or modified sequence from HRSV(A2)__P03421.1__P (opt6)
gggagagccucugcuggaguccggggaguggcguuggcugcuagagcgaagcuuaccauggaaaaauucgcaccagaauuucacggagaagacgcaaacaacagagcaacaaaauucuuagaaucaaucaaaggaaaauucacaagcccaaaagacccaaaaaaaaaagacucaauaauaagcguaaacucaauagacauagaaguaacaaaagaaagcccaauaacaagcaacagcacaauaauaaacccaacaaacgaaacagaugacacagcuggaaauaaaccaaacuaccaaagaaaaccccuagucagcuucaaagaagaccccacaccaucagacaacccauucagcaaacuauauaaagaaacaauagaaacauuugacaacaacgaagaagaaucaucauacucauacgaagaaauaaacgaccaaacaaacgacaacauaaccgcaagauuagacagaauagaugaaaaacuaucagaaauacuaggaaugcuacacacauuaguaguagcaagcgcaggaccaacaucagcaagagacggaauaagagacgcaaugauaggacucagagaagaaaugauagaaaaaauaagaacagaagcacuaaugacaaacgacagauuagaagcaauggcaagacuaagaaaugaagaaucggaaaaaauggcaaaagacacaucagacgaaguaagccuaaacccaacaucagaaaaauuaaauaaccuacuagaaggaaacgacagcgacaacgacuuaucacuagaagacuucuaaggacuaguguccaccugucccuccugggcugcuggauugucucguuuuccugccaaauaaacaggaucagcgcuuuacagaucuaaaaaaaaaaaaaaaaaaaaaaaaaaaaaaaaaaaaaaaaaaaaaaaaaaaaaaaaaaaaaaaaugcaucccccccccccccccccccccccccccccccaaaggcucuuuucagagccaccagaauu

SEQ ID NO: 10701 - RNA, 995 nt, Artificial Sequence
  mRNA product Design b-2 comprising derived and/or modified sequence from HRSV(A2)__P03421.1__P (opt11)
gggagagccucugcuggaguccggggaguggcguuggcugcuagagcgaagcuuaccauggaaaaauucgcgcccgaguuccacggcgaggacgcgaacaaccgcgcgacaaaguuccuagaaucaaucaagggcaaauucacgagcccgaaagaccccaagaaaaaggacucaaucauaagcgugaacucgaucgacaucgaggucacgaaagagagcccgaucacaagcaacagcaccauaauaaacccgaccaacgaaacagacgacaccgcgggcaacaaaccgaacuaccaaagaaaaccgcucgugagcuucaaagaagacccgaccccaagcgacaacccguucucaaaacuauacaaggaaacgaucgagaccuucgacaacaacgaggaagagagcucguacucguacgaggaaauaaacgaccaaacaaacgacaacauaaccgcacgccuagacaggaucgacgaaaaacucucggaaauacucgggaugcuacacacgcucguggucgcgagcgcaggcccgaccucggccagggacggcaucagggacgcaaugauaggccugcgagaggaaaugaucgagaaaauacgcaccgaagcacucaugaccaacgacagacucgaagccauggccaggcucaggaacgaagaauccgaaaagauggcgaaagacaccucggacgaggucucgcucaaccccacgagcgagaaacugaacaaccuacuggaagggaacgacagcgacaacgaccuuucccucgaggacuucugaggacuaguguccaccugucccuccugggcugcuggauugucucguuuuccugccaaauaaacaggaucagcgcuuuacagaucuaaaaaaaaaaaaaaaaaaaaaaaaaaaaaaaaaaaaaaaaaaaaaaaaaaaaaaaaaaaaaaaaugcaucccccccccccccccccccccccccccccccaaaggcucuuuucagagccaccagaauu

SEQ ID NO: 10702 - RNA, 1015 nt, Artificial Sequence
  mRNA product Design b-3 comprising derived and/or modified sequence from HRSV(A2)__P03421.1__P (wt)
gggagagucccgcagucggcguccagcggcucugcuuguucgugugugugucguugcaggccuuauucaagcuuaccauggaaaaguuugcuccugaauuccauggagaagaugcaaacaacagggcuacuaaauuccuagaaucaauaaagggcaaauucacaucacccaaagaucccaagaaaaaagauaguaucauaucugucaacucaauagauauagaaguaaccaaagaaagcccuauaacaucaaauucaacuauuaucaacccaacaaaugagacagaugauacugcagggaacaagcccaauuaucaaagaaaaccucuaguaaguuucaaagaagacccuacaccaagugauaaucccuuuucuaaacuauacaaagaaaccauagaaacauuugauaacaaugaagaagaauccagcuauucauacgaagaaauaaaugaucagacaaacgauaauauaacagcaagauuagauaggauugaugaaaaauuaagugaaauacuaggaaugcuucacacauuaguaguggcaagugcaggaccuacaucugcucgggaugguauaagagaugccaugauugguuuaagagaagaaaugauagaaaaaaucagaacugaagcauuaaugaccaaugacagauuagaagcuauggcaagacucaggaaugaggaaagugaaaagauggcaaaagacacaucagaugaagugucucucaauccaacaucagagaaauugaacaaccuauuggaagggaaugauagugacaaugaucuaucacuugaagauuucugaggacuaguguccaccugucccuccugggcugcuggauugucucguuuuccugccaaauaaacaggaucagcgcuuuacagaucuaaaaaaaaaaaaaaaaaaaaaaaaaaaaaaaaaaaaaaaaaaaaaaaaaaaaaaaaaaaaaaaaugcaucccccccccccccccccccccccccccccccaaaggcucuuuucagagccaccagaauu

SEQ ID NO: 10703 - RNA, 1015 nt, Artificial Sequence
  mRNA product Design b-3 comprising derived and/or modified sequence from HRSV(A2)__P03421.1__P (opt1)
gggagagucccgcagucggcguccagcggcucugcuuguucgugugugugucguugcaggccuuauucaagcuuaccauggagaaguucgcccccgaguuccacggcgaggacgccaacaaccgcgcgaccaaguuccuggagagcaucaaggggaaguucaccuccccgaaggaccccaagaagaaggacagcaucaucuccgugaacagcaucgacaucgaggucacgaaggagucccccaucaccagcaacuccaccaucaucaaccccaccaacgagacggacgacaccgccggcaacaagccgaacuaccagcggaagccccucgugagcuucaaggaggaccccacccccuccgacaacccguucagcaagcuguacaaggagaccaucgagacguucgacaacaacgaggaggaguccagcuacuccuacgaggagaucaacgaccagaccaacgacaacaucaccgcccgccuggaccggaucgacgagaagcucagcgagauccuggggaugcugcacacccucguggucgccuccgccggccccacgagcgcgcgcgacgggauccgggacgccaugaucggccugcgcgaggagaugaucgagaagauccggaccgaggcccugaugaccaacgaccgccucgaggccauggcgcggcugcgcaacgaggaguccgagaagauggccaaggacaccagcgacgaggugucccugaaccccacgagcgagaagcucaacaaccugcuggagggcaacgacagcgacaacgaccucucccuggaggacuucugaggacuaguguccaccugucccuccugggcugcuggauugucucguuuuccugccaaauaaacaggaucagcgcuuuacagaucuaaaaaaaaaaaaaaaaaaaaaaaaaaaaaaaaaaaaaaaaaaaaaaaaaaaaaaaaaaaaaaaaugcaucccccccccccccccccccccccccccccccaaaggcucuuuucagagccaccagaauu

SEQ ID NO: 10704 - RNA, 1015 nt, Artificial Sequence
  mRNA product Design b-3 comprising derived and/or modified sequence from HRSV(A2)__P03421.1__P (opt2)
gggagagucccgcagucggcguccagcggcucugcuuguucgugugugugucguugcaggccuuauucaagcuuaccauggagaaguucgcccccgaguuccacggcgaggacgccaacaaccgcgccaccaaguuccucgaguccaucaagggcaaguucaccucccccaaggaccccaagaagaaggacuccaucaucuccgucaacuccaucgacaucgaggucaccaaggagucccccaucaccuccaacuccaccaucaucaaccccaccaacgagaccgacgacaccgccggcaacaagcccaacuaccagcgcaagccccucgucuccuucaaggaggaccccacccccuccgacaaccccuucuccaagcucuacaaggagaccaucgagaccuucgacaacaacgaggaggaguccuccuacuccuacgaggagaucaacgaccagaccaacgacaacaucaccgcccgccucgaccgcaucgacgagaagcucuccgagauccucggcaugcuccacacccucgucgucgccuccgccggccccaccuccgcccgcgacggcauccgcgacgccaugaucggccuccgcgaggagaugaucgagaagauccgcaccgaggcccucaugaccaacgaccgccucgaggccauggcccgccuccgcaacgaggaguccgagaagauggccaaggacaccuccgacgaggucucccucaaccccaccuccgagaagcucaacaaccuccucgagggcaacgacuccgacaacgaccucucccucgaggacuucugaggacuaguguccaccugucccuccugggcugcuggauugucucguuuuccugccaaauaaacaggaucagcgcuuuacagaucuaaaaaaaaaaaaaaaaaaaaaaaaaaaaaaaaaaaaaaaaaaaaaaaaaaaaaaaaaaaaaaaaugcaucccccccccccccccccccccccccccccccaaaggcucuuuucagagccaccagaauu

SEQ ID NO: 10705 - RNA, 1015 nt, Artificial Sequence
  mRNA product Design b-3 comprising derived and/or modified sequence from HRSV(A2)__P03421.1__P (opt3)
gggagagucccgcagucggcguccagcggcucugcuuguucgugugugugucguugcaggccuuauucaagcuuaccauggagaaguucgcccccgaauuucacggcgaggacgcuaacaauagagcaaccaaauuccuggaaagcaucaaggggaaauuuacauccccuaaggauccgaaaaagaaggacucuauuauaucagugaacaguaucgauauugaggucacuaaagaaagcccaaucacguccaauucuaccauuaucaaccccacaaaugagacugacgauaccgccggaaacaagccuaauuaccagaggaaaccacucguuucguucaaggaggaccccacaccuucagauaacccauuuagcaaacuuuauaaggaaaccauagagacuuucgacaauaacgaagaggagaguuccuacucuuaugaagagaucaaugaucaaacaaacgacaauauuaccgcgcggcuggaucgcaucgacgaaaaguugagcgagauuuuagguaugcugcauacgcuagugguagcuuccgccggccccacuucagcacgagaugggauccgugacgccaugauaggacucagagaagagaugauugagaaaaucaggaccgaagcucugaugacaaacgaccggcuugaggcaauggcccgccugagaaaugaagagagugaaaagauggcuaaagauacuagcgacgaggugucuuugaacccuaccuccgagaagcucaacaaucugcuggaaggcaacgauucagacaaugaucucagcuuagaggacuuuugaggacuaguguccaccugucccuccugggcugcuggauugucucguuuuccugccaaauaaacaggaucagcgcuuuacagaucuaaaaaaaaaaaaaaaaaaaaaaaaaaaaaaaaaaaaaaaaaaaaaaaaaaaaaaaaaaaaaaaaugcaucccccccccccccccccccccccccccccccaaaggcucuuuucagagccaccagaauu

SEQ ID NO: 10706 - RNA, 1015 nt, Artificial Sequence
  mRNA product Design b-3 comprising derived and/or modified sequence from HRSV(A2)__P03421.1__P (opt4)
gggagagucccgcagucggcguccagcggcucugcuuguucgugugugugucguugcaggccuuauucaagcuuaccauggagaaguucgcccccgaguuccacggcgaggacgccaacaacagagccaccaaguuccuggagagcaucaagggcaaguucaccagccccaaggaccccaagaagaaggacagcaucaucagcgugaacagcaucgacaucgaggugaccaaggagagccccaucaccagcaacagcaccaucaucaaccccaccaacgagaccgacgacaccgccggcaacaagcccaacuaccagagaaagccccuggugagcuucaaggaggaccccacccccagcgacaaccccuucagcaagcuguacaaggagaccaucgagaccuucgacaacaacgaggaggagagcagcuacagcuacgaggagaucaacgaccagaccaacgacaacaucaccgccagacuggacagaaucgacgagaagcugagcgagauccugggcaugcugcacacccuggugguggccagcgccggccccaccagcgccagagacggcaucagagacgccaugaucggccugagagaggagaugaucgagaagaucagaaccgaggcccugaugaccaacgacagacuggaggccauggccagacugagaaacgaggagagcgagaagauggccaaggacaccagcgacgaggugagccugaaccccaccagcgagaagcugaacaaccugcuggagggcaacgacagcgacaacgaccugagccuggaggacuucugaggacuaguguccaccugucccuccugggcugcuggauugucucguuuuccugccaaauaaacaggaucagcgcuuuacagaucuaaaaaaaaaaaaaaaaaaaaaaaaaaaaaaaaaaaaaaaaaaaaaaaaaaaaaaaaaaaaaaaaugcaucccccccccccccccccccccccccccccccaaaggcucuuuucagagccaccagaauu

SEQ ID NO: 10707 - RNA, 1015 nt, Artificial Sequence
  mRNA product Design b-3 comprising derived and/or modified sequence from HRSV(A2)__P03421.1__P (opt5)
gggagagucccgcagucggcguccagcggcucugcuuguucgugugugugucguugcaggccuuauucaagcuuaccauggagaaguucgcccccgaauuucacggcgaggacgcuaacaauagagccaccaaauuccuggaaagcaucaaggggaaauuuacauccccuaaggauccgaaaaagaaggacucuauuaucagcgugaacuccauugauaucgaggucacgaaagaaucucccauuaccagcaauuccacaaucaucaacccuaccaaugagacagacgauaccgcgggaaacaagcccaauuaccagcggaaaccucucguuucuuucaaggaggaccccacaccuagcgauaacccguuuuccaaacuguauaaggaaaccauugagacguucgacaauaacgaagaggagagcucuuacuccuaugaagagaucaaugaucaaaccaacgacaauauuacagcucgccuugauagaaucgacgaaaagcugagcgagauucucggcaugcugcauacccuugugguggccucugccgggcccacauccgcucgggauggaauccgcgacgccaugauuggccugagagaagagaugaucgagaaaauccggaccgaagcucucaugacgaacgaccgccuggaggccauggcgagacugcggaaugaagagagcgaaaagauggccaaagauacaucugacgaggucucccucaacccuaccagcgagaagcugaacaaucuucuggaagggaacgauuccgacaaugaucucucucuggaggacuuuugaggacuaguguccaccugucccuccugggcugcuggauugucucguuuuccugccaaauaaacaggaucagcgcuuuacagaucuaaaaaaaaaaaaaaaaaaaaaaaaaaaaaaaaaaaaaaaaaaaaaaaaaaaaaaaaaaaaaaaaugcaucccccccccccccccccccccccccccccccaaaggcucuuuucagagccaccagaauu

SEQ ID NO: 10708 - RNA, 1015 nt, Artificial Sequence
  mRNA product Design b-3 comprising derived and/or modified sequence from HRSV(A2)__P03421.1__P (opt6)
gggagagucccgcagucggcguccagcggcucugcuuguucgugugugugucguugcaggccuuauucaagcuuaccauggaaaaauucgcaccagaauuucacggagaagacgcaaacaacagagcaacaaaauucuuagaaucaaucaaaggaaaauucacaagcccaaaagacccaaaaaaaaaagacucaauaauaagcguaaacucaauagacauagaaguaacaaaagaaagcccaauaacaagcaacagcacaauaauaaacccaacaaacgaaacagaugacacagcuggaaauaaaccaaacuaccaaagaaaaccccuagucagcuucaaagaagaccccacaccaucagacaacccauucagcaaacuauauaaagaaacaauagaaacauuugacaacaacgaagaagaaucaucauacucauacgaagaaauaaacgaccaaacaaacgacaacauaaccgcaagauuagacagaauagaugaaaaacuaucagaaauacuaggaaugcuacacacauuaguaguagcaagcgcaggaccaacaucagcaagagacggaauaagagacgcaaugauaggacucagagaagaaaugauagaaaaaauaagaacagaagcacuaaugacaaacgacagauuagaagcaauggcaagacuaagaaaugaagaaucggaaaaaauggcaaaagacacaucagacgaaguaagccuaaacccaacaucagaaaaauuaaauaaccuacuagaaggaaacgacagcgacaacgacuuaucacuagaagacuucuaaggacuaguguccaccugucccuccugggcugcuggauugucucguuuuccugccaaauaaacaggaucagcgcuuuacagaucuaaaaaaaaaaaaaaaaaaaaaaaaaaaaaaaaaaaaaaaaaaaaaaaaaaaaaaaaaaaaaaaaugcaucccccccccccccccccccccccccccccccaaaggcucuuuucagagccaccagaauu

SEQ ID NO: 10709 - RNA, 1015 nt, Artificial Sequence
  mRNA product Design b-3 comprising derived and/or modified sequence from HRSV(A2)__P03421.1__P (opt11)
gggagagucccgcagucggcguccagcggcucugcuuguucgugugugugucguugcaggccuuauucaagcuuaccauggaaaaauucgcgcccgaguuccacggcgaggacgcgaacaaccgcgcgacaaaguuccuagaaucaaucaagggcaaauucacgagcccgaaagaccccaagaaaaaggacucaaucauaagcgugaacucgaucgacaucgaggucacgaaagagagcccgaucacaagcaacagcaccauaauaaacccgaccaacgaaacagacgacaccgcgggcaacaaaccgaacuaccaaagaaaaccgcucgugagcuucaaagaagacccgaccccaagcgacaacccguucucaaaacuauacaaggaaacgaucgagaccuucgacaacaacgaggaagagagcucguacucguacgaggaaauaaacgaccaaacaaacgacaacauaaccgcacgccuagacaggaucgacgaaaaacucucggaaauacucgggaugcuacacacgcucguggucgcgagcgcaggcccgaccucggccagggacggcaucagggacgcaaugauaggccugcgagaggaaaugaucgagaaaauacgcaccgaagcacucaugaccaacgacagacucgaagccauggccaggcucaggaacgaagaauccgaaaagauggcgaaagacaccucggacgaggucucgcucaaccccacgagcgagaaacugaacaaccuacuggaagggaacgacagcgacaacgaccuuucccucgaggacuucugaggacuaguguccaccugucccuccugggcugcuggauugucucguuuuccugccaaauaaacaggaucagcgcuuuacagaucuaaaaaaaaaaaaaaaaaaaaaaaaaaaaaaaaaaaaaaaaaaaaaaaaaaaaaaaaaaaaaaaaugcaucccccccccccccccccccccccccccccccaaaggcucuuuucagagccaccagaauu

SEQ ID NO: 10710 - RNA, 1066 nt, Artificial Sequence
  mRNA product Design b-4 comprising derived and/or modified sequence from HRSV(A2)__P03421.1__P (wt)
gggagagucccgcagucggcguccagcggcucugcuuguucgugugugugucguugcaggccuuauucaagcuuaccauggaaaaguuugcuccugaauuccauggagaagaugcaaacaacagggcuacuaaauuccuagaaucaauaaagggcaaauucacaucacccaaagaucccaagaaaaaagauaguaucauaucugucaacucaauagauauagaaguaaccaaagaaagcccuauaacaucaaauucaacuauuaucaacccaacaaaugagacagaugauacugcagggaacaagcccaauuaucaaagaaaaccucuaguaaguuucaaagaagacccuacaccaagugauaaucccuuuucuaaacuauacaaagaaaccauagaaacauuugauaacaaugaagaagaauccagcuauucauacgaagaaauaaaugaucagacaaacgauaauauaacagcaagauuagauaggauugaugaaaaauuaagugaaauacuaggaaugcuucacacauuaguaguggcaagugcaggaccuacaucugcucgggaugguauaagagaugccaugauugguuuaagagaagaaaugauagaaaaaaucagaacugaagcauuaaugaccaaugacagauuagaagcuauggcaagacucaggaaugaggaaagugaaaagauggcaaaagacacaucagaugaagugucucucaauccaacaucagagaaauugaacaaccuauuggaagggaaugauagugacaaugaucuaucacuugaagauuucugaggacuaguaauaaggaaacuguaugaaugucugugggcaggaagugaagagauccuucuguaaagguuuuuggaauuaugucugcugaauaauaaacuuuuuugaaauaauaaaucugguagaaaaaugagaucuaaaaaaaaaaaaaaaaaaaaaaaaaaaaaaaaaaaaaaaaaaaaaaaaaaaaaaaaaaaaaaaaugcaucccccccccccccccccccccccccccccccaaaggcucuuuucagagccaccagaauu

SEQ ID NO: 10711 - RNA, 1066 nt, Artificial Sequence
  mRNA product Design b-4 comprising derived and/or modified sequence from HRSV(A2)__P03421.1__P (opt1)
gggagagucccgcagucggcguccagcggcucugcuuguucgugugugugucguugcaggccuuauucaagcuuaccauggagaaguucgcccccgaguuccacggcgaggacgccaacaaccgcgcgaccaaguuccuggagagcaucaaggggaaguucaccuccccgaaggaccccaagaagaaggacagcaucaucuccgugaacagcaucgacaucgaggucacgaaggagucccccaucaccagcaacuccaccaucaucaaccccaccaacgagacggacgacaccgccggcaacaagccgaacuaccagcggaagccccucgugagcuucaaggaggaccccacccccuccgacaacccguucagcaagcuguacaaggagaccaucgagacguucgacaacaacgaggaggaguccagcuacuccuacgaggagaucaacgaccagaccaacgacaacaucaccgcccgccuggaccggaucgacgagaagcucagcgagauccuggggaugcugcacacccucguggucgccuccgccggccccacgagcgcgcgcgacgggauccgggacgccaugaucggccugcgcgaggagaugaucgagaagauccggaccgaggcccugaugaccaacgaccgccucgaggccauggcgcggcugcgcaacgaggaguccgagaagauggccaaggacaccagcgacgaggugucccugaaccccacgagcgagaagcucaacaaccugcuggagggcaacgacagcgacaacgaccucucccuggaggacuucugaggacuaguaauaaggaaacuguaugaaugucugugggcaggaagugaagagauccuucuguaaagguuuuuggaauuaugucugcugaauaauaaacuuuuuugaaauaauaaaucugguagaaaaaugagaucuaaaaaaaaaaaaaaaaaaaaaaaaaaaaaaaaaaaaaaaaaaaaaaaaaaaaaaaaaaaaaaaaugcaucccccccccccccccccccccccccccccccaaaggcucuuuucagagccaccagaauu

SEQ ID NO: 10712 - RNA, 1066 nt, Artificial Sequence
  mRNA product Design b-4 comprising derived and/or modified sequence from HRSV(A2)__P03421.1__P (opt2)
gggagagucccgcagucggcguccagcggcucugcuuguucgugugugugucguugcaggccuuauucaagcuuaccauggagaaguucgcccccgaguuccacggcgaggacgccaacaaccgcgccaccaaguuccucgaguccaucaagggcaaguucaccucccccaaggaccccaagaagaaggacuccaucaucuccgucaacuccaucgacaucgaggucaccaaggagucccccaucaccuccaacuccaccaucaucaaccccaccaacgagaccgacgacaccgccggcaacaagcccaacuaccagcgcaagccccucgucuccuucaaggaggaccccacccccuccgacaaccccuucuccaagcucuacaaggagaccaucgagaccuucgacaacaacgaggaggaguccuccuacuccuacgaggagaucaacgaccagaccaacgacaacaucaccgcccgccucgaccgcaucgacgagaagcucuccgagauccucggcaugcuccacacccucgucgucgccuccgccggccccaccuccgcccgcgacggcauccgcgacgccaugaucggccuccgcgaggagaugaucgagaagauccgcaccgaggcccucaugaccaacgaccgccucgaggccauggcccgccuccgcaacgaggaguccgagaagauggccaaggacaccuccgacgaggucucccucaaccccaccuccgagaagcucaacaaccuccucgagggcaacgacuccgacaacgaccucucccucgaggacuucugaggacuaguaauaaggaaacuguaugaaugucugugggcaggaagugaagagauccuucuguaaagguuuuuggaauuaugucugcugaauaauaaacuuuuuugaaauaauaaaucugguagaaaaaugagaucuaaaaaaaaaaaaaaaaaaaaaaaaaaaaaaaaaaaaaaaaaaaaaaaaaaaaaaaaaaaaaaaaugcaucccccccccccccccccccccccccccccccaaaggcucuuuucagagccaccagaauu

SEQ ID NO: 10713 - RNA, 1066 nt, Artificial Sequence
  mRNA product Design b-4 comprising derived and/or modified sequence from HRSV(A2)__P03421.1__P (opt3)
gggagagucccgcagucggcguccagcggcucugcuuguucgugugugugucguugcaggccuuauucaagcuuaccauggagaaguucgcccccgaauuucacggcgaggacgcuaacaauagagcaaccaaauuccuggaaagcaucaaggggaaauuuacauccccuaaggauccgaaaaagaaggacucuauuauaucagugaacaguaucgauauugaggucacuaaagaaagcccaaucacguccaauucuaccauuaucaaccccacaaaugagacugacgauaccgccggaaacaagccuaauuaccagaggaaaccacucguuucguucaaggaggaccccacaccuucagauaacccauuuagcaaacuuuauaaggaaaccauagagacuuucgacaauaacgaagaggagaguuccuacucuuaugaagagaucaaugaucaaacaaacgacaauauuaccgcgcggcuggaucgcaucgacgaaaaguugagcgagauuuuagguaugcugcauacgcuagugguagcuuccgccggccccacuucagcacgagaugggauccgugacgccaugauaggacucagagaagagaugauugagaaaaucaggaccgaagcucugaugacaaacgaccggcuugaggcaauggcccgccugagaaaugaagagagugaaaagauggcuaaagauacuagcgacgaggugucuuugaacccuaccuccgagaagcucaacaaucugcuggaaggcaacgauucagacaaugaucucagcuuagaggacuuuugaggacuaguaauaaggaaacuguaugaaugucugugggcaggaagugaagagauccuucuguaaagguuuuuggaauuaugucugcugaauaauaaacuuuuuugaaauaauaaaucugguagaaaaaugagaucuaaaaaaaaaaaaaaaaaaaaaaaaaaaaaaaaaaaaaaaaaaaaaaaaaaaaaaaaaaaaaaaaugcaucccccccccccccccccccccccccccccccaaaggcucuuuucagagccaccagaauu

SEQ ID NO: 10714 - RNA, 1066 nt, Artificial Sequence
  mRNA product Design b-4 comprising derived and/or modified sequence from HRSV(A2)__P03421.1__P (opt4)
gggagagucccgcagucggcguccagcggcucugcuuguucgugugugugucguugcaggccuuauucaagcuuaccauggagaaguucgcccccgaguuccacggcgaggacgccaacaacagagccaccaaguuccuggagagcaucaagggcaaguucaccagccccaaggaccccaagaagaaggacagcaucaucagcgugaacagcaucgacaucgaggugaccaaggagagccccaucaccagcaacagcaccaucaucaaccccaccaacgagaccgacgacaccgccggcaacaagcccaacuaccagagaaagccccuggugagcuucaaggaggaccccacccccagcgacaaccccuucagcaagcuguacaaggagaccaucgagaccuucgacaacaacgaggaggagagcagcuacagcuacgaggagaucaacgaccagaccaacgacaacaucaccgccagacuggacagaaucgacgagaagcugagcgagauccugggcaugcugcacacccuggugguggccagcgccggccccaccagcgccagagacggcaucagagacgccaugaucggccugagagaggagaugaucgagaagaucagaaccgaggcccugaugaccaacgacagacuggaggccauggccagacugagaaacgaggagagcgagaagauggccaaggacaccagcgacgaggugagccugaaccccaccagcgagaagcugaacaaccugcuggagggcaacgacagcgacaacgaccugagccuggaggacuucugaggacuaguaauaaggaaacuguaugaaugucugugggcaggaagugaagagauccuucuguaaagguuuuuggaauuaugucugcugaauaauaaacuuuuuugaaauaauaaaucugguagaaaaaugagaucuaaaaaaaaaaaaaaaaaaaaaaaaaaaaaaaaaaaaaaaaaaaaaaaaaaaaaaaaaaaaaaaaugcaucccccccccccccccccccccccccccccccaaaggcucuuuucagagccaccagaauu

SEQ ID NO: 10715 - RNA, 1066 nt, Artificial Sequence
  mRNA product Design b-4 comprising derived and/or modified sequence from HRSV(A2)__P03421.1__P (opt5)
gggagagucccgcagucggcguccagcggcucugcuuguucgugugugugucguugcaggccuuauucaagcuuaccauggagaaguucgcccccgaauuucacggcgaggacgcuaacaauagagccaccaaauuccuggaaagcaucaaggggaaauuuacauccccuaaggauccgaaaaagaaggacucuauuaucagcgugaacuccauugauaucgaggucacgaaagaaucucccauuaccagcaauuccacaaucaucaacccuaccaaugagacagacgauaccgcgggaaacaagcccaauuaccagcggaaaccucucguuucuuucaaggaggaccccacaccuagcgauaacccguuuuccaaacuguauaaggaaaccauugagacguucgacaauaacgaagaggagagcucuuacuccuaugaagagaucaaugaucaaaccaacgacaauauuacagcucgccuugauagaaucgacgaaaagcugagcgagauucucggcaugcugcauacccuugugguggccucugccgggcccacauccgcucgggauggaauccgcgacgccaugauuggccugagagaagagaugaucgagaaaauccggaccgaagcucucaugacgaacgaccgccuggaggccauggcgagacugcggaaugaagagagcgaaaagauggccaaagauacaucugacgaggucucccucaacccuaccagcgagaagcugaacaaucuucuggaagggaacgauuccgacaaugaucucucucuggaggacuuuugaggacuaguaauaaggaaacuguaugaaugucugugggcaggaagugaagagauccuucuguaaagguuuuuggaauuaugucugcugaauaauaaacuuuuuugaaauaauaaaucugguagaaaaaugagaucuaaaaaaaaaaaaaaaaaaaaaaaaaaaaaaaaaaaaaaaaaaaaaaaaaaaaaaaaaaaaaaaaugcaucccccccccccccccccccccccccccccccaaaggcucuuuucagagccaccagaauu

SEQ ID NO: 10716 - RNA, 1066 nt, Artificial Sequence
  mRNA product Design b-4 comprising derived and/or modified sequence from HRSV(A2)__P03421.1__P (opt6)
gggagagucccgcagucggcguccagcggcucugcuuguucgugugugugucguugcaggccuuauucaagcuuaccauggaaaaauucgcaccagaauuucacggagaagacgcaaacaacagagcaacaaaauucuuagaaucaaucaaaggaaaauucacaagcccaaaagacccaaaaaaaaaagacucaauaauaagcguaaacucaauagacauagaaguaacaaaagaaagcccaauaacaagcaacagcacaauaauaaacccaacaaacgaaacagaugacacagcuggaaauaaaccaaacuaccaaagaaaaccccuagucagcuucaaagaagaccccacaccaucagacaacccauucagcaaacuauauaaagaaacaauagaaacauuugacaacaacgaagaagaaucaucauacucauacgaagaaauaaacgaccaaacaaacgacaacauaaccgcaagauuagacagaauagaugaaaaacuaucagaaauacuaggaaugcuacacacauuaguaguagcaagcgcaggaccaacaucagcaagagacggaauaagagacgcaaugauaggacucagagaagaaaugauagaaaaaauaagaacagaagcacuaaugacaaacgacagauuagaagcaauggcaagacuaagaaaugaagaaucggaaaaaauggcaaaagacacaucagacgaaguaagccuaaacccaacaucagaaaaauuaaauaaccuacuagaaggaaacgacagcgacaacgacuuaucacuagaagacuucuaaggacuaguaauaaggaaacuguaugaaugucugugggcaggaagugaagagauccuucuguaaagguuuuuggaauuaugucugcugaauaauaaacuuuuuugaaauaauaaaucugguagaaaaaugagaucuaaaaaaaaaaaaaaaaaaaaaaaaaaaaaaaaaaaaaaaaaaaaaaaaaaaaaaaaaaaaaaaaugcaucccccccccccccccccccccccccccccccaaaggcucuuuucagagccaccagaauu

SEQ ID NO: 10717 - RNA, 1066 nt, Artificial Sequence
  mRNA product Design b-4 comprising derived and/or modified sequence from HRSV(A2)__P03421.1__P (opt11)
gggagagucccgcagucggcguccagcggcucugcuuguucgugugugugucguugcaggccuuauucaagcuuaccauggaaaaauucgcgcccgaguuccacggcgaggacgcgaacaaccgcgcgacaaaguuccuagaaucaaucaagggcaaauucacgagcccgaaagaccccaagaaaaaggacucaaucauaagcgugaacucgaucgacaucgaggucacgaaagagagcccgaucacaagcaacagcaccauaauaaacccgaccaacgaaacagacgacaccgcgggcaacaaaccgaacuaccaaagaaaaccgcucgugagcuucaaagaagacccgaccccaagcgacaacccguucucaaaacuauacaaggaaacgaucgagaccuucgacaacaacgaggaagagagcucguacucguacgaggaaauaaacgaccaaacaaacgacaacauaaccgcacgccuagacaggaucgacgaaaaacucucggaaauacucgggaugcuacacacgcucguggucgcgagcgcaggcccgaccucggccagggacggcaucagggacgcaaugauaggccugcgagaggaaaugaucgagaaaauacgcaccgaagcacucaugaccaacgacagacucgaagccauggccaggcucaggaacgaagaauccgaaaagauggcgaaagacaccucggacgaggucucgcucaaccccacgagcgagaaacugaacaaccuacuggaagggaacgacagcgacaacgaccuuucccucgaggacuucugaggacuaguaauaaggaaacuguaugaaugucugugggcaggaagugaagagauccuucuguaaagguuuuuggaauuaugucugcugaauaauaaacuuuuuugaaauaauaaaucugguagaaaaaugagaucuaaaaaaaaaaaaaaaaaaaaaaaaaaaaaaaaaaaaaaaaaaaaaaaaaaaaaaaaaaaaaaaaugcaucccccccccccccccccccccccccccccccaaaggcucuuuucagagccaccagaauu

SEQ ID NO: 10718 - RNA, 1128 nt, Artificial Sequence
  mRNA product Design b-5 comprising derived and/or modified sequence from HRSV(A2)__P03421.1__P (wt)
gggagacuccugucgggcggaaguaggaggaguagaguuuaaaaacaguacucuuuuuccgguucgggacguaguugaagcaacgacaagccggauaaccgcucuugagacaggaagcuuaccauggaaaaguuugcuccugaauuccauggagaagaugcaaacaacagggcuacuaaauuccuagaaucaauaaagggcaaauucacaucacccaaagaucccaagaaaaaagauaguaucauaucugucaacucaauagauauagaaguaaccaaagaaagcccuauaacaucaaauucaacuauuaucaacccaacaaaugagacagaugauacugcagggaacaagcccaauuaucaaagaaaaccucuaguaaguuucaaagaagacccuacaccaagugauaaucccuuuucuaaacuauacaaagaaaccauagaaacauuugauaacaaugaagaagaauccagcuauucauacgaagaaauaaaugaucagacaaacgauaauauaacagcaagauuagauaggauugaugaaaaauuaagugaaauacuaggaaugcuucacacauuaguaguggcaagugcaggaccuacaucugcucgggaugguauaagagaugccaugauugguuuaagagaagaaaugauagaaaaaaucagaacugaagcauuaaugaccaaugacagauuagaagcuauggcaagacucaggaaugaggaaagugaaaagauggcaaaagacacaucagaugaagugucucucaauccaacaucagagaaauugaacaaccuauuggaagggaaugauagugacaaugaucuaucacuugaagauuucugaggacuaguacuggcugcaucucccuuuccucuguccuccauccuucucccaggauggugaagggggaccugguacccagugauccccaccccaggauccuaaaucaugacuuaccugcuaauaaaaacucauuggaaaagugagaagaucuaaaaaaaaaaaaaaaaaaaaaaaaaaaaaaaaaaaaaaaaaaaaaaaaaaaaaaaaaaaaaaaaugcaucccccccccccccccccccccccccccccccaaaggcucuuuucagagccaccagaauu

SEQ ID NO: 10719 - RNA, 1128 nt, Artificial Sequence
  mRNA product Design b-5 comprising derived and/or modified sequence from HRSV(A2)__P03421.1__P (opt1)
gggagacuccugucgggcggaaguaggaggaguagaguuuaaaaacaguacucuuuuuccgguucgggacguaguugaagcaacgacaagccggauaaccgcucuugagacaggaagcuuaccauggagaaguucgcccccgaguuccacggcgaggacgccaacaaccgcgcgaccaaguuccuggagagcaucaaggggaaguucaccuccccgaaggaccccaagaagaaggacagcaucaucuccgugaacagcaucgacaucgaggucacgaaggagucccccaucaccagcaacuccaccaucaucaaccccaccaacgagacggacgacaccgccggcaacaagccgaacuaccagcggaagccccucgugagcuucaaggaggaccccacccccuccgacaacccguucagcaagcuguacaaggagaccaucgagacguucgacaacaacgaggaggaguccagcuacuccuacgaggagaucaacgaccagaccaacgacaacaucaccgcccgccuggaccggaucgacgagaagcucagcgagauccuggggaugcugcacacccucguggucgccuccgccggccccacgagcgcgcgcgacgggauccgggacgccaugaucggccugcgcgaggagaugaucgagaagauccggaccgaggcccugaugaccaacgaccgccucgaggccauggcgcggcugcgcaacgaggaguccgagaagauggccaaggacaccagcgacgaggugucccugaaccccacgagcgagaagcucaacaaccugcuggagggcaacgacagcgacaacgaccucucccuggaggacuucugaggacuaguacuggcugcaucucccuuuccucuguccuccauccuucucccaggauggugaagggggaccugguacccagugauccccaccccaggauccuaaaucaugacuuaccugcuaauaaaaacucauuggaaaagugagaagaucuaaaaaaaaaaaaaaaaaaaaaaaaaaaaaaaaaaaaaaaaaaaaaaaaaaaaaaaaaaaaaaaaugcaucccccccccccccccccccccccccccccccaaaggcucuuuucagagccaccagaauu

SEQ ID NO: 10720 - RNA, 1128 nt, Artificial Sequence
  mRNA product Design b-5 comprising derived and/or modified sequence from HRSV(A2)__P03421.1__P (opt2)
gggagacuccugucgggcggaaguaggaggaguagaguuuaaaaacaguacucuuuuuccgguucgggacguaguugaagcaacgacaagccggauaaccgcucuugagacaggaagcuuaccauggagaaguucgcccccgaguuccacggcgaggacgccaacaaccgcgccaccaaguuccucgaguccaucaagggcaaguucaccucccccaaggaccccaagaagaaggacuccaucaucuccgucaacuccaucgacaucgaggucaccaaggagucccccaucaccuccaacuccaccaucaucaaccccaccaacgagaccgacgacaccgccggcaacaagcccaacuaccagcgcaagccccucgucuccuucaaggaggaccccacccccuccgacaaccccuucuccaagcucuacaaggagaccaucgagaccuucgacaacaacgaggaggaguccuccuacuccuacgaggagaucaacgaccagaccaacgacaacaucaccgcccgccucgaccgcaucgacgagaagcucuccgagauccucggcaugcuccacacccucgucgucgccuccgccggccccaccuccgcccgcgacggcauccgcgacgccaugaucggccuccgcgaggagaugaucgagaagauccgcaccgaggcccucaugaccaacgaccgccucgaggccauggcccgccuccgcaacgaggaguccgagaagauggccaaggacaccuccgacgaggucucccucaaccccaccuccgagaagcucaacaaccuccucgagggcaacgacuccgacaacgaccucucccucgaggacuucugaggacuaguacuggcugcaucucccuuuccucuguccuccauccuucucccaggauggugaagggggaccugguacccagugauccccaccccaggauccuaaaucaugacuuaccugcuaauaaaaacucauuggaaaagugagaagaucuaaaaaaaaaaaaaaaaaaaaaaaaaaaaaaaaaaaaaaaaaaaaaaaaaaaaaaaaaaaaaaaaugcaucccccccccccccccccccccccccccccccaaaggcucuuuucagagccaccagaauu

SEQ ID NO: 10721 - RNA, 1128 nt, Artificial Sequence
  mRNA product Design b-5 comprising derived and/or modified sequence from HRSV(A2)__P03421.1__P (opt3)
gggagacuccugucgggcggaaguaggaggaguagaguuuaaaaacaguacucuuuuuccgguucgggacguaguugaagcaacgacaagccggauaaccgcucuugagacaggaagcuuaccauggagaaguucgcccccgaauuucacggcgaggacgcuaacaauagagcaaccaaauuccuggaaagcaucaaggggaaauuuacauccccuaaggauccgaaaaagaaggacucuauuauaucagugaacaguaucgauauugaggucacuaaagaaagcccaaucacguccaauucuaccauuaucaaccccacaaaugagacugacgauaccgccggaaacaagccuaauuaccagaggaaaccacucguuucguucaaggaggaccccacaccuucagauaacccauuuagcaaacuuuauaaggaaaccauagagacuuucgacaauaacgaagaggagaguuccuacucuuaugaagagaucaaugaucaaacaaacgacaauauuaccgcgcggcuggaucgcaucgacgaaaaguugagcgagauuuuagguaugcugcauacgcuagugguagcuuccgccggccccacuucagcacgagaugggauccgugacgccaugauaggacucagagaagagaugauugagaaaaucaggaccgaagcucugaugacaaacgaccggcuugaggcaauggcccgccugagaaaugaagagagugaaaagauggcuaaagauacuagcgacgaggugucuuugaacccuaccuccgagaagcucaacaaucugcuggaaggcaacgauucagacaaugaucucagcuuagaggacuuuugaggacuaguacuggcugcaucucccuuuccucuguccuccauccuucucccaggauggugaagggggaccugguacccagugauccccaccccaggauccuaaaucaugacuuaccugcuaauaaaaacucauuggaaaagugagaagaucuaaaaaaaaaaaaaaaaaaaaaaaaaaaaaaaaaaaaaaaaaaaaaaaaaaaaaaaaaaaaaaaaugcaucccccccccccccccccccccccccccccccaaaggcucuuuucagagccaccagaauu

SEQ ID NO: 10722 - RNA, 1128 nt, Artificial Sequence
  mRNA product Design b-5 comprising derived and/or modified sequence from HRSV(A2)__P03421.1__P (opt4)
gggagacuccugucgggcggaaguaggaggaguagaguuuaaaaacaguacucuuuuuccgguucgggacguaguugaagcaacgacaagccggauaaccgcucuugagacaggaagcuuaccauggagaaguucgcccccgaguuccacggcgaggacgccaacaacagagccaccaaguuccuggagagcaucaagggcaaguucaccagccccaaggaccccaagaagaaggacagcaucaucagcgugaacagcaucgacaucgaggugaccaaggagagccccaucaccagcaacagcaccaucaucaaccccaccaacgagaccgacgacaccgccggcaacaagcccaacuaccagagaaagccccuggugagcuucaaggaggaccccacccccagcgacaaccccuucagcaagcuguacaaggagaccaucgagaccuucgacaacaacgaggaggagagcagcuacagcuacgaggagaucaacgaccagaccaacgacaacaucaccgccagacuggacagaaucgacgagaagcugagcgagauccugggcaugcugcacacccuggugguggccagcgccggccccaccagcgccagagacggcaucagagacgccaugaucggccugagagaggagaugaucgagaagaucagaaccgaggcccugaugaccaacgacagacuggaggccauggccagacugagaaacgaggagagcgagaagauggccaaggacaccagcgacgaggugagccugaaccccaccagcgagaagcugaacaaccugcuggagggcaacgacagcgacaacgaccugagccuggaggacuucugaggacuaguacuggcugcaucucccuuuccucuguccuccauccuucucccaggauggugaagggggaccugguacccagugauccccaccccaggauccuaaaucaugacuuaccugcuaauaaaaacucauuggaaaagugagaagaucuaaaaaaaaaaaaaaaaaaaaaaaaaaaaaaaaaaaaaaaaaaaaaaaaaaaaaaaaaaaaaaaaugcaucccccccccccccccccccccccccccccccaaaggcucuuuucagagccaccagaauu

SEQ ID NO: 10723 - RNA, 1128 nt, Artificial Sequence
  mRNA product Design b-5 comprising derived and/or modified sequence from HRSV(A2)__P03421.1__P (opt5)
gggagacuccugucgggcggaaguaggaggaguagaguuuaaaaacaguacucuuuuuccgguucgggacguaguugaagcaacgacaagccggauaaccgcucuugagacaggaagcuuaccauggagaaguucgcccccgaauuucacggcgaggacgcuaacaauagagccaccaaauuccuggaaagcaucaaggggaaauuuacauccccuaaggauccgaaaaagaaggacucuauuaucagcgugaacuccauugauaucgaggucacgaaagaaucucccauuaccagcaauuccacaaucaucaacccuaccaaugagacagacgauaccgcgggaaacaagcccaauuaccagcggaaaccucucguuucuuucaaggaggaccccacaccuagcgauaacccguuuuccaaacuguauaaggaaaccauugagacguucgacaauaacgaagaggagagcucuuacuccuaugaagagaucaaugaucaaaccaacgacaauauuacagcucgccuugauagaaucgacgaaaagcugagcgagauucucggcaugcugcauacccuugugguggccucugccgggcccacauccgcucgggauggaauccgcgacgccaugauuggccugagagaagagaugaucgagaaaauccggaccgaagcucucaugacgaacgaccgccuggaggccauggcgagacugcggaaugaagagagcgaaaagauggccaaagauacaucugacgaggucucccucaacccuaccagcgagaagcugaacaaucuucuggaagggaacgauuccgacaaugaucucucucuggaggacuuuugaggacuaguacuggcugcaucucccuuuccucuguccuccauccuucucccaggauggugaagggggaccugguacccagugauccccaccccaggauccuaaaucaugacuuaccugcuaauaaaaacucauuggaaaagugagaagaucuaaaaaaaaaaaaaaaaaaaaaaaaaaaaaaaaaaaaaaaaaaaaaaaaaaaaaaaaaaaaaaaaugcaucccccccccccccccccccccccccccccccaaaggcucuuuucagagccaccagaauu

SEQ ID NO: 10724 - RNA, 1128 nt, Artificial Sequence
  mRNA product Design b-5 comprising derived and/or modified sequence from HRSV(A2)__P03421.1__P (opt6)
gggagacuccugucgggcggaaguaggaggaguagaguuuaaaaacaguacucuuuuuccgguucgggacguaguugaagcaacgacaagccggauaaccgcucuugagacaggaagcuuaccauggaaaaauucgcaccagaauuucacggagaagacgcaaacaacagagcaacaaaauucuuagaaucaaucaaaggaaaauucacaagcccaaaagacccaaaaaaaaaagacucaauaauaagcguaaacucaauagacauagaaguaacaaaagaaagcccaauaacaagcaacagcacaauaauaaacccaacaaacgaaacagaugacacagcuggaaauaaaccaaacuaccaaagaaaaccccuagucagcuucaaagaagaccccacaccaucagacaacccauucagcaaacuauauaaagaaacaauagaaacauuugacaacaacgaagaagaaucaucauacucauacgaagaaauaaacgaccaaacaaacgacaacauaaccgcaagauuagacagaauagaugaaaaacuaucagaaauacuaggaaugcuacacacauuaguaguagcaagcgcaggaccaacaucagcaagagacggaauaagagacgcaaugauaggacucagagaagaaaugauagaaaaaauaagaacagaagcacuaaugacaaacgacagauuagaagcaauggcaagacuaagaaaugaagaaucggaaaaaauggcaaaagacacaucagacgaaguaagccuaaacccaacaucagaaaaauuaaauaaccuacuagaaggaaacgacagcgacaacgacuuaucacuagaagacuucuaaggacuaguacuggcugcaucucccuuuccucuguccuccauccuucucccaggauggugaagggggaccugguacccagugauccccaccccaggauccuaaaucaugacuuaccugcuaauaaaaacucauuggaaaagugagaagaucuaaaaaaaaaaaaaaaaaaaaaaaaaaaaaaaaaaaaaaaaaaaaaaaaaaaaaaaaaaaaaaaaugcaucccccccccccccccccccccccccccccccaaaggcucuuuucagagccaccagaauu

SEQ ID NO: 10725 - RNA, 1128 nt, Artificial Sequence
  mRNA product Design b-5 comprising derived and/or modified sequence from HRSV(A2)__P03421.1__P (opt11)
gggagacuccugucgggcggaaguaggaggaguagaguuuaaaaacaguacucuuuuuccgguucgggacguaguugaagcaacgacaagccggauaaccgcucuugagacaggaagcuuaccauggaaaaauucgcgcccgaguuccacggcgaggacgcgaacaaccgcgcgacaaaguuccuagaaucaaucaagggcaaauucacgagcccgaaagaccccaagaaaaaggacucaaucauaagcgugaacucgaucgacaucgaggucacgaaagagagcccgaucacaagcaacagcaccauaauaaacccgaccaacgaaacagacgacaccgcgggcaacaaaccgaacuaccaaagaaaaccgcucgugagcuucaaagaagacccgaccccaagcgacaacccguucucaaaacuauacaaggaaacgaucgagaccuucgacaacaacgaggaagagagcucguacucguacgaggaaauaaacgaccaaacaaacgacaacauaaccgcacgccuagacaggaucgacgaaaaacucucggaaauacucgggaugcuacacacgcucguggucgcgagcgcaggcccgaccucggccagggacggcaucagggacgcaaugauaggccugcgagaggaaaugaucgagaaaauacgcaccgaagcacucaugaccaacgacagacucgaagccauggccaggcucaggaacgaagaauccgaaaagauggcgaaagacaccucggacgaggucucgcucaaccccacgagcgagaaacugaacaaccuacuggaagggaacgacagcgacaacgaccuuucccucgaggacuucugaggacuaguacuggcugcaucucccuuuccucuguccuccauccuucucccaggauggugaagggggaccugguacccagugauccccaccccaggauccuaaaucaugacuuaccugcuaauaaaaacucauuggaaaagugagaagaucuaaaaaaaaaaaaaaaaaaaaaaaaaaaaaaaaaaaaaaaaaaaaaaaaaaaaaaaaaaaaaaaaugcaucccccccccccccccccccccccccccccccaaaggcucuuuucagagccaccagaauu

SEQ ID NO: 10726 - RNA, 1034 nt, Artificial Sequence
  mRNA product Design c-1 comprising derived and/or modified sequence from HRSV(A2)__P03421.1__P (wt)
gggagaguccgcucagccagguugcagaagcggcuuagcguguguccuaaucuucucucugcguguagguaggccugugccgcaaacaagcuuaccauggaaaaguuugcuccugaauuccauggagaagaugcaaacaacagggcuacuaaauuccuagaaucaauaaagggcaaauucacaucacccaaagaucccaagaaaaaagauaguaucauaucugucaacucaauagauauagaaguaaccaaagaaagcccuauaacaucaaauucaacuauuaucaacccaacaaaugagacagaugauacugcagggaacaagcccaauuaucaaagaaaaccucuaguaaguuucaaagaagacccuacaccaagugauaaucccuuuucuaaacuauacaaagaaaccauagaaacauuugauaacaaugaagaagaauccagcuauucauacgaagaaauaaaugaucagacaaacgauaauauaacagcaagauuagauaggauugaugaaaaauuaagugaaauacuaggaaugcuucacacauuaguaguggcaagugcaggaccuacaucugcucgggaugguauaagagaugccaugauugguuuaagagaagaaaugauagaaaaaaucagaacugaagcauuaaugaccaaugacagauuagaagcuauggcaagacucaggaaugaggaaagugaaaagauggcaaaagacacaucagaugaagugucucucaauccaacaucagagaaauugaacaaccuauuggaagggaaugauagugacaaugaucuaucacuugaagauuucugaggacuaguguccaccugucccuccugggcugcuggauugucucguuuuccugccaaauaaacaggaucagcgcuuuacagaucuaaaaaaaaaaaaaaaaaaaaaaaaaaaaaaaaaaaaaaaaaaaaaaaaaaaaaaaaaaaaaaaaugcaucccccccccccccccccccccccccccccccaaaggcucuuuucagagccaccagaauu

SEQ ID NO: 10727 - RNA, 1034 nt, Artificial Sequence
  mRNA product Design c-1 comprising derived and/or modified sequence from HRSV(A2)__P03421.1__P (opt1)
gggagaguccgcucagccagguugcagaagcggcuuagcguguguccuaaucuucucucugcguguagguaggccugugccgcaaacaagcuuaccauggagaaguucgcccccgaguuccacggcgaggacgccaacaaccgcgcgaccaaguuccuggagagcaucaaggggaaguucaccuccccgaaggaccccaagaagaaggacagcaucaucuccgugaacagcaucgacaucgaggucacgaaggagucccccaucaccagcaacuccaccaucaucaaccccaccaacgagacggacgacaccgccggcaacaagccgaacuaccagcggaagccccucgugagcuucaaggaggaccccacccccuccgacaacccguucagcaagcuguacaaggagaccaucgagacguucgacaacaacgaggaggaguccagcuacuccuacgaggagaucaacgaccagaccaacgacaacaucaccgcccgccuggaccggaucgacgagaagcucagcgagauccuggggaugcugcacacccucguggucgccuccgccggccccacgagcgcgcgcgacgggauccgggacgccaugaucggccugcgcgaggagaugaucgagaagauccggaccgaggcccugaugaccaacgaccgccucgaggccauggcgcggcugcgcaacgaggaguccgagaagauggccaaggacaccagcgacgaggugucccugaaccccacgagcgagaagcucaacaaccugcuggagggcaacgacagcgacaacgaccucucccuggaggacuucugaggacuaguguccaccugucccuccugggcugcuggauugucucguuuuccugccaaauaaacaggaucagcgcuuuacagaucuaaaaaaaaaaaaaaaaaaaaaaaaaaaaaaaaaaaaaaaaaaaaaaaaaaaaaaaaaaaaaaaaugcaucccccccccccccccccccccccccccccccaaaggcucuuuucagagccaccagaauu

SEQ ID NO: 10728 - RNA, 1034 nt, Artificial Sequence
  mRNA product Design c-1 comprising derived and/or modified sequence from HRSV(A2)__P03421.1__P (opt2)
gggagaguccgcucagccagguugcagaagcggcuuagcguguguccuaaucuucucucugcguguagguaggccugugccgcaaacaagcuuaccauggagaaguucgcccccgaguuccacggcgaggacgccaacaaccgcgccaccaaguuccucgaguccaucaagggcaaguucaccucccccaaggaccccaagaagaaggacuccaucaucuccgucaacuccaucgacaucgaggucaccaaggagucccccaucaccuccaacuccaccaucaucaaccccaccaacgagaccgacgacaccgccggcaacaagcccaacuaccagcgcaagccccucgucuccuucaaggaggaccccacccccuccgacaaccccuucuccaagcucuacaaggagaccaucgagaccuucgacaacaacgaggaggaguccuccuacuccuacgaggagaucaacgaccagaccaacgacaacaucaccgcccgccucgaccgcaucgacgagaagcucuccgagauccucggcaugcuccacacccucgucgucgccuccgccggccccaccuccgcccgcgacggcauccgcgacgccaugaucggccuccgcgaggagaugaucgagaagauccgcaccgaggcccucaugaccaacgaccgccucgaggccauggcccgccuccgcaacgaggaguccgagaagauggccaaggacaccuccgacgaggucucccucaaccccaccuccgagaagcucaacaaccuccucgagggcaacgacuccgacaacgaccucucccucgaggacuucugaggacuaguguccaccugucccuccugggcugcuggauugucucguuuuccugccaaauaaacaggaucagcgcuuuacagaucuaaaaaaaaaaaaaaaaaaaaaaaaaaaaaaaaaaaaaaaaaaaaaaaaaaaaaaaaaaaaaaaaugcaucccccccccccccccccccccccccccccccaaaggcucuuuucagagccaccagaauu

SEQ ID NO: 10729 - RNA, 1034 nt, Artificial Sequence
  mRNA product Design c-1 comprising derived and/or modified sequence from HRSV(A2)__P03421.1__P (opt3)
gggagaguccgcucagccagguugcagaagcggcuuagcguguguccuaaucuucucucugcguguagguaggccugugccgcaaacaagcuuaccauggagaaguucgcccccgaauuucacggcgaggacgcuaacaauagagcaaccaaauuccuggaaagcaucaaggggaaauuuacauccccuaaggauccgaaaaagaaggacucuauuauaucagugaacaguaucgauauugaggucacuaaagaaagcccaaucacguccaauucuaccauuaucaaccccacaaaugagacugacgauaccgccggaaacaagccuaauuaccagaggaaaccacucguuucguucaaggaggaccccacaccuucagauaacccauuuagcaaacuuuauaaggaaaccauagagacuuucgacaauaacgaagaggagaguuccuacucuuaugaagagaucaaugaucaaacaaacgacaauauuaccgcgcggcuggaucgcaucgacgaaaaguugagcgagauuuuagguaugcugcauacgcuagugguagcuuccgccggccccacuucagcacgagaugggauccgugacgccaugauaggacucagagaagagaugauugagaaaaucaggaccgaagcucugaugacaaacgaccggcuugaggcaauggcccgccugagaaaugaagagagugaaaagauggcuaaagauacuagcgacgaggugucuuugaacccuaccuccgagaagcucaacaaucugcuggaaggcaacgauucagacaaugaucucagcuuagaggacuuuugaggacuaguguccaccugucccuccugggcugcuggauugucucguuuuccugccaaauaaacaggaucagcgcuuuacagaucuaaaaaaaaaaaaaaaaaaaaaaaaaaaaaaaaaaaaaaaaaaaaaaaaaaaaaaaaaaaaaaaaugcaucccccccccccccccccccccccccccccccaaaggcucuuuucagagccaccagaauu

SEQ ID NO: 10730 - RNA, 1034 nt, Artificial Sequence
  mRNA product Design c-1 comprising derived and/or modified sequence from HRSV(A2)__P03421.1__P (opt4)
gggagaguccgcucagccagguugcagaagcggcuuagcguguguccuaaucuucucucugcguguagguaggccugugccgcaaacaagcuuaccauggagaaguucgcccccgaguuccacggcgaggacgccaacaacagagccaccaaguuccuggagagcaucaagggcaaguucaccagccccaaggaccccaagaagaaggacagcaucaucagcgugaacagcaucgacaucgaggugaccaaggagagccccaucaccagcaacagcaccaucaucaaccccaccaacgagaccgacgacaccgccggcaacaagcccaacuaccagagaaagccccuggugagcuucaaggaggaccccacccccagcgacaaccccuucagcaagcuguacaaggagaccaucgagaccuucgacaacaacgaggaggagagcagcuacagcuacgaggagaucaacgaccagaccaacgacaacaucaccgccagacuggacagaaucgacgagaagcugagcgagauccugggcaugcugcacacccuggugguggccagcgccggccccaccagcgccagagacggcaucagagacgccaugaucggccugagagaggagaugaucgagaagaucagaaccgaggcccugaugaccaacgacagacuggaggccauggccagacugagaaacgaggagagcgagaagauggccaaggacaccagcgacgaggugagccugaaccccaccagcgagaagcugaacaaccugcuggagggcaacgacagcgacaacgaccugagccuggaggacuucugaggacuaguguccaccugucccuccugggcugcuggauugucucguuuuccugccaaauaaacaggaucagcgcuuuacagaucuaaaaaaaaaaaaaaaaaaaaaaaaaaaaaaaaaaaaaaaaaaaaaaaaaaaaaaaaaaaaaaaaugcaucccccccccccccccccccccccccccccccaaaggcucuuuucagagccaccagaauu

SEQ ID NO: 10731 - RNA, 1034 nt, Artificial Sequence
  mRNA product Design c-1 comprising derived and/or modified sequence from HRSV(A2)__P03421.1__P (opt5)
gggagaguccgcucagccagguugcagaagcggcuuagcguguguccuaaucuucucucugcguguagguaggccugugccgcaaacaagcuuaccauggagaaguucgcccccgaauuucacggcgaggacgcuaacaauagagccaccaaauuccuggaaagcaucaaggggaaauuuacauccccuaaggauccgaaaaagaaggacucuauuaucagcgugaacuccauugauaucgaggucacgaaagaaucucccauuaccagcaauuccacaaucaucaacccuaccaaugagacagacgauaccgcgggaaacaagcccaauuaccagcggaaaccucucguuucuuucaaggaggaccccacaccuagcgauaacccguuuuccaaacuguauaaggaaaccauugagacguucgacaauaacgaagaggagagcucuuacuccuaugaagagaucaaugaucaaaccaacgacaauauuacagcucgccuugauagaaucgacgaaaagcugagcgagauucucggcaugcugcauacccuugugguggccucugccgggcccacauccgcucgggauggaauccgcgacgccaugauuggccugagagaagagaugaucgagaaaauccggaccgaagcucucaugacgaacgaccgccuggaggccauggcgagacugcggaaugaagagagcgaaaagauggccaaagauacaucugacgaggucucccucaacccuaccagcgagaagcugaacaaucuucuggaagggaacgauuccgacaaugaucucucucuggaggacuuuugaggacuaguguccaccugucccuccugggcugcuggauugucucguuuuccugccaaauaaacaggaucagcgcuuuacagaucuaaaaaaaaaaaaaaaaaaaaaaaaaaaaaaaaaaaaaaaaaaaaaaaaaaaaaaaaaaaaaaaaugcaucccccccccccccccccccccccccccccccaaaggcucuuuucagagccaccagaauu

SEQ ID NO: 10732 - RNA, 1034 nt, Artificial Sequence
  mRNA product Design c-1 comprising derived and/or modified sequence from HRSV(A2)__P03421.1__P (opt6)
gggagaguccgcucagccagguugcagaagcggcuuagcguguguccuaaucuucucucugcguguagguaggccugugccgcaaacaagcuuaccauggaaaaauucgcaccagaauuucacggagaagacgcaaacaacagagcaacaaaauucuuagaaucaaucaaaggaaaauucacaagcccaaaagacccaaaaaaaaaagacucaauaauaagcguaaacucaauagacauagaaguaacaaaagaaagcccaauaacaagcaacagcacaauaauaaacccaacaaacgaaacagaugacacagcuggaaauaaaccaaacuaccaaagaaaaccccuagucagcuucaaagaagaccccacaccaucagacaacccauucagcaaacuauauaaagaaacaauagaaacauuugacaacaacgaagaagaaucaucauacucauacgaagaaauaaacgaccaaacaaacgacaacauaaccgcaagauuagacagaauagaugaaaaacuaucagaaauacuaggaaugcuacacacauuaguaguagcaagcgcaggaccaacaucagcaagagacggaauaagagacgcaaugauaggacucagagaagaaaugauagaaaaaauaagaacagaagcacuaaugacaaacgacagauuagaagcaauggcaagacuaagaaaugaagaaucggaaaaaauggcaaaagacacaucagacgaaguaagccuaaacccaacaucagaaaaauuaaauaaccuacuagaaggaaacgacagcgacaacgacuuaucacuagaagacuucuaaggacuaguguccaccugucccuccugggcugcuggauugucucguuuuccugccaaauaaacaggaucagcgcuuuacagaucuaaaaaaaaaaaaaaaaaaaaaaaaaaaaaaaaaaaaaaaaaaaaaaaaaaaaaaaaaaaaaaaaugcaucccccccccccccccccccccccccccccccaaaggcucuuuucagagccaccagaauu

SEQ ID NO: 10733 - RNA, 1034 nt, Artificial Sequence
  mRNA product Design c-1 comprising derived and/or modified sequence from HRSV(A2)__P03421.1__P (opt11)
gggagaguccgcucagccagguugcagaagcggcuuagcguguguccuaaucuucucucugcguguagguaggccugugccgcaaacaagcuuaccauggaaaaauucgcgcccgaguuccacggcgaggacgcgaacaaccgcgcgacaaaguuccuagaaucaaucaagggcaaauucacgagcccgaaagaccccaagaaaaaggacucaaucauaagcgugaacucgaucgacaucgaggucacgaaagagagcccgaucacaagcaacagcaccauaauaaacccgaccaacgaaacagacgacaccgcgggcaacaaaccgaacuaccaaagaaaaccgcucgugagcuucaaagaagacccgaccccaagcgacaacccguucucaaaacuauacaaggaaacgaucgagaccuucgacaacaacgaggaagagagcucguacucguacgaggaaauaaacgaccaaacaaacgacaacauaaccgcacgccuagacaggaucgacgaaaaacucucggaaauacucgggaugcuacacacgcucguggucgcgagcgcaggcccgaccucggccagggacggcaucagggacgcaaugauaggccugcgagaggaaaugaucgagaaaauacgcaccgaagcacucaugaccaacgacagacucgaagccauggccaggcucaggaacgaagaauccgaaaagauggcgaaagacaccucggacgaggucucgcucaaccccacgagcgagaaacugaacaaccuacuggaagggaacgacagcgacaacgaccuuucccucgaggacuucugaggacuaguguccaccugucccuccugggcugcuggauugucucguuuuccugccaaauaaacaggaucagcgcuuuacagaucuaaaaaaaaaaaaaaaaaaaaaaaaaaaaaaaaaaaaaaaaaaaaaaaaaaaaaaaaaaaaaaaaugcaucccccccccccccccccccccccccccccccaaaggcucuuuucagagccaccagaauu

SEQ ID NO: 10734 - RNA, 1124 nt, Artificial Sequence
  mRNA product Design c-2 comprising derived and/or modified sequence from HRSV(A2)__P03421.1__P (wt)
gggagacuccugucgggcggaaguaggaggaguagaguuuaaaaacaguacucuuuuuccgguucgggacguaguugaagcaacgacaagccggauaaccgcucuugagacaggaagcuuaccauggaaaaguuugcuccugaauuccauggagaagaugcaaacaacagggcuacuaaauuccuagaaucaauaaagggcaaauucacaucacccaaagaucccaagaaaaaagauaguaucauaucugucaacucaauagauauagaaguaaccaaagaaagcccuauaacaucaaauucaacuauuaucaacccaacaaaugagacagaugauacugcagggaacaagcccaauuaucaaagaaaaccucuaguaaguuucaaagaagacccuacaccaagugauaaucccuuuucuaaacuauacaaagaaaccauagaaacauuugauaacaaugaagaagaauccagcuauucauacgaagaaauaaaugaucagacaaacgauaauauaacagcaagauuagauaggauugaugaaaaauuaagugaaauacuaggaaugcuucacacauuaguaguggcaagugcaggaccuacaucugcucgggaugguauaagagaugccaugauugguuuaagagaagaaaugauagaaaaaaucagaacugaagcauuaaugaccaaugacagauuagaagcuauggcaagacucaggaaugaggaaagugaaaagauggcaaaagacacaucagaugaagugucucucaauccaacaucagagaaauugaacaaccuauuggaagggaaugauagugacaaugaucuaucacuugaagauuucugaggacuaguggaagcauuuuccuggcugauuaaaagaaauuacucagcuauggucaucuguuccuguuagaaggcuaugcagcauauuauauacuaugcgcauguuaugaaaugcauaauaaaaaauuuuaaaaaaucuaaaagaucuaaaaaaaaaaaaaaaaaaaaaaaaaaaaaaaaaaaaaaaaaaaaaaaaaaaaaaaaaaaaaaaaugcaucccccccccccccccccccccccccccccccaaaggcucuuuucagagccaccagaauu

SEQ ID NO: 10735 - RNA, 1124 nt, Artificial Sequence
  mRNA product Design c-2 comprising derived and/or modified sequence from HRSV(A2)__P03421.1__P (opt1)
gggagacuccugucgggcggaaguaggaggaguagaguuuaaaaacaguacucuuuuuccgguucgggacguaguugaagcaacgacaagccggauaaccgcucuugagacaggaagcuuaccauggagaaguucgcccccgaguuccacggcgaggacgccaacaaccgcgcgaccaaguuccuggagagcaucaaggggaaguucaccuccccgaaggaccccaagaagaaggacagcaucaucuccgugaacagcaucgacaucgaggucacgaaggagucccccaucaccagcaacuccaccaucaucaaccccaccaacgagacggacgacaccgccggcaacaagccgaacuaccagcggaagccccucgugagcuucaaggaggaccccacccccuccgacaacccguucagcaagcuguacaaggagaccaucgagacguucgacaacaacgaggaggaguccagcuacuccuacgaggagaucaacgaccagaccaacgacaacaucaccgcccgccuggaccggaucgacgagaagcucagcgagauccuggggaugcugcacacccucguggucgccuccgccggccccacgagcgcgcgcgacgggauccgggacgccaugaucggccugcgcgaggagaugaucgagaagauccggaccgaggcccugaugaccaacgaccgccucgaggccauggcgcggcugcgcaacgaggaguccgagaagauggccaaggacaccagcgacgaggugucccugaaccccacgagcgagaagcucaacaaccugcuggagggcaacgacagcgacaacgaccucucccuggaggacuucugaggacuaguggaagcauuuuccuggcugauuaaaagaaauuacucagcuauggucaucuguuccuguuagaaggcuaugcagcauauuauauacuaugcgcauguuaugaaaugcauaauaaaaaauuuuaaaaaaucuaaaagaucuaaaaaaaaaaaaaaaaaaaaaaaaaaaaaaaaaaaaaaaaaaaaaaaaaaaaaaaaaaaaaaaaugcaucccccccccccccccccccccccccccccccaaaggcucuuuucagagccaccagaauu

SEQ ID NO: 10736 - RNA, 1124 nt, Artificial Sequence
  mRNA product Design c-2 comprising derived and/or modified sequence from HRSV(A2)__P03421.1__P (opt2)
gggagacuccugucgggcggaaguaggaggaguagaguuuaaaaacaguacucuuuuuccgguucgggacguaguugaagcaacgacaagccggauaaccgcucuugagacaggaagcuuaccauggagaaguucgcccccgaguuccacggcgaggacgccaacaaccgcgccaccaaguuccucgaguccaucaagggcaaguucaccucccccaaggaccccaagaagaaggacuccaucaucuccgucaacuccaucgacaucgaggucaccaaggagucccccaucaccuccaacuccaccaucaucaaccccaccaacgagaccgacgacaccgccggcaacaagcccaacuaccagcgcaagccccucgucuccuucaaggaggaccccacccccuccgacaaccccuucuccaagcucuacaaggagaccaucgagaccuucgacaacaacgaggaggaguccuccuacuccuacgaggagaucaacgaccagaccaacgacaacaucaccgcccgccucgaccgcaucgacgagaagcucuccgagauccucggcaugcuccacacccucgucgucgccuccgccggccccaccuccgcccgcgacggcauccgcgacgccaugaucggccuccgcgaggagaugaucgagaagauccgcaccgaggcccucaugaccaacgaccgccucgaggccauggcccgccuccgcaacgaggaguccgagaagauggccaaggacaccuccgacgaggucucccucaaccccaccuccgagaagcucaacaaccuccucgagggcaacgacuccgacaacgaccucucccucgaggacuucugaggacuaguggaagcauuuuccuggcugauuaaaagaaauuacucagcuauggucaucuguuccuguuagaaggcuaugcagcauauuauauacuaugcgcauguuaugaaaugcauaauaaaaaauuuuaaaaaaucuaaaagaucuaaaaaaaaaaaaaaaaaaaaaaaaaaaaaaaaaaaaaaaaaaaaaaaaaaaaaaaaaaaaaaaaugcaucccccccccccccccccccccccccccccccaaaggcucuuuucagagccaccagaauu

SEQ ID NO: 10737 - RNA, 1124 nt, Artificial Sequence
  mRNA product Design c-2 comprising derived and/or modified sequence from HRSV(A2)__P03421.1__P (opt3)
gggagacuccugucgggcggaaguaggaggaguagaguuuaaaaacaguacucuuuuuccgguucgggacguaguugaagcaacgacaagccggauaaccgcucuugagacaggaagcuuaccauggagaaguucgcccccgaauuucacggcgaggacgcuaacaauagagcaaccaaauuccuggaaagcaucaaggggaaauuuacauccccuaaggauccgaaaaagaaggacucuauuauaucagugaacaguaucgauauugaggucacuaaagaaagcccaaucacguccaauucuaccauuaucaaccccacaaaugagacugacgauaccgccggaaacaagccuaauuaccagaggaaaccacucguuucguucaaggaggaccccacaccuucagauaacccauuuagcaaacuuuauaaggaaaccauagagacuuucgacaauaacgaagaggagaguuccuacucuuaugaagagaucaaugaucaaacaaacgacaauauuaccgcgcggcuggaucgcaucgacgaaaaguugagcgagauuuuagguaugcugcauacgcuagugguagcuuccgccggccccacuucagcacgagaugggauccgugacgccaugauaggacucagagaagagaugauugagaaaaucaggaccgaagcucugaugacaaacgaccggcuugaggcaauggcccgccugagaaaugaagagagugaaaagauggcuaaagauacuagcgacgaggugucuuugaacccuaccuccgagaagcucaacaaucugcuggaaggcaacgauucagacaaugaucucagcuuagaggacuuuugaggacuaguggaagcauuuuccuggcugauuaaaagaaauuacucagcuauggucaucuguuccuguuagaaggcuaugcagcauauuauauacuaugcgcauguuaugaaaugcauaauaaaaaauuuuaaaaaaucuaaaagaucuaaaaaaaaaaaaaaaaaaaaaaaaaaaaaaaaaaaaaaaaaaaaaaaaaaaaaaaaaaaaaaaaugcaucccccccccccccccccccccccccccccccaaaggcucuuuucagagccaccagaauu

SEQ ID NO: 10738 - RNA, 1124 nt, Artificial Sequence
  mRNA product Design c-2 comprising derived and/or modified sequence from HRSV(A2)__P03421.1__P (opt4)
gggagacuccugucgggcggaaguaggaggaguagaguuuaaaaacaguacucuuuuuccgguucgggacguaguugaagcaacgacaagccggauaaccgcucuugagacaggaagcuuaccauggagaaguucgcccccgaguuccacggcgaggacgccaacaacagagccaccaaguuccuggagagcaucaagggcaaguucaccagccccaaggaccccaagaagaaggacagcaucaucagcgugaacagcaucgacaucgaggugaccaaggagagccccaucaccagcaacagcaccaucaucaaccccaccaacgagaccgacgacaccgccggcaacaagcccaacuaccagagaaagccccuggugagcuucaaggaggaccccacccccagcgacaaccccuucagcaagcuguacaaggagaccaucgagaccuucgacaacaacgaggaggagagcagcuacagcuacgaggagaucaacgaccagaccaacgacaacaucaccgccagacuggacagaaucgacgagaagcugagcgagauccugggcaugcugcacacccuggugguggccagcgccggccccaccagcgccagagacggcaucagagacgccaugaucggccugagagaggagaugaucgagaagaucagaaccgaggcccugaugaccaacgacagacuggaggccauggccagacugagaaacgaggagagcgagaagauggccaaggacaccagcgacgaggugagccugaaccccaccagcgagaagcugaacaaccugcuggagggcaacgacagcgacaacgaccugagccuggaggacuucugaggacuaguggaagcauuuuccuggcugauuaaaagaaauuacucagcuauggucaucuguuccuguuagaaggcuaugcagcauauuauauacuaugcgcauguuaugaaaugcauaauaaaaaauuuuaaaaaaucuaaaagaucuaaaaaaaaaaaaaaaaaaaaaaaaaaaaaaaaaaaaaaaaaaaaaaaaaaaaaaaaaaaaaaaaugcaucccccccccccccccccccccccccccccccaaaggcucuuuucagagccaccagaauu

SEQ ID NO: 10739 - RNA, 1124 nt, Artificial Sequence
  mRNA product Design c-2 comprising derived and/or modified sequence from HRSV(A2)__P03421.1__P (opt5)
gggagacuccugucgggcggaaguaggaggaguagaguuuaaaaacaguacucuuuuuccgguucgggacguaguugaagcaacgacaagccggauaaccgcucuugagacaggaagcuuaccauggagaaguucgcccccgaauuucacggcgaggacgcuaacaauagagccaccaaauuccuggaaagcaucaaggggaaauuuacauccccuaaggauccgaaaaagaaggacucuauuaucagcgugaacuccauugauaucgaggucacgaaagaaucucccauuaccagcaauuccacaaucaucaacccuaccaaugagacagacgauaccgcgggaaacaagcccaauuaccagcggaaaccucucguuucuuucaaggaggaccccacaccuagcgauaacccguuuuccaaacuguauaaggaaaccauugagacguucgacaauaacgaagaggagagcucuuacuccuaugaagagaucaaugaucaaaccaacgacaauauuacagcucgccuugauagaaucgacgaaaagcugagcgagauucucggcaugcugcauacccuugugguggccucugccgggcccacauccgcucgggauggaauccgcgacgccaugauuggccugagagaagagaugaucgagaaaauccggaccgaagcucucaugacgaacgaccgccuggaggccauggcgagacugcggaaugaagagagcgaaaagauggccaaagauacaucugacgaggucucccucaacccuaccagcgagaagcugaacaaucuucuggaagggaacgauuccgacaaugaucucucucuggaggacuuuugaggacuaguggaagcauuuuccuggcugauuaaaagaaauuacucagcuauggucaucuguuccuguuagaaggcuaugcagcauauuauauacuaugcgcauguuaugaaaugcauaauaaaaaauuuuaaaaaaucuaaaagaucuaaaaaaaaaaaaaaaaaaaaaaaaaaaaaaaaaaaaaaaaaaaaaaaaaaaaaaaaaaaaaaaaugcaucccccccccccccccccccccccccccccccaaaggcucuuuucagagccaccagaauu

SEQ ID NO: 10740 - RNA, 1124 nt, Artificial Sequence
  mRNA product Design c-2 comprising derived and/or modified sequence from HRSV(A2)__P03421.1__P (opt6)
gggagacuccugucgggcggaaguaggaggaguagaguuuaaaaacaguacucuuuuuccgguucgggacguaguugaagcaacgacaagccggauaaccgcucuugagacaggaagcuuaccauggaaaaauucgcaccagaauuucacggagaagacgcaaacaacagagcaacaaaauucuuagaaucaaucaaaggaaaauucacaagcccaaaagacccaaaaaaaaaagacucaauaauaagcguaaacucaauagacauagaaguaacaaaagaaagcccaauaacaagcaacagcacaauaauaaacccaacaaacgaaacagaugacacagcuggaaauaaaccaaacuaccaaagaaaaccccuagucagcuucaaagaagaccccacaccaucagacaacccauucagcaaacuauauaaagaaacaauagaaacauuugacaacaacgaagaagaaucaucauacucauacgaagaaauaaacgaccaaacaaacgacaacauaaccgcaagauuagacagaauagaugaaaaacuaucagaaauacuaggaaugcuacacacauuaguaguagcaagcgcaggaccaacaucagcaagagacggaauaagagacgcaaugauaggacucagagaagaaaugauagaaaaaauaagaacagaagcacuaaugacaaacgacagauuagaagcaauggcaagacuaagaaaugaagaaucggaaaaaauggcaaaagacacaucagacgaaguaagccuaaacccaacaucagaaaaauuaaauaaccuacuagaaggaaacgacagcgacaacgacuuaucacuagaagacuucuaaggacuaguggaagcauuuuccuggcugauuaaaagaaauuacucagcuauggucaucuguuccuguuagaaggcuaugcagcauauuauauacuaugcgcauguuaugaaaugcauaauaaaaaauuuuaaaaaaucuaaaagaucuaaaaaaaaaaaaaaaaaaaaaaaaaaaaaaaaaaaaaaaaaaaaaaaaaaaaaaaaaaaaaaaaugcaucccccccccccccccccccccccccccccccaaaggcucuuuucagagccaccagaauu

SEQ ID NO: 10741 - RNA, 1124 nt, Artificial Sequence
  mRNA product Design c-2 comprising derived and/or modified sequence from HRSV(A2)__P03421.1__P (opt11)
gggagacuccugucgggcggaaguaggaggaguagaguuuaaaaacaguacucuuuuuccgguucgggacguaguugaagcaacgacaagccggauaaccgcucuugagacaggaagcuuaccauggaaaaauucgcgcccgaguuccacggcgaggacgcgaacaaccgcgcgacaaaguuccuagaaucaaucaagggcaaauucacgagcccgaaagaccccaagaaaaaggacucaaucauaagcgugaacucgaucgacaucgaggucacgaaagagagcccgaucacaagcaacagcaccauaauaaacccgaccaacgaaacagacgacaccgcgggcaacaaaccgaacuaccaaagaaaaccgcucgugagcuucaaagaagacccgaccccaagcgacaacccguucucaaaacuauacaaggaaacgaucgagaccuucgacaacaacgaggaagagagcucguacucguacgaggaaauaaacgaccaaacaaacgacaacauaaccgcacgccuagacaggaucgacgaaaaacucucggaaauacucgggaugcuacacacgcucguggucgcgagcgcaggcccgaccucggccagggacggcaucagggacgcaaugauaggccugcgagaggaaaugaucgagaaaauacgcaccgaagcacucaugaccaacgacagacucgaagccauggccaggcucaggaacgaagaauccgaaaagauggcgaaagacaccucggacgaggucucgcucaaccccacgagcgagaaacugaacaaccuacuggaagggaacgacagcgacaacgaccuuucccucgaggacuucugaggacuaguggaagcauuuuccuggcugauuaaaagaaauuacucagcuauggucaucuguuccuguuagaaggcuaugcagcauauuauauacuaugcgcauguuaugaaaugcauaauaaaaaauuuuaaaaaaucuaaaagaucuaaaaaaaaaaaaaaaaaaaaaaaaaaaaaaaaaaaaaaaaaaaaaaaaaaaaaaaaaaaaaaaaugcaucccccccccccccccccccccccccccccccaaaggcucuuuucagagccaccagaauu

SEQ ID NO: 10742 - RNA, 1101 nt, Artificial Sequence
  mRNA product Design c-3 comprising derived and/or modified sequence from HRSV(A2)__P03421.1__P (wt)
gggagaguccgcucagccagguugcagaagcggcuuagcguguguccuaaucuucucucugcguguagguaggccugugccgcaaacaagcuuaccauggaaaaguuugcuccugaauuccauggagaagaugcaaacaacagggcuacuaaauuccuagaaucaauaaagggcaaauucacaucacccaaagaucccaagaaaaaagauaguaucauaucugucaacucaauagauauagaaguaaccaaagaaagcccuauaacaucaaauucaacuauuaucaacccaacaaaugagacagaugauacugcagggaacaagcccaauuaucaaagaaaaccucuaguaaguuucaaagaagacccuacaccaagugauaaucccuuuucuaaacuauacaaagaaaccauagaaacauuugauaacaaugaagaagaauccagcuauucauacgaagaaauaaaugaucagacaaacgauaauauaacagcaagauuagauaggauugaugaaaaauuaagugaaauacuaggaaugcuucacacauuaguaguggcaagugcaggaccuacaucugcucgggaugguauaagagaugccaugauugguuuaagagaagaaaugauagaaaaaaucagaacugaagcauuaaugaccaaugacagauuagaagcuauggcaagacucaggaaugaggaaagugaaaagauggcaaaagacacaucagaugaagugucucucaauccaacaucagagaaauugaacaaccuauuggaagggaaugauagugacaaugaucuaucacuugaagauuucugaggacuaguacuggcugcaucucccuuuccucuguccuccauccuucucccaggauggugaagggggaccugguacccagugauccccaccccaggauccuaaaucaugacuuaccugcuaauaaaaacucauuggaaaagugagaagaucuaaaaaaaaaaaaaaaaaaaaaaaaaaaaaaaaaaaaaaaaaaaaaaaaaaaaaaaaaaaaaaaaugcaucccccccccccccccccccccccccccccccaaaggcucuuuucagagccaccagaauu

SEQ ID NO: 10743 - RNA, 1101 nt, Artificial Sequence
  mRNA product Design c-3 comprising derived and/or modified sequence from HRSV(A2)__P03421.1__P (opt1)
gggagaguccgcucagccagguugcagaagcggcuuagcguguguccuaaucuucucucugcguguagguaggccugugccgcaaacaagcuuaccauggagaaguucgcccccgaguuccacggcgaggacgccaacaaccgcgcgaccaaguuccuggagagcaucaaggggaaguucaccuccccgaaggaccccaagaagaaggacagcaucaucuccgugaacagcaucgacaucgaggucacgaaggagucccccaucaccagcaacuccaccaucaucaaccccaccaacgagacggacgacaccgccggcaacaagccgaacuaccagcggaagccccucgugagcuucaaggaggaccccacccccuccgacaacccguucagcaagcuguacaaggagaccaucgagacguucgacaacaacgaggaggaguccagcuacuccuacgaggagaucaacgaccagaccaacgacaacaucaccgcccgccuggaccggaucgacgagaagcucagcgagauccuggggaugcugcacacccucguggucgccuccgccggccccacgagcgcgcgcgacgggauccgggacgccaugaucggccugcgcgaggagaugaucgagaagauccggaccgaggcccugaugaccaacgaccgccucgaggccauggcgcggcugcgcaacgaggaguccgagaagauggccaaggacaccagcgacgaggugucccugaaccccacgagcgagaagcucaacaaccugcuggagggcaacgacagcgacaacgaccucucccuggaggacuucugaggacuaguacuggcugcaucucccuuuccucuguccuccauccuucucccaggauggugaagggggaccugguacccagugauccccaccccaggauccuaaaucaugacuuaccugcuaauaaaaacucauuggaaaagugagaagaucuaaaaaaaaaaaaaaaaaaaaaaaaaaaaaaaaaaaaaaaaaaaaaaaaaaaaaaaaaaaaaaaaugcaucccccccccccccccccccccccccccccccaaaggcucuuuucagagccaccagaauu

SEQ ID NO: 10744 - RNA, 1101 nt, Artificial Sequence
  mRNA product Design c-3 comprising derived and/or modified sequence from HRSV(A2)__P03421.1__P (opt2)
gggagaguccgcucagccagguugcagaagcggcuuagcguguguccuaaucuucucucugcguguagguaggccugugccgcaaacaagcuuaccauggagaaguucgcccccgaguuccacggcgaggacgccaacaaccgcgccaccaaguuccucgaguccaucaagggcaaguucaccucccccaaggaccccaagaagaaggacuccaucaucuccgucaacuccaucgacaucgaggucaccaaggagucccccaucaccuccaacuccaccaucaucaaccccaccaacgagaccgacgacaccgccggcaacaagcccaacuaccagcgcaagccccucgucuccuucaaggaggaccccacccccuccgacaaccccuucuccaagcucuacaaggagaccaucgagaccuucgacaacaacgaggaggaguccuccuacuccuacgaggagaucaacgaccagaccaacgacaacaucaccgcccgccucgaccgcaucgacgagaagcucuccgagauccucggcaugcuccacacccucgucgucgccuccgccggccccaccuccgcccgcgacggcauccgcgacgccaugaucggccuccgcgaggagaugaucgagaagauccgcaccgaggcccucaugaccaacgaccgccucgaggccauggcccgccuccgcaacgaggaguccgagaagauggccaaggacaccuccgacgaggucucccucaaccccaccuccgagaagcucaacaaccuccucgagggcaacgacuccgacaacgaccucucccucgaggacuucugaggacuaguacuggcugcaucucccuuuccucuguccuccauccuucucccaggauggugaagggggaccugguacccagugauccccaccccaggauccuaaaucaugacuuaccugcuaauaaaaacucauuggaaaagugagaagaucuaaaaaaaaaaaaaaaaaaaaaaaaaaaaaaaaaaaaaaaaaaaaaaaaaaaaaaaaaaaaaaaaugcaucccccccccccccccccccccccccccccccaaaggcucuuuucagagccaccagaauu

SEQ ID NO: 10745 - RNA, 1101 nt, Artificial Sequence
  mRNA product Design c-3 comprising derived and/or modified sequence from HRSV(A2)__P03421.1__P (opt3)
gggagaguccgcucagccagguugcagaagcggcuuagcguguguccuaaucuucucucugcguguagguaggccugugccgcaaacaagcuuaccauggagaaguucgcccccgaauuucacggcgaggacgcuaacaauagagcaaccaaauuccuggaaagcaucaaggggaaauuuacauccccuaaggauccgaaaaagaaggacucuauuauaucagugaacaguaucgauauugaggucacuaaagaaagcccaaucacguccaauucuaccauuaucaaccccacaaaugagacugacgauaccgccggaaacaagccuaauuaccagaggaaaccacucguuucguucaaggaggaccccacaccuucagauaacccauuuagcaaacuuuauaaggaaaccauagagacuuucgacaauaacgaagaggagaguuccuacucuuaugaagagaucaaugaucaaacaaacgacaauauuaccgcgcggcuggaucgcaucgacgaaaaguugagcgagauuuuagguaugcugcauacgcuagugguagcuuccgccggccccacuucagcacgagaugggauccgugacgccaugauaggacucagagaagagaugauugagaaaaucaggaccgaagcucugaugacaaacgaccggcuugaggcaauggcccgccugagaaaugaagagagugaaaagauggcuaaagauacuagcgacgaggugucuuugaacccuaccuccgagaagcucaacaaucugcuggaaggcaacgauucagacaaugaucucagcuuagaggacuuuugaggacuaguacuggcugcaucucccuuuccucuguccuccauccuucucccaggauggugaagggggaccugguacccagugauccccaccccaggauccuaaaucaugacuuaccugcuaauaaaaacucauuggaaaagugagaagaucuaaaaaaaaaaaaaaaaaaaaaaaaaaaaaaaaaaaaaaaaaaaaaaaaaaaaaaaaaaaaaaaaugcaucccccccccccccccccccccccccccccccaaaggcucuuuucagagccaccagaauu

SEQ ID NO: 10746 - RNA, 1101 nt, Artificial Sequence
  mRNA product Design c-3 comprising derived and/or modified sequence from HRSV(A2)__P03421.1__P (opt4)
gggagaguccgcucagccagguugcagaagcggcuuagcguguguccuaaucuucucucugcguguagguaggccugugccgcaaacaagcuuaccauggagaaguucgcccccgaguuccacggcgaggacgccaacaacagagccaccaaguuccuggagagcaucaagggcaaguucaccagccccaaggaccccaagaagaaggacagcaucaucagcgugaacagcaucgacaucgaggugaccaaggagagccccaucaccagcaacagcaccaucaucaaccccaccaacgagaccgacgacaccgccggcaacaagcccaacuaccagagaaagccccuggugagcuucaaggaggaccccacccccagcgacaaccccuucagcaagcuguacaaggagaccaucgagaccuucgacaacaacgaggaggagagcagcuacagcuacgaggagaucaacgaccagaccaacgacaacaucaccgccagacuggacagaaucgacgagaagcugagcgagauccugggcaugcugcacacccuggugguggccagcgccggccccaccagcgccagagacggcaucagagacgccaugaucggccugagagaggagaugaucgagaagaucagaaccgaggcccugaugaccaacgacagacuggaggccauggccagacugagaaacgaggagagcgagaagauggccaaggacaccagcgacgaggugagccugaaccccaccagcgagaagcugaacaaccugcuggagggcaacgacagcgacaacgaccugagccuggaggacuucugaggacuaguacuggcugcaucucccuuuccucuguccuccauccuucucccaggauggugaagggggaccugguacccagugauccccaccccaggauccuaaaucaugacuuaccugcuaauaaaaacucauuggaaaagugagaagaucuaaaaaaaaaaaaaaaaaaaaaaaaaaaaaaaaaaaaaaaaaaaaaaaaaaaaaaaaaaaaaaaaugcaucccccccccccccccccccccccccccccccaaaggcucuuuucagagccaccagaauu

SEQ ID NO: 10747 - RNA, 1101 nt, Artificial Sequence
  mRNA product Design c-3 comprising derived and/or modified sequence from HRSV(A2)__P03421.1__P (opt5)
gggagaguccgcucagccagguugcagaagcggcuuagcguguguccuaaucuucucucugcguguagguaggccugugccgcaaacaagcuuaccauggagaaguucgcccccgaauuucacggcgaggacgcuaacaauagagccaccaaauuccuggaaagcaucaaggggaaauuuacauccccuaaggauccgaaaaagaaggacucuauuaucagcgugaacuccauugauaucgaggucacgaaagaaucucccauuaccagcaauuccacaaucaucaacccuaccaaugagacagacgauaccgcgggaaacaagcccaauuaccagcggaaaccucucguuucuuucaaggaggaccccacaccuagcgauaacccguuuuccaaacuguauaaggaaaccauugagacguucgacaauaacgaagaggagagcucuuacuccuaugaagagaucaaugaucaaaccaacgacaauauuacagcucgccuugauagaaucgacgaaaagcugagcgagauucucggcaugcugcauacccuugugguggccucugccgggcccacauccgcucgggauggaauccgcgacgccaugauuggccugagagaagagaugaucgagaaaauccggaccgaagcucucaugacgaacgaccgccuggaggccauggcgagacugcggaaugaagagagcgaaaagauggccaaagauacaucugacgaggucucccucaacccuaccagcgagaagcugaacaaucuucuggaagggaacgauuccgacaaugaucucucucuggaggacuuuugaggacuaguacuggcugcaucucccuuuccucuguccuccauccuucucccaggauggugaagggggaccugguacccagugauccccaccccaggauccuaaaucaugacuuaccugcuaauaaaaacucauuggaaaagugagaagaucuaaaaaaaaaaaaaaaaaaaaaaaaaaaaaaaaaaaaaaaaaaaaaaaaaaaaaaaaaaaaaaaaugcaucccccccccccccccccccccccccccccccaaaggcucuuuucagagccaccagaauu

SEQ ID NO: 10748 - RNA, 1101 nt, Artificial Sequence
  mRNA product Design c-3 comprising derived and/or modified sequence from HRSV(A2)__P03421.1__P (opt6)
gggagaguccgcucagccagguugcagaagcggcuuagcguguguccuaaucuucucucugcguguagguaggccugugccgcaaacaagcuuaccauggaaaaauucgcaccagaauuucacggagaagacgcaaacaacagagcaacaaaauucuuagaaucaaucaaaggaaaauucacaagcccaaaagacccaaaaaaaaaagacucaauaauaagcguaaacucaauagacauagaaguaacaaaagaaagcccaauaacaagcaacagcacaauaauaaacccaacaaacgaaacagaugacacagcuggaaauaaaccaaacuaccaaagaaaaccccuagucagcuucaaagaagaccccacaccaucagacaacccauucagcaaacuauauaaagaaacaauagaaacauuugacaacaacgaagaagaaucaucauacucauacgaagaaauaaacgaccaaacaaacgacaacauaaccgcaagauuagacagaauagaugaaaaacuaucagaaauacuaggaaugcuacacacauuaguaguagcaagcgcaggaccaacaucagcaagagacggaauaagagacgcaaugauaggacucagagaagaaaugauagaaaaaauaagaacagaagcacuaaugacaaacgacagauuagaagcaauggcaagacuaagaaaugaagaaucggaaaaaauggcaaaagacacaucagacgaaguaagccuaaacccaacaucagaaaaauuaaauaaccuacuagaaggaaacgacagcgacaacgacuuaucacuagaagacuucuaaggacuaguacuggcugcaucucccuuuccucuguccuccauccuucucccaggauggugaagggggaccugguacccagugauccccaccccaggauccuaaaucaugacuuaccugcuaauaaaaacucauuggaaaagugagaagaucuaaaaaaaaaaaaaaaaaaaaaaaaaaaaaaaaaaaaaaaaaaaaaaaaaaaaaaaaaaaaaaaaugcaucccccccccccccccccccccccccccccccaaaggcucuuuucagagccaccagaauu

SEQ ID NO: 10749 - RNA, 1101 nt, Artificial Sequence
  mRNA product Design c-3 comprising derived and/or modified sequence from HRSV(A2)__P03421.1__P (opt11)
gggagaguccgcucagccagguugcagaagcggcuuagcguguguccuaaucuucucucugcguguagguaggccugugccgcaaacaagcuuaccauggaaaaauucgcgcccgaguuccacggcgaggacgcgaacaaccgcgcgacaaaguuccuagaaucaaucaagggcaaauucacgagcccgaaagaccccaagaaaaaggacucaaucauaagcgugaacucgaucgacaucgaggucacgaaagagagcccgaucacaagcaacagcaccauaauaaacccgaccaacgaaacagacgacaccgcgggcaacaaaccgaacuaccaaagaaaaccgcucgugagcuucaaagaagacccgaccccaagcgacaacccguucucaaaacuauacaaggaaacgaucgagaccuucgacaacaacgaggaagagagcucguacucguacgaggaaauaaacgaccaaacaaacgacaacauaaccgcacgccuagacaggaucgacgaaaaacucucggaaauacucgggaugcuacacacgcucguggucgcgagcgcaggcccgaccucggccagggacggcaucagggacgcaaugauaggccugcgagaggaaaugaucgagaaaauacgcaccgaagcacucaugaccaacgacagacucgaagccauggccaggcucaggaacgaagaauccgaaaagauggcgaaagacaccucggacgaggucucgcucaaccccacgagcgagaaacugaacaaccuacuggaagggaacgacagcgacaacgaccuuucccucgaggacuucugaggacuaguacuggcugcaucucccuuuccucuguccuccauccuucucccaggauggugaagggggaccugguacccagugauccccaccccaggauccuaaaucaugacuuaccugcuaauaaaaacucauuggaaaagugagaagaucuaaaaaaaaaaaaaaaaaaaaaaaaaaaaaaaaaaaaaaaaaaaaaaaaaaaaaaaaaaaaaaaaugcaucccccccccccccccccccccccccccccccaaaggcucuuuucagagccaccagaauu

SEQ ID NO: 10750 - RNA, 1097 nt, Artificial Sequence
  mRNA product Design c-4 comprising derived and/or modified sequence from HRSV(A2)__P03421.1__P (wt)
gggagaguccgcucagccagguugcagaagcggcuuagcguguguccuaaucuucucucugcguguagguaggccugugccgcaaacaagcuuaccauggaaaaguuugcuccugaauuccauggagaagaugcaaacaacagggcuacuaaauuccuagaaucaauaaagggcaaauucacaucacccaaagaucccaagaaaaaagauaguaucauaucugucaacucaauagauauagaaguaaccaaagaaagcccuauaacaucaaauucaacuauuaucaacccaacaaaugagacagaugauacugcagggaacaagcccaauuaucaaagaaaaccucuaguaaguuucaaagaagacccuacaccaagugauaaucccuuuucuaaacuauacaaagaaaccauagaaacauuugauaacaaugaagaagaauccagcuauucauacgaagaaauaaaugaucagacaaacgauaauauaacagcaagauuagauaggauugaugaaaaauuaagugaaauacuaggaaugcuucacacauuaguaguggcaagugcaggaccuacaucugcucgggaugguauaagagaugccaugauugguuuaagagaagaaaugauagaaaaaaucagaacugaagcauuaaugaccaaugacagauuagaagcuauggcaagacucaggaaugaggaaagugaaaagauggcaaaagacacaucagaugaagugucucucaauccaacaucagagaaauugaacaaccuauuggaagggaaugauagugacaaugaucuaucacuugaagauuucugaggacuaguggaagcauuuuccuggcugauuaaaagaaauuacucagcuauggucaucuguuccuguuagaaggcuaugcagcauauuauauacuaugcgcauguuaugaaaugcauaauaaaaaauuuuaaaaaaucuaaaagaucuaaaaaaaaaaaaaaaaaaaaaaaaaaaaaaaaaaaaaaaaaaaaaaaaaaaaaaaaaaaaaaaaugcaucccccccccccccccccccccccccccccccaaaggcucuuuucagagccaccagaauu

SEQ ID NO: 10751 - RNA, 1097 nt, Artificial Sequence
  mRNA product Design c-4 comprising derived and/or modified sequence from HRSV(A2)__P03421.1__P (opt1)
gggagaguccgcucagccagguugcagaagcggcuuagcguguguccuaaucuucucucugcguguagguaggccugugccgcaaacaagcuuaccauggagaaguucgcccccgaguuccacggcgaggacgccaacaaccgcgcgaccaaguuccuggagagcaucaaggggaaguucaccuccccgaaggaccccaagaagaaggacagcaucaucuccgugaacagcaucgacaucgaggucacgaaggagucccccaucaccagcaacuccaccaucaucaaccccaccaacgagacggacgacaccgccggcaacaagccgaacuaccagcggaagccccucgugagcuucaaggaggaccccacccccuccgacaacccguucagcaagcuguacaaggagaccaucgagacguucgacaacaacgaggaggaguccagcuacuccuacgaggagaucaacgaccagaccaacgacaacaucaccgcccgccuggaccggaucgacgagaagcucagcgagauccuggggaugcugcacacccucguggucgccuccgccggccccacgagcgcgcgcgacgggauccgggacgccaugaucggccugcgcgaggagaugaucgagaagauccggaccgaggcccugaugaccaacgaccgccucgaggccauggcgcggcugcgcaacgaggaguccgagaagauggccaaggacaccagcgacgaggugucccugaaccccacgagcgagaagcucaacaaccugcuggagggcaacgacagcgacaacgaccucucccuggaggacuucugaggacuaguggaagcauuuuccuggcugauuaaaagaaauuacucagcuauggucaucuguuccuguuagaaggcuaugcagcauauuauauacuaugcgcauguuaugaaaugcauaauaaaaaauuuuaaaaaaucuaaaagaucuaaaaaaaaaaaaaaaaaaaaaaaaaaaaaaaaaaaaaaaaaaaaaaaaaaaaaaaaaaaaaaaaugcaucccccccccccccccccccccccccccccccaaaggcucuuuucagagccaccagaauu

SEQ ID NO: 10752 - RNA, 1097 nt, Artificial Sequence
  mRNA product Design c-4 comprising derived and/or modified sequence from HRSV(A2)__P03421.1__P (opt2)
gggagaguccgcucagccagguugcagaagcggcuuagcguguguccuaaucuucucucugcguguagguaggccugugccgcaaacaagcuuaccauggagaaguucgcccccgaguuccacggcgaggacgccaacaaccgcgccaccaaguuccucgaguccaucaagggcaaguucaccucccccaaggaccccaagaagaaggacuccaucaucuccgucaacuccaucgacaucgaggucaccaaggagucccccaucaccuccaacuccaccaucaucaaccccaccaacgagaccgacgacaccgccggcaacaagcccaacuaccagcgcaagccccucgucuccuucaaggaggaccccacccccuccgacaaccccuucuccaagcucuacaaggagaccaucgagaccuucgacaacaacgaggaggaguccuccuacuccuacgaggagaucaacgaccagaccaacgacaacaucaccgcccgccucgaccgcaucgacgagaagcucuccgagauccucggcaugcuccacacccucgucgucgccuccgccggccccaccuccgcccgcgacggcauccgcgacgccaugaucggccuccgcgaggagaugaucgagaagauccgcaccgaggcccucaugaccaacgaccgccucgaggccauggcccgccuccgcaacgaggaguccgagaagauggccaaggacaccuccgacgaggucucccucaaccccaccuccgagaagcucaacaaccuccucgagggcaacgacuccgacaacgaccucucccucgaggacuucugaggacuaguggaagcauuuuccuggcugauuaaaagaaauuacucagcuauggucaucuguuccuguuagaaggcuaugcagcauauuauauacuaugcgcauguuaugaaaugcauaauaaaaaauuuuaaaaaaucuaaaagaucuaaaaaaaaaaaaaaaaaaaaaaaaaaaaaaaaaaaaaaaaaaaaaaaaaaaaaaaaaaaaaaaaugcaucccccccccccccccccccccccccccccccaaaggcucuuuucagagccaccagaauu

SEQ ID NO: 10753 - RNA, 1097 nt, Artificial Sequence
  mRNA product Design c-4 comprising derived and/or modified sequence from HRSV(A2)__P03421.1__P (opt3)
gggagaguccgcucagccagguugcagaagcggcuuagcguguguccuaaucuucucucugcguguagguaggccugugccgcaaacaagcuuaccauggagaaguucgcccccgaauuucacggcgaggacgcuaacaauagagcaaccaaauuccuggaaagcaucaaggggaaauuuacauccccuaaggauccgaaaaagaaggacucuauuauaucagugaacaguaucgauauugaggucacuaaagaaagcccaaucacguccaauucuaccauuaucaaccccacaaaugagacugacgauaccgccggaaacaagccuaauuaccagaggaaaccacucguuucguucaaggaggaccccacaccuucagauaacccauuuagcaaacuuuauaaggaaaccauagagacuuucgacaauaacgaagaggagaguuccuacucuuaugaagagaucaaugaucaaacaaacgacaauauuaccgcgcggcuggaucgcaucgacgaaaaguugagcgagauuuuagguaugcugcauacgcuagugguagcuuccgccggccccacuucagcacgagaugggauccgugacgccaugauaggacucagagaagagaugauugagaaaaucaggaccgaagcucugaugacaaacgaccggcuugaggcaauggcccgccugagaaaugaagagagugaaaagauggcuaaagauacuagcgacgaggugucuuugaacccuaccuccgagaagcucaacaaucugcuggaaggcaacgauucagacaaugaucucagcuuagaggacuuuugaggacuaguggaagcauuuuccuggcugauuaaaagaaauuacucagcuauggucaucuguuccuguuagaaggcuaugcagcauauuauauacuaugcgcauguuaugaaaugcauaauaaaaaauuuuaaaaaaucuaaaagaucuaaaaaaaaaaaaaaaaaaaaaaaaaaaaaaaaaaaaaaaaaaaaaaaaaaaaaaaaaaaaaaaaugcaucccccccccccccccccccccccccccccccaaaggcucuuuucagagccaccagaauu

SEQ ID NO: 10754 - RNA, 1097 nt, Artificial Sequence
  mRNA product Design c-4 comprising derived and/or modified sequence from HRSV(A2)__P03421.1__P (opt4)
gggagaguccgcucagccagguugcagaagcggcuuagcguguguccuaaucuucucucugcguguagguaggccugugccgcaaacaagcuuaccauggagaaguucgcccccgaguuccacggcgaggacgccaacaacagagccaccaaguuccuggagagcaucaagggcaaguucaccagccccaaggaccccaagaagaaggacagcaucaucagcgugaacagcaucgacaucgaggugaccaaggagagccccaucaccagcaacagcaccaucaucaaccccaccaacgagaccgacgacaccgccggcaacaagcccaacuaccagagaaagccccuggugagcuucaaggaggaccccacccccagcgacaaccccuucagcaagcuguacaaggagaccaucgagaccuucgacaacaacgaggaggagagcagcuacagcuacgaggagaucaacgaccagaccaacgacaacaucaccgccagacuggacagaaucgacgagaagcugagcgagauccugggcaugcugcacacccuggugguggccagcgccggccccaccagcgccagagacggcaucagagacgccaugaucggccugagagaggagaugaucgagaagaucagaaccgaggcccugaugaccaacgacagacuggaggccauggccagacugagaaacgaggagagcgagaagauggccaaggacaccagcgacgaggugagccugaaccccaccagcgagaagcugaacaaccugcuggagggcaacgacagcgacaacgaccugagccuggaggacuucugaggacuaguggaagcauuuuccuggcugauuaaaagaaauuacucagcuauggucaucuguuccuguuagaaggcuaugcagcauauuauauacuaugcgcauguuaugaaaugcauaauaaaaaauuuuaaaaaaucuaaaagaucuaaaaaaaaaaaaaaaaaaaaaaaaaaaaaaaaaaaaaaaaaaaaaaaaaaaaaaaaaaaaaaaaugcaucccccccccccccccccccccccccccccccaaaggcucuuuucagagccaccagaauu

SEQ ID NO: 10755 - RNA, 1097 nt, Artificial Sequence
  mRNA product Design c-4 comprising derived and/or modified sequence from HRSV(A2)__P03421.1__P (opt5)
gggagaguccgcucagccagguugcagaagcggcuuagcguguguccuaaucuucucucugcguguagguaggccugugccgcaaacaagcuuaccauggagaaguucgcccccgaauuucacggcgaggacgcuaacaauagagccaccaaauuccuggaaagcaucaaggggaaauuuacauccccuaaggauccgaaaaagaaggacucuauuaucagcgugaacuccauugauaucgaggucacgaaagaaucucccauuaccagcaauuccacaaucaucaacccuaccaaugagacagacgauaccgcgggaaacaagcccaauuaccagcggaaaccucucguuucuuucaaggaggaccccacaccuagcgauaacccguuuuccaaacuguauaaggaaaccauugagacguucgacaauaacgaagaggagagcucuuacuccuaugaagagaucaaugaucaaaccaacgacaauauuacagcucgccuugauagaaucgacgaaaagcugagcgagauucucggcaugcugcauacccuugugguggccucugccgggcccacauccgcucgggauggaauccgcgacgccaugauuggccugagagaagagaugaucgagaaaauccggaccgaagcucucaugacgaacgaccgccuggaggccauggcgagacugcggaaugaagagagcgaaaagauggccaaagauacaucugacgaggucucccucaacccuaccagcgagaagcugaacaaucuucuggaagggaacgauuccgacaaugaucucucucuggaggacuuuugaggacuaguggaagcauuuuccuggcugauuaaaagaaauuacucagcuauggucaucuguuccuguuagaaggcuaugcagcauauuauauacuaugcgcauguuaugaaaugcauaauaaaaaauuuuaaaaaaucuaaaagaucuaaaaaaaaaaaaaaaaaaaaaaaaaaaaaaaaaaaaaaaaaaaaaaaaaaaaaaaaaaaaaaaaugcaucccccccccccccccccccccccccccccccaaaggcucuuuucagagccaccagaauu

SEQ ID NO: 10756 - RNA, 1097 nt, Artificial Sequence
  mRNA product Design c-4 comprising derived and/or modified sequence from HRSV(A2)__P03421.1__P (opt6)
gggagaguccgcucagccagguugcagaagcggcuuagcguguguccuaaucuucucucugcguguagguaggccugugccgcaaacaagcuuaccauggaaaaauucgcaccagaauuucacggagaagacgcaaacaacagagcaacaaaauucuuagaaucaaucaaaggaaaauucacaagcccaaaagacccaaaaaaaaaagacucaauaauaagcguaaacucaauagacauagaaguaacaaaagaaagcccaauaacaagcaacagcacaauaauaaacccaacaaacgaaacagaugacacagcuggaaauaaaccaaacuaccaaagaaaaccccuagucagcuucaaagaagaccccacaccaucagacaacccauucagcaaacuauauaaagaaacaauagaaacauuugacaacaacgaagaagaaucaucauacucauacgaagaaauaaacgaccaaacaaacgacaacauaaccgcaagauuagacagaauagaugaaaaacuaucagaaauacuaggaaugcuacacacauuaguaguagcaagcgcaggaccaacaucagcaagagacggaauaagagacgcaaugauaggacucagagaagaaaugauagaaaaaauaagaacagaagcacuaaugacaaacgacagauuagaagcaauggcaagacuaagaaaugaagaaucggaaaaaauggcaaaagacacaucagacgaaguaagccuaaacccaacaucagaaaaauuaaauaaccuacuagaaggaaacgacagcgacaacgacuuaucacuagaagacuucuaaggacuaguggaagcauuuuccuggcugauuaaaagaaauuacucagcuauggucaucuguuccuguuagaaggcuaugcagcauauuauauacuaugcgcauguuaugaaaugcauaauaaaaaauuuuaaaaaaucuaaaagaucuaaaaaaaaaaaaaaaaaaaaaaaaaaaaaaaaaaaaaaaaaaaaaaaaaaaaaaaaaaaaaaaaugcaucccccccccccccccccccccccccccccccaaaggcucuuuucagagccaccagaauu

SEQ ID NO: 10757 - RNA, 1097 nt, Artificial Sequence
  mRNA product Design c-4 comprising derived and/or modified sequence from HRSV(A2)__P03421.1__P (opt11)
gggagaguccgcucagccagguugcagaagcggcuuagcguguguccuaaucuucucucugcguguagguaggccugugccgcaaacaagcuuaccauggaaaaauucgcgcccgaguuccacggcgaggacgcgaacaaccgcgcgacaaaguuccuagaaucaaucaagggcaaauucacgagcccgaaagaccccaagaaaaaggacucaaucauaagcgugaacucgaucgacaucgaggucacgaaagagagcccgaucacaagcaacagcaccauaauaaacccgaccaacgaaacagacgacaccgcgggcaacaaaccgaacuaccaaagaaaaccgcucgugagcuucaaagaagacccgaccccaagcgacaacccguucucaaaacuauacaaggaaacgaucgagaccuucgacaacaacgaggaagagagcucguacucguacgaggaaauaaacgaccaaacaaacgacaacauaaccgcacgccuagacaggaucgacgaaaaacucucggaaauacucgggaugcuacacacgcucguggucgcgagcgcaggcccgaccucggccagggacggcaucagggacgcaaugauaggccugcgagaggaaaugaucgagaaaauacgcaccgaagcacucaugaccaacgacagacucgaagccauggccaggcucaggaacgaagaauccgaaaagauggcgaaagacaccucggacgaggucucgcucaaccccacgagcgagaaacugaacaaccuacuggaagggaacgacagcgacaacgaccuuucccucgaggacuucugaggacuaguggaagcauuuuccuggcugauuaaaagaaauuacucagcuauggucaucuguuccuguuagaaggcuaugcagcauauuauauacuaugcgcauguuaugaaaugcauaauaaaaaauuuuaaaaaaucuaaaagaucuaaaaaaaaaaaaaaaaaaaaaaaaaaaaaaaaaaaaaaaaaaaaaaaaaaaaaaaaaaaaaaaaugcaucccccccccccccccccccccccccccccccaaaggcucuuuucagagccaccagaauu

SEQ ID NO: 10758 - RNA, 1015 nt, Artificial Sequence
  mRNA product Design c-5 comprising derived and/or modified sequence from HRSV(A2)__P03421.1__P (wt)
gggagagcggcucggccauuuugucccagucaguccggaggcugcggcugcagaaguaccgccugcggaguaacugcaaagaagcuuaccauggaaaaguuugcuccugaauuccauggagaagaugcaaacaacagggcuacuaaauuccuagaaucaauaaagggcaaauucacaucacccaaagaucccaagaaaaaagauaguaucauaucugucaacucaauagauauagaaguaaccaaagaaagcccuauaacaucaaauucaacuauuaucaacccaacaaaugagacagaugauacugcagggaacaagcccaauuaucaaagaaaaccucuaguaaguuucaaagaagacccuacaccaagugauaaucccuuuucuaaacuauacaaagaaaccauagaaacauuugauaacaaugaagaagaauccagcuauucauacgaagaaauaaaugaucagacaaacgauaauauaacagcaagauuagauaggauugaugaaaaauuaagugaaauacuaggaaugcuucacacauuaguaguggcaagugcaggaccuacaucugcucgggaugguauaagagaugccaugauugguuuaagagaagaaaugauagaaaaaaucagaacugaagcauuaaugaccaaugacagauuagaagcuauggcaagacucaggaaugaggaaagugaaaagauggcaaaagacacaucagaugaagugucucucaauccaacaucagagaaauugaacaaccuauuggaagggaaugauagugacaaugaucuaucacuugaagauuucugaggacuagucccuguucccagagcccacuuuuuuuucuuuuuuugaaauaaaauagccugucuuucagaucuaaaaaaaaaaaaaaaaaaaaaaaaaaaaaaaaaaaaaaaaaaaaaaaaaaaaaaaaaaaaaaaaugcaucccccccccccccccccccccccccccccccaaaggcucuuuucagagccaccagaauu

SEQ ID NO: 10759 - RNA, 1015 nt, Artificial Sequence
  mRNA product Design c-5 comprising derived and/or modified sequence from HRSV(A2)__P03421.1__P (opt1)
gggagagcggcucggccauuuugucccagucaguccggaggcugcggcugcagaaguaccgccugcggaguaacugcaaagaagcuuaccauggagaaguucgcccccgaguuccacggcgaggacgccaacaaccgcgcgaccaaguuccuggagagcaucaaggggaaguucaccuccccgaaggaccccaagaagaaggacagcaucaucuccgugaacagcaucgacaucgaggucacgaaggagucccccaucaccagcaacuccaccaucaucaaccccaccaacgagacggacgacaccgccggcaacaagccgaacuaccagcggaagccccucgugagcuucaaggaggaccccacccccuccgacaacccguucagcaagcuguacaaggagaccaucgagacguucgacaacaacgaggaggaguccagcuacuccuacgaggagaucaacgaccagaccaacgacaacaucaccgcccgccuggaccggaucgacgagaagcucagcgagauccuggggaugcugcacacccucguggucgccuccgccggccccacgagcgcgcgcgacgggauccgggacgccaugaucggccugcgcgaggagaugaucgagaagauccggaccgaggcccugaugaccaacgaccgccucgaggccauggcgcggcugcgcaacgaggaguccgagaagauggccaaggacaccagcgacgaggugucccugaaccccacgagcgagaagcucaacaaccugcuggagggcaacgacagcgacaacgaccucucccuggaggacuucugaggacuagucccuguucccagagcccacuuuuuuuucuuuuuuugaaauaaaauagccugucuuucagaucuaaaaaaaaaaaaaaaaaaaaaaaaaaaaaaaaaaaaaaaaaaaaaaaaaaaaaaaaaaaaaaaaugcaucccccccccccccccccccccccccccccccaaaggcucuuuucagagccaccagaauu

SEQ ID NO: 10760 - RNA, 1015 nt, Artificial Sequence
  mRNA product Design c-5 comprising derived and/or modified sequence from HRSV(A2)__P03421.1__P (opt2)
gggagagcggcucggccauuuugucccagucaguccggaggcugcggcugcagaaguaccgccugcggaguaacugcaaagaagcuuaccauggagaaguucgcccccgaguuccacggcgaggacgccaacaaccgcgccaccaaguuccucgaguccaucaagggcaaguucaccucccccaaggaccccaagaagaaggacuccaucaucuccgucaacuccaucgacaucgaggucaccaaggagucccccaucaccuccaacuccaccaucaucaaccccaccaacgagaccgacgacaccgccggcaacaagcccaacuaccagcgcaagccccucgucuccuucaaggaggaccccacccccuccgacaaccccuucuccaagcucuacaaggagaccaucgagaccuucgacaacaacgaggaggaguccuccuacuccuacgaggagaucaacgaccagaccaacgacaacaucaccgcccgccucgaccgcaucgacgagaagcucuccgagauccucggcaugcuccacacccucgucgucgccuccgccggccccaccuccgcccgcgacggcauccgcgacgccaugaucggccuccgcgaggagaugaucgagaagauccgcaccgaggcccucaugaccaacgaccgccucgaggccauggcccgccuccgcaacgaggaguccgagaagauggccaaggacaccuccgacgaggucucccucaaccccaccuccgagaagcucaacaaccuccucgagggcaacgacuccgacaacgaccucucccucgaggacuucugaggacuagucccuguucccagagcccacuuuuuuuucuuuuuuugaaauaaaauagccugucuuucagaucuaaaaaaaaaaaaaaaaaaaaaaaaaaaaaaaaaaaaaaaaaaaaaaaaaaaaaaaaaaaaaaaaugcaucccccccccccccccccccccccccccccccaaaggcucuuuucagagccaccagaauu

SEQ ID NO: 10761 - RNA, 1015 nt, Artificial Sequence
  mRNA product Design c-5 comprising derived and/or modified sequence from HRSV(A2)__P03421.1__P (opt3)
gggagagcggcucggccauuuugucccagucaguccggaggcugcggcugcagaaguaccgccugcggaguaacugcaaagaagcuuaccauggagaaguucgcccccgaauuucacggcgaggacgcuaacaauagagcaaccaaauuccuggaaagcaucaaggggaaauuuacauccccuaaggauccgaaaaagaaggacucuauuauaucagugaacaguaucgauauugaggucacuaaagaaagcccaaucacguccaauucuaccauuaucaaccccacaaaugagacugacgauaccgccggaaacaagccuaauuaccagaggaaaccacucguuucguucaaggaggaccccacaccuucagauaacccauuuagcaaacuuuauaaggaaaccauagagacuuucgacaauaacgaagaggagaguuccuacucuuaugaagagaucaaugaucaaacaaacgacaauauuaccgcgcggcuggaucgcaucgacgaaaaguugagcgagauuuuagguaugcugcauacgcuagugguagcuuccgccggccccacuucagcacgagaugggauccgugacgccaugauaggacucagagaagagaugauugagaaaaucaggaccgaagcucugaugacaaacgaccggcuugaggcaauggcccgccugagaaaugaagagagugaaaagauggcuaaagauacuagcgacgaggugucuuugaacccuaccuccgagaagcucaacaaucugcuggaaggcaacgauucagacaaugaucucagcuuagaggacuuuugaggacuagucccuguucccagagcccacuuuuuuuucuuuuuuugaaauaaaauagccugucuuucagaucuaaaaaaaaaaaaaaaaaaaaaaaaaaaaaaaaaaaaaaaaaaaaaaaaaaaaaaaaaaaaaaaaugcaucccccccccccccccccccccccccccccccaaaggcucuuuucagagccaccagaauu

SEQ ID NO: 10762 - RNA, 1015 nt, Artificial Sequence
  mRNA product Design c-5 comprising derived and/or modified sequence from HRSV(A2)__P03421.1__P (opt4)
gggagagcggcucggccauuuugucccagucaguccggaggcugcggcugcagaaguaccgccugcggaguaacugcaaagaagcuuaccauggagaaguucgcccccgaguuccacggcgaggacgccaacaacagagccaccaaguuccuggagagcaucaagggcaaguucaccagccccaaggaccccaagaagaaggacagcaucaucagcgugaacagcaucgacaucgaggugaccaaggagagccccaucaccagcaacagcaccaucaucaaccccaccaacgagaccgacgacaccgccggcaacaagcccaacuaccagagaaagccccuggugagcuucaaggaggaccccacccccagcgacaaccccuucagcaagcuguacaaggagaccaucgagaccuucgacaacaacgaggaggagagcagcuacagcuacgaggagaucaacgaccagaccaacgacaacaucaccgccagacuggacagaaucgacgagaagcugagcgagauccugggcaugcugcacacccuggugguggccagcgccggccccaccagcgccagagacggcaucagagacgccaugaucggccugagagaggagaugaucgagaagaucagaaccgaggcccugaugaccaacgacagacuggaggccauggccagacugagaaacgaggagagcgagaagauggccaaggacaccagcgacgaggugagccugaaccccaccagcgagaagcugaacaaccugcuggagggcaacgacagcgacaacgaccugagccuggaggacuucugaggacuagucccuguucccagagcccacuuuuuuuucuuuuuuugaaauaaaauagccugucuuucagaucuaaaaaaaaaaaaaaaaaaaaaaaaaaaaaaaaaaaaaaaaaaaaaaaaaaaaaaaaaaaaaaaaugcaucccccccccccccccccccccccccccccccaaaggcucuuuucagagccaccagaauu

SEQ ID NO: 10763 - RNA, 1015 nt, Artificial Sequence
  mRNA product Design c-5 comprising derived and/or modified sequence from HRSV(A2)__P03421.1__P (opt5)
gggagagcggcucggccauuuugucccagucaguccggaggcugcggcugcagaaguaccgccugcggaguaacugcaaagaagcuuaccauggagaaguucgcccccgaauuucacggcgaggacgcuaacaauagagccaccaaauuccuggaaagcaucaaggggaaauuuacauccccuaaggauccgaaaaagaaggacucuauuaucagcgugaacuccauugauaucgaggucacgaaagaaucucccauuaccagcaauuccacaaucaucaacccuaccaaugagacagacgauaccgcgggaaacaagcccaauuaccagcggaaaccucucguuucuuucaaggaggaccccacaccuagcgauaacccguuuuccaaacuguauaaggaaaccauugagacguucgacaauaacgaagaggagagcucuuacuccuaugaagagaucaaugaucaaaccaacgacaauauuacagcucgccuugauagaaucgacgaaaagcugagcgagauucucggcaugcugcauacccuugugguggccucugccgggcccacauccgcucgggauggaauccgcgacgccaugauuggccugagagaagagaugaucgagaaaauccggaccgaagcucucaugacgaacgaccgccuggaggccauggcgagacugcggaaugaagagagcgaaaagauggccaaagauacaucugacgaggucucccucaacccuaccagcgagaagcugaacaaucuucuggaagggaacgauuccgacaaugaucucucucuggaggacuuuugaggacuagucccuguucccagagcccacuuuuuuuucuuuuuuugaaauaaaauagccugucuuucagaucuaaaaaaaaaaaaaaaaaaaaaaaaaaaaaaaaaaaaaaaaaaaaaaaaaaaaaaaaaaaaaaaaugcaucccccccccccccccccccccccccccccccaaaggcucuuuucagagccaccagaauu

SEQ ID NO: 10764 - RNA, 1015 nt, Artificial Sequence
  mRNA product Design c-5 comprising derived and/or modified sequence from HRSV(A2)__P03421.1__P (opt6)
gggagagcggcucggccauuuugucccagucaguccggaggcugcggcugcagaaguaccgccugcggaguaacugcaaagaagcuuaccauggaaaaauucgcaccagaauuucacggagaagacgcaaacaacagagcaacaaaauucuuagaaucaaucaaaggaaaauucacaagcccaaaagacccaaaaaaaaaagacucaauaauaagcguaaacucaauagacauagaaguaacaaaagaaagcccaauaacaagcaacagcacaauaauaaacccaacaaacgaaacagaugacacagcuggaaauaaaccaaacuaccaaagaaaaccccuagucagcuucaaagaagaccccacaccaucagacaacccauucagcaaacuauauaaagaaacaauagaaacauuugacaacaacgaagaagaaucaucauacucauacgaagaaauaaacgaccaaacaaacgacaacauaaccgcaagauuagacagaauagaugaaaaacuaucagaaauacuaggaaugcuacacacauuaguaguagcaagcgcaggaccaacaucagcaagagacggaauaagagacgcaaugauaggacucagagaagaaaugauagaaaaaauaagaacagaagcacuaaugacaaacgacagauuagaagcaauggcaagacuaagaaaugaagaaucggaaaaaauggcaaaagacacaucagacgaaguaagccuaaacccaacaucagaaaaauuaaauaaccuacuagaaggaaacgacagcgacaacgacuuaucacuagaagacuucuaaggacuagucccuguucccagagcccacuuuuuuuucuuuuuuugaaauaaaauagccugucuuucagaucuaaaaaaaaaaaaaaaaaaaaaaaaaaaaaaaaaaaaaaaaaaaaaaaaaaaaaaaaaaaaaaaaugcaucccccccccccccccccccccccccccccccaaaggcucuuuucagagccaccagaauu

SEQ ID NO: 10765 - RNA, 1015 nt, Artificial Sequence
  mRNA product Design c-5 comprising derived and/or modified sequence from HRSV(A2)__P03421.1__P (opt11)
gggagagcggcucggccauuuugucccagucaguccggaggcugcggcugcagaaguaccgccugcggaguaacugcaaagaagcuuaccauggaaaaauucgcgcccgaguuccacggcgaggacgcgaacaaccgcgcgacaaaguuccuagaaucaaucaagggcaaauucacgagcccgaaagaccccaagaaaaaggacucaaucauaagcgugaacucgaucgacaucgaggucacgaaagagagcccgaucacaagcaacagcaccauaauaaacccgaccaacgaaacagacgacaccgcgggcaacaaaccgaacuaccaaagaaaaccgcucgugagcuucaaagaagacccgaccccaagcgacaacccguucucaaaacuauacaaggaaacgaucgagaccuucgacaacaacgaggaagagagcucguacucguacgaggaaauaaacgaccaaacaaacgacaacauaaccgcacgccuagacaggaucgacgaaaaacucucggaaauacucgggaugcuacacacgcucguggucgcgagcgcaggcccgaccucggccagggacggcaucagggacgcaaugauaggccugcgagaggaaaugaucgagaaaauacgcaccgaagcacucaugaccaacgacagacucgaagccauggccaggcucaggaacgaagaauccgaaaagauggcgaaagacaccucggacgaggucucgcucaaccccacgagcgagaaacugaacaaccuacuggaagggaacgacagcgacaacgaccuuucccucgaggacuucugaggacuagucccuguucccagagcccacuuuuuuuucuuuuuuugaaauaaaauagccugucuuucagaucuaaaaaaaaaaaaaaaaaaaaaaaaaaaaaaaaaaaaaaaaaaaaaaaaaaaaaaaaaaaaaaaaugcaucccccccccccccccccccccccccccccccaaaggcucuuuucagagccaccagaauu

SEQ ID NO: 10766 - RNA, 1024 nt, Artificial Sequence
  mRNA product Design d-1 comprising derived and/or modified sequence from HRSV(A2)__P03421.1__P (wt)
gggagacccgugacccggaaguuguacggcuacgcgacuuucccucccacaaacccucgcgcccuuccuuuccuacuugggcccggcagaaagcuuaccauggaaaaguuugcuccugaauuccauggagaagaugcaaacaacagggcuacuaaauuccuagaaucaauaaagggcaaauucacaucacccaaagaucccaagaaaaaagauaguaucauaucugucaacucaauagauauagaaguaaccaaagaaagcccuauaacaucaaauucaacuauuaucaacccaacaaaugagacagaugauacugcagggaacaagcccaauuaucaaagaaaaccucuaguaaguuucaaagaagacccuacaccaagugauaaucccuuuucuaaacuauacaaagaaaccauagaaacauuugauaacaaugaagaagaauccagcuauucauacgaagaaauaaaugaucagacaaacgauaauauaacagcaagauuagauaggauugaugaaaaauuaagugaaauacuaggaaugcuucacacauuaguaguggcaagugcaggaccuacaucugcucgggaugguauaagagaugccaugauugguuuaagagaagaaaugauagaaaaaaucagaacugaagcauuaaugaccaaugacagauuagaagcuauggcaagacucaggaaugaggaaagugaaaagauggcaaaagacacaucagaugaagugucucucaauccaacaucagagaaauugaacaaccuauuggaagggaaugauagugacaaugaucuaucacuugaagauuucugaggacuagucccuguucccagagcccacuuuuuuuucuuuuuuugaaauaaaauagccugucuuucagaucuaaaaaaaaaaaaaaaaaaaaaaaaaaaaaaaaaaaaaaaaaaaaaaaaaaaaaaaaaaaaaaaaugcaucccccccccccccccccccccccccccccccaaaggcucuuuucagagccaccagaauu

SEQ ID NO: 10767 - RNA, 1024 nt, Artificial Sequence
  mRNA product Design d-1 comprising derived and/or modified sequence from HRSV(A2)__P03421.1__P (opt1)
gggagacccgugacccggaaguuguacggcuacgcgacuuucccucccacaaacccucgcgcccuuccuuuccuacuugggcccggcagaaagcuuaccauggagaaguucgcccccgaguuccacggcgaggacgccaacaaccgcgcgaccaaguuccuggagagcaucaaggggaaguucaccuccccgaaggaccccaagaagaaggacagcaucaucuccgugaacagcaucgacaucgaggucacgaaggagucccccaucaccagcaacuccaccaucaucaaccccaccaacgagacggacgacaccgccggcaacaagccgaacuaccagcggaagccccucgugagcuucaaggaggaccccacccccuccgacaacccguucagcaagcuguacaaggagaccaucgagacguucgacaacaacgaggaggaguccagcuacuccuacgaggagaucaacgaccagaccaacgacaacaucaccgcccgccuggaccggaucgacgagaagcucagcgagauccuggggaugcugcacacccucguggucgccuccgccggccccacgagcgcgcgcgacgggauccgggacgccaugaucggccugcgcgaggagaugaucgagaagauccggaccgaggcccugaugaccaacgaccgccucgaggccauggcgcggcugcgcaacgaggaguccgagaagauggccaaggacaccagcgacgaggugucccugaaccccacgagcgagaagcucaacaaccugcuggagggcaacgacagcgacaacgaccucucccuggaggacuucugaggacuagucccuguucccagagcccacuuuuuuuucuuuuuuugaaauaaaauagccugucuuucagaucuaaaaaaaaaaaaaaaaaaaaaaaaaaaaaaaaaaaaaaaaaaaaaaaaaaaaaaaaaaaaaaaaugcaucccccccccccccccccccccccccccccccaaaggcucuuuucagagccaccagaauu

SEQ ID NO: 10768 - RNA, 1024 nt, Artificial Sequence
  mRNA product Design d-1 comprising derived and/or modified sequence from HRSV(A2)__P03421.1__P (opt2)
gggagacccgugacccggaaguuguacggcuacgcgacuuucccucccacaaacccucgcgcccuuccuuuccuacuugggcccggcagaaagcuuaccauggagaaguucgcccccgaguuccacggcgaggacgccaacaaccgcgccaccaaguuccucgaguccaucaagggcaaguucaccucccccaaggaccccaagaagaaggacuccaucaucuccgucaacuccaucgacaucgaggucaccaaggagucccccaucaccuccaacuccaccaucaucaaccccaccaacgagaccgacgacaccgccggcaacaagcccaacuaccagcgcaagccccucgucuccuucaaggaggaccccacccccuccgacaaccccuucuccaagcucuacaaggagaccaucgagaccuucgacaacaacgaggaggaguccuccuacuccuacgaggagaucaacgaccagaccaacgacaacaucaccgcccgccucgaccgcaucgacgagaagcucuccgagauccucggcaugcuccacacccucgucgucgccuccgccggccccaccuccgcccgcgacggcauccgcgacgccaugaucggccuccgcgaggagaugaucgagaagauccgcaccgaggcccucaugaccaacgaccgccucgaggccauggcccgccuccgcaacgaggaguccgagaagauggccaaggacaccuccgacgaggucucccucaaccccaccuccgagaagcucaacaaccuccucgagggcaacgacuccgacaacgaccucucccucgaggacuucugaggacuagucccuguucccagagcccacuuuuuuuucuuuuuuugaaauaaaauagccugucuuucagaucuaaaaaaaaaaaaaaaaaaaaaaaaaaaaaaaaaaaaaaaaaaaaaaaaaaaaaaaaaaaaaaaaugcaucccccccccccccccccccccccccccccccaaaggcucuuuucagagccaccagaauu

SEQ ID NO: 10769 - RNA, 1024 nt, Artificial Sequence
  mRNA product Design d-1 comprising derived and/or modified sequence from HRSV(A2)__P03421.1__P (opt3)
gggagacccgugacccggaaguuguacggcuacgcgacuuucccucccacaaacccucgcgcccuuccuuuccuacuugggcccggcagaaagcuuaccauggagaaguucgcccccgaauuucacggcgaggacgcuaacaauagagcaaccaaauuccuggaaagcaucaaggggaaauuuacauccccuaaggauccgaaaaagaaggacucuauuauaucagugaacaguaucgauauugaggucacuaaagaaagcccaaucacguccaauucuaccauuaucaaccccacaaaugagacugacgauaccgccggaaacaagccuaauuaccagaggaaaccacucguuucguucaaggaggaccccacaccuucagauaacccauuuagcaaacuuuauaaggaaaccauagagacuuucgacaauaacgaagaggagaguuccuacucuuaugaagagaucaaugaucaaacaaacgacaauauuaccgcgcggcuggaucgcaucgacgaaaaguugagcgagauuuuagguaugcugcauacgcuagugguagcuuccgccggccccacuucagcacgagaugggauccgugacgccaugauaggacucagagaagagaugauugagaaaaucaggaccgaagcucugaugacaaacgaccggcuugaggcaauggcccgccugagaaaugaagagagugaaaagauggcuaaagauacuagcgacgaggugucuuugaacccuaccuccgagaagcucaacaaucugcuggaaggcaacgauucagacaaugaucucagcuuagaggacuuuugaggacuagucccuguucccagagcccacuuuuuuuucuuuuuuugaaauaaaauagccugucuuucagaucuaaaaaaaaaaaaaaaaaaaaaaaaaaaaaaaaaaaaaaaaaaaaaaaaaaaaaaaaaaaaaaaaugcaucccccccccccccccccccccccccccccccaaaggcucuuuucagagccaccagaauu

SEQ ID NO: 10770 - RNA, 1024 nt, Artificial Sequence
  mRNA product Design d-1 comprising derived and/or modified sequence from HRSV(A2)__P03421.1__P (opt4)
gggagacccgugacccggaaguuguacggcuacgcgacuuucccucccacaaacccucgcgcccuuccuuuccuacuugggcccggcagaaagcuuaccauggagaaguucgcccccgaguuccacggcgaggacgccaacaacagagccaccaaguuccuggagagcaucaagggcaaguucaccagccccaaggaccccaagaagaaggacagcaucaucagcgugaacagcaucgacaucgaggugaccaaggagagccccaucaccagcaacagcaccaucaucaaccccaccaacgagaccgacgacaccgccggcaacaagcccaacuaccagagaaagccccuggugagcuucaaggaggaccccacccccagcgacaaccccuucagcaagcuguacaaggagaccaucgagaccuucgacaacaacgaggaggagagcagcuacagcuacgaggagaucaacgaccagaccaacgacaacaucaccgccagacuggacagaaucgacgagaagcugagcgagauccugggcaugcugcacacccuggugguggccagcgccggccccaccagcgccagagacggcaucagagacgccaugaucggccugagagaggagaugaucgagaagaucagaaccgaggcccugaugaccaacgacagacuggaggccauggccagacugagaaacgaggagagcgagaagauggccaaggacaccagcgacgaggugagccugaaccccaccagcgagaagcugaacaaccugcuggagggcaacgacagcgacaacgaccugagccuggaggacuucugaggacuagucccuguucccagagcccacuuuuuuuucuuuuuuugaaauaaaauagccugucuuucagaucuaaaaaaaaaaaaaaaaaaaaaaaaaaaaaaaaaaaaaaaaaaaaaaaaaaaaaaaaaaaaaaaaugcaucccccccccccccccccccccccccccccccaaaggcucuuuucagagccaccagaauu

SEQ ID NO: 10771 - RNA, 1024 nt, Artificial Sequence
  mRNA product Design d-1 comprising derived and/or modified sequence from HRSV(A2)__P03421.1__P (opt5)
gggagacccgugacccggaaguuguacggcuacgcgacuuucccucccacaaacccucgcgcccuuccuuuccuacuugggcccggcagaaagcuuaccauggagaaguucgcccccgaauuucacggcgaggacgcuaacaauagagccaccaaauuccuggaaagcaucaaggggaaauuuacauccccuaaggauccgaaaaagaaggacucuauuaucagcgugaacuccauugauaucgaggucacgaaagaaucucccauuaccagcaauuccacaaucaucaacccuaccaaugagacagacgauaccgcgggaaacaagcccaauuaccagcggaaaccucucguuucuuucaaggaggaccccacaccuagcgauaacccguuuuccaaacuguauaaggaaaccauugagacguucgacaauaacgaagaggagagcucuuacuccuaugaagagaucaaugaucaaaccaacgacaauauuacagcucgccuugauagaaucgacgaaaagcugagcgagauucucggcaugcugcauacccuugugguggccucugccgggcccacauccgcucgggauggaauccgcgacgccaugauuggccugagagaagagaugaucgagaaaauccggaccgaagcucucaugacgaacgaccgccuggaggccauggcgagacugcggaaugaagagagcgaaaagauggccaaagauacaucugacgaggucucccucaacccuaccagcgagaagcugaacaaucuucuggaagggaacgauuccgacaaugaucucucucuggaggacuuuugaggacuagucccuguucccagagcccacuuuuuuuucuuuuuuugaaauaaaauagccugucuuucagaucuaaaaaaaaaaaaaaaaaaaaaaaaaaaaaaaaaaaaaaaaaaaaaaaaaaaaaaaaaaaaaaaaugcaucccccccccccccccccccccccccccccccaaaggcucuuuucagagccaccagaauu

SEQ ID NO: 10772 - RNA, 1024 nt, Artificial Sequence
  mRNA product Design d-1 comprising derived and/or modified sequence from HRSV(A2)__P03421.1__P (opt6)
gggagacccgugacccggaaguuguacggcuacgcgacuuucccucccacaaacccucgcgcccuuccuuuccuacuugggcccggcagaaagcuuaccauggaaaaauucgcaccagaauuucacggagaagacgcaaacaacagagcaacaaaauucuuagaaucaaucaaaggaaaauucacaagcccaaaagacccaaaaaaaaaagacucaauaauaagcguaaacucaauagacauagaaguaacaaaagaaagcccaauaacaagcaacagcacaauaauaaacccaacaaacgaaacagaugacacagcuggaaauaaaccaaacuaccaaagaaaaccccuagucagcuucaaagaagaccccacaccaucagacaacccauucagcaaacuauauaaagaaacaauagaaacauuugacaacaacgaagaagaaucaucauacucauacgaagaaauaaacgaccaaacaaacgacaacauaaccgcaagauuagacagaauagaugaaaaacuaucagaaauacuaggaaugcuacacacauuaguaguagcaagcgcaggaccaacaucagcaagagacggaauaagagacgcaaugauaggacucagagaagaaaugauagaaaaaauaagaacagaagcacuaaugacaaacgacagauuagaagcaauggcaagacuaagaaaugaagaaucggaaaaaauggcaaaagacacaucagacgaaguaagccuaaacccaacaucagaaaaauuaaauaaccuacuagaaggaaacgacagcgacaacgacuuaucacuagaagacuucuaaggacuagucccuguucccagagcccacuuuuuuuucuuuuuuugaaauaaaauagccugucuuucagaucuaaaaaaaaaaaaaaaaaaaaaaaaaaaaaaaaaaaaaaaaaaaaaaaaaaaaaaaaaaaaaaaaugcaucccccccccccccccccccccccccccccccaaaggcucuuuucagagccaccagaauu

SEQ ID NO: 10773 - RNA, 1024 nt, Artificial Sequence
  mRNA product Design d-1 comprising derived and/or modified sequence from HRSV(A2)__P03421.1__P (opt11)
gggagacccgugacccggaaguuguacggcuacgcgacuuucccucccacaaacccucgcgcccuuccuuuccuacuugggcccggcagaaagcuuaccauggaaaaauucgcgcccgaguuccacggcgaggacgcgaacaaccgcgcgacaaaguuccuagaaucaaucaagggcaaauucacgagcccgaaagaccccaagaaaaaggacucaaucauaagcgugaacucgaucgacaucgaggucacgaaagagagcccgaucacaagcaacagcaccauaauaaacccgaccaacgaaacagacgacaccgcgggcaacaaaccgaacuaccaaagaaaaccgcucgugagcuucaaagaagacccgaccccaagcgacaacccguucucaaaacuauacaaggaaacgaucgagaccuucgacaacaacgaggaagagagcucguacucguacgaggaaauaaacgaccaaacaaacgacaacauaaccgcacgccuagacaggaucgacgaaaaacucucggaaauacucgggaugcuacacacgcucguggucgcgagcgcaggcccgaccucggccagggacggcaucagggacgcaaugauaggccugcgagaggaaaugaucgagaaaauacgcaccgaagcacucaugaccaacgacagacucgaagccauggccaggcucaggaacgaagaauccgaaaagauggcgaaagacaccucggacgaggucucgcucaaccccacgagcgagaaacugaacaaccuacuggaagggaacgacagcgacaacgaccuuucccucgaggacuucugaggacuagucccuguucccagagcccacuuuuuuuucuuuuuuugaaauaaaauagccugucuuucagaucuaaaaaaaaaaaaaaaaaaaaaaaaaaaaaaaaaaaaaaaaaaaaaaaaaaaaaaaaaaaaaaaaugcaucccccccccccccccccccccccccccccccaaaggcucuuuucagagccaccagaauu

SEQ ID NO: 10774 - RNA, 1079 nt, Artificial Sequence
  mRNA product Design d-2 comprising derived and/or modified sequence from HRSV(A2)__P03421.1__P (wt)
gggagagcggcucggccauuuugucccagucaguccggaggcugcggcugcagaaguaccgccugcggaguaacugcaaagaagcuuaccauggaaaaguuugcuccugaauuccauggagaagaugcaaacaacagggcuacuaaauuccuagaaucaauaaagggcaaauucacaucacccaaagaucccaagaaaaaagauaguaucauaucugucaacucaauagauauagaaguaaccaaagaaagcccuauaacaucaaauucaacuauuaucaacccaacaaaugagacagaugauacugcagggaacaagcccaauuaucaaagaaaaccucuaguaaguuucaaagaagacccuacaccaagugauaaucccuuuucuaaacuauacaaagaaaccauagaaacauuugauaacaaugaagaagaauccagcuauucauacgaagaaauaaaugaucagacaaacgauaauauaacagcaagauuagauaggauugaugaaaaauuaagugaaauacuaggaaugcuucacacauuaguaguggcaagugcaggaccuacaucugcucgggaugguauaagagaugccaugauugguuuaagagaagaaaugauagaaaaaaucagaacugaagcauuaaugaccaaugacagauuagaagcuauggcaagacucaggaaugaggaaagugaaaagauggcaaaagacacaucagaugaagugucucucaauccaacaucagagaaauugaacaaccuauuggaagggaaugauagugacaaugaucuaucacuugaagauuucugaggacuaguaauaaggaaacuguaugaaugucugugggcaggaagugaagagauccuucuguaaagguuuuuggaauuaugucugcugaauaauaaacuuuuuugaaauaauaaaucugguagaaaaaugagaucuaaaaaaaaaaaaaaaaaaaaaaaaaaaaaaaaaaaaaaaaaaaaaaaaaaaaaaaaaaaaaaaaugcaucccccccccccccccccccccccccccccccaaaggcucuuuucagagccaccagaauu

SEQ ID NO: 10775 - RNA, 1079 nt, Artificial Sequence
  mRNA product Design d-2 comprising derived and/or modified sequence from HRSV(A2)__P03421.1__P (opt1)
gggagagcggcucggccauuuugucccagucaguccggaggcugcggcugcagaaguaccgccugcggaguaacugcaaagaagcuuaccauggagaaguucgcccccgaguuccacggcgaggacgccaacaaccgcgcgaccaaguuccuggagagcaucaaggggaaguucaccuccccgaaggaccccaagaagaaggacagcaucaucuccgugaacagcaucgacaucgaggucacgaaggagucccccaucaccagcaacuccaccaucaucaaccccaccaacgagacggacgacaccgccggcaacaagccgaacuaccagcggaagccccucgugagcuucaaggaggaccccacccccuccgacaacccguucagcaagcuguacaaggagaccaucgagacguucgacaacaacgaggaggaguccagcuacuccuacgaggagaucaacgaccagaccaacgacaacaucaccgcccgccuggaccggaucgacgagaagcucagcgagauccuggggaugcugcacacccucguggucgccuccgccggccccacgagcgcgcgcgacgggauccgggacgccaugaucggccugcgcgaggagaugaucgagaagauccggaccgaggcccugaugaccaacgaccgccucgaggccauggcgcggcugcgcaacgaggaguccgagaagauggccaaggacaccagcgacgaggugucccugaaccccacgagcgagaagcucaacaaccugcuggagggcaacgacagcgacaacgaccucucccuggaggacuucugaggacuaguaauaaggaaacuguaugaaugucugugggcaggaagugaagagauccuucuguaaagguuuuuggaauuaugucugcugaauaauaaacuuuuuugaaauaauaaaucugguagaaaaaugagaucuaaaaaaaaaaaaaaaaaaaaaaaaaaaaaaaaaaaaaaaaaaaaaaaaaaaaaaaaaaaaaaaaugcaucccccccccccccccccccccccccccccccaaaggcucuuuucagagccaccagaauu

SEQ ID NO: 10776 - RNA, 1079 nt, Artificial Sequence
  mRNA product Design d-2 comprising derived and/or modified sequence from HRSV(A2)__P03421.1__P (opt2)
gggagagcggcucggccauuuugucccagucaguccggaggcugcggcugcagaaguaccgccugcggaguaacugcaaagaagcuuaccauggagaaguucgcccccgaguuccacggcgaggacgccaacaaccgcgccaccaaguuccucgaguccaucaagggcaaguucaccucccccaaggaccccaagaagaaggacuccaucaucuccgucaacuccaucgacaucgaggucaccaaggagucccccaucaccuccaacuccaccaucaucaaccccaccaacgagaccgacgacaccgccggcaacaagcccaacuaccagcgcaagccccucgucuccuucaaggaggaccccacccccuccgacaaccccuucuccaagcucuacaaggagaccaucgagaccuucgacaacaacgaggaggaguccuccuacuccuacgaggagaucaacgaccagaccaacgacaacaucaccgcccgccucgaccgcaucgacgagaagcucuccgagauccucggcaugcuccacacccucgucgucgccuccgccggccccaccuccgcccgcgacggcauccgcgacgccaugaucggccuccgcgaggagaugaucgagaagauccgcaccgaggcccucaugaccaacgaccgccucgaggccauggcccgccuccgcaacgaggaguccgagaagauggccaaggacaccuccgacgaggucucccucaaccccaccuccgagaagcucaacaaccuccucgagggcaacgacuccgacaacgaccucucccucgaggacuucugaggacuaguaauaaggaaacuguaugaaugucugugggcaggaagugaagagauccuucuguaaagguuuuuggaauuaugucugcugaauaauaaacuuuuuugaaauaauaaaucugguagaaaaaugagaucuaaaaaaaaaaaaaaaaaaaaaaaaaaaaaaaaaaaaaaaaaaaaaaaaaaaaaaaaaaaaaaaaugcaucccccccccccccccccccccccccccccccaaaggcucuuuucagagccaccagaauu

SEQ ID NO: 10777 - RNA, 1079 nt, Artificial Sequence
  mRNA product Design d-2 comprising derived and/or modified sequence from HRSV(A2)__P03421.1__P (opt3)
gggagagcggcucggccauuuugucccagucaguccggaggcugcggcugcagaaguaccgccugcggaguaacugcaaagaagcuuaccauggagaaguucgcccccgaauuucacggcgaggacgcuaacaauagagcaaccaaauuccuggaaagcaucaaggggaaauuuacauccccuaaggauccgaaaaagaaggacucuauuauaucagugaacaguaucgauauugaggucacuaaagaaagcccaaucacguccaauucuaccauuaucaaccccacaaaugagacugacgauaccgccggaaacaagccuaauuaccagaggaaaccacucguuucguucaaggaggaccccacaccuucagauaacccauuuagcaaacuuuauaaggaaaccauagagacuuucgacaauaacgaagaggagaguuccuacucuuaugaagagaucaaugaucaaacaaacgacaauauuaccgcgcggcuggaucgcaucgacgaaaaguugagcgagauuuuagguaugcugcauacgcuagugguagcuuccgccggccccacuucagcacgagaugggauccgugacgccaugauaggacucagagaagagaugauugagaaaaucaggaccgaagcucugaugacaaacgaccggcuugaggcaauggcccgccugagaaaugaagagagugaaaagauggcuaaagauacuagcgacgaggugucuuugaacccuaccuccgagaagcucaacaaucugcuggaaggcaacgauucagacaaugaucucagcuuagaggacuuuugaggacuaguaauaaggaaacuguaugaaugucugugggcaggaagugaagagauccuucuguaaagguuuuuggaauuaugucugcugaauaauaaacuuuuuugaaauaauaaaucugguagaaaaaugagaucuaaaaaaaaaaaaaaaaaaaaaaaaaaaaaaaaaaaaaaaaaaaaaaaaaaaaaaaaaaaaaaaaugcaucccccccccccccccccccccccccccccccaaaggcucuuuucagagccaccagaauu

SEQ ID NO: 10778 - RNA, 1079 nt, Artificial Sequence
  mRNA product Design d-2 comprising derived and/or modified sequence from HRSV(A2)__P03421.1__P (opt4)
gggagagcggcucggccauuuugucccagucaguccggaggcugcggcugcagaaguaccgccugcggaguaacugcaaagaagcuuaccauggagaaguucgcccccgaguuccacggcgaggacgccaacaacagagccaccaaguuccuggagagcaucaagggcaaguucaccagccccaaggaccccaagaagaaggacagcaucaucagcgugaacagcaucgacaucgaggugaccaaggagagccccaucaccagcaacagcaccaucaucaaccccaccaacgagaccgacgacaccgccggcaacaagcccaacuaccagagaaagccccuggugagcuucaaggaggaccccacccccagcgacaaccccuucagcaagcuguacaaggagaccaucgagaccuucgacaacaacgaggaggagagcagcuacagcuacgaggagaucaacgaccagaccaacgacaacaucaccgccagacuggacagaaucgacgagaagcugagcgagauccugggcaugcugcacacccuggugguggccagcgccggccccaccagcgccagagacggcaucagagacgccaugaucggccugagagaggagaugaucgagaagaucagaaccgaggcccugaugaccaacgacagacuggaggccauggccagacugagaaacgaggagagcgagaagauggccaaggacaccagcgacgaggugagccugaaccccaccagcgagaagcugaacaaccugcuggagggcaacgacagcgacaacgaccugagccuggaggacuucugaggacuaguaauaaggaaacuguaugaaugucugugggcaggaagugaagagauccuucuguaaagguuuuuggaauuaugucugcugaauaauaaacuuuuuugaaauaauaaaucugguagaaaaaugagaucuaaaaaaaaaaaaaaaaaaaaaaaaaaaaaaaaaaaaaaaaaaaaaaaaaaaaaaaaaaaaaaaaugcaucccccccccccccccccccccccccccccccaaaggcucuuuucagagccaccagaauu

SEQ ID NO: 10779 - RNA, 1079 nt, Artificial Sequence
  mRNA product Design d-2 comprising derived and/or modified sequence from HRSV(A2)__P03421.1__P (opt5)
gggagagcggcucggccauuuugucccagucaguccggaggcugcggcugcagaaguaccgccugcggaguaacugcaaagaagcuuaccauggagaaguucgcccccgaauuucacggcgaggacgcuaacaauagagccaccaaauuccuggaaagcaucaaggggaaauuuacauccccuaaggauccgaaaaagaaggacucuauuaucagcgugaacuccauugauaucgaggucacgaaagaaucucccauuaccagcaauuccacaaucaucaacccuaccaaugagacagacgauaccgcgggaaacaagcccaauuaccagcggaaaccucucguuucuuucaaggaggaccccacaccuagcgauaacccguuuuccaaacuguauaaggaaaccauugagacguucgacaauaacgaagaggagagcucuuacuccuaugaagagaucaaugaucaaaccaacgacaauauuacagcucgccuugauagaaucgacgaaaagcugagcgagauucucggcaugcugcauacccuugugguggccucugccgggcccacauccgcucgggauggaauccgcgacgccaugauuggccugagagaagagaugaucgagaaaauccggaccgaagcucucaugacgaacgaccgccuggaggccauggcgagacugcggaaugaagagagcgaaaagauggccaaagauacaucugacgaggucucccucaacccuaccagcgagaagcugaacaaucuucuggaagggaacgauuccgacaaugaucucucucuggaggacuuuugaggacuaguaauaaggaaacuguaugaaugucugugggcaggaagugaagagauccuucuguaaagguuuuuggaauuaugucugcugaauaauaaacuuuuuugaaauaauaaaucugguagaaaaaugagaucuaaaaaaaaaaaaaaaaaaaaaaaaaaaaaaaaaaaaaaaaaaaaaaaaaaaaaaaaaaaaaaaaugcaucccccccccccccccccccccccccccccccaaaggcucuuuucagagccaccagaauu

SEQ ID NO: 10780 - RNA, 1079 nt, Artificial Sequence
  mRNA product Design d-2 comprising derived and/or modified sequence from HRSV(A2)__P03421.1__P (opt6)
gggagagcggcucggccauuuugucccagucaguccggaggcugcggcugcagaaguaccgccugcggaguaacugcaaagaagcuuaccauggaaaaauucgcaccagaauuucacggagaagacgcaaacaacagagcaacaaaauucuuagaaucaaucaaaggaaaauucacaagcccaaaagacccaaaaaaaaaagacucaauaauaagcguaaacucaauagacauagaaguaacaaaagaaagcccaauaacaagcaacagcacaauaauaaacccaacaaacgaaacagaugacacagcuggaaauaaaccaaacuaccaaagaaaaccccuagucagcuucaaagaagaccccacaccaucagacaacccauucagcaaacuauauaaagaaacaauagaaacauuugacaacaacgaagaagaaucaucauacucauacgaagaaauaaacgaccaaacaaacgacaacauaaccgcaagauuagacagaauagaugaaaaacuaucagaaauacuaggaaugcuacacacauuaguaguagcaagcgcaggaccaacaucagcaagagacggaauaagagacgcaaugauaggacucagagaagaaaugauagaaaaaauaagaacagaagcacuaaugacaaacgacagauuagaagcaauggcaagacuaagaaaugaagaaucggaaaaaauggcaaaagacacaucagacgaaguaagccuaaacccaacaucagaaaaauuaaauaaccuacuagaaggaaacgacagcgacaacgacuuaucacuagaagacuucuaaggacuaguaauaaggaaacuguaugaaugucugugggcaggaagugaagagauccuucuguaaagguuuuuggaauuaugucugcugaauaauaaacuuuuuugaaauaauaaaucugguagaaaaaugagaucuaaaaaaaaaaaaaaaaaaaaaaaaaaaaaaaaaaaaaaaaaaaaaaaaaaaaaaaaaaaaaaaaugcaucccccccccccccccccccccccccccccccaaaggcucuuuucagagccaccagaauu

SEQ ID NO: 10781 - RNA, 1079 nt, Artificial Sequence
  mRNA product Design d-2 comprising derived and/or modified sequence from HRSV(A2)__P03421.1__P (opt11)
gggagagcggcucggccauuuugucccagucaguccggaggcugcggcugcagaaguaccgccugcggaguaacugcaaagaagcuuaccauggaaaaauucgcgcccgaguuccacggcgaggacgcgaacaaccgcgcgacaaaguuccuagaaucaaucaagggcaaauucacgagcccgaaagaccccaagaaaaaggacucaaucauaagcgugaacucgaucgacaucgaggucacgaaagagagcccgaucacaagcaacagcaccauaauaaacccgaccaacgaaacagacgacaccgcgggcaacaaaccgaacuaccaaagaaaaccgcucgugagcuucaaagaagacccgaccccaagcgacaacccguucucaaaacuauacaaggaaacgaucgagaccuucgacaacaacgaggaagagagcucguacucguacgaggaaauaaacgaccaaacaaacgacaacauaaccgcacgccuagacaggaucgacgaaaaacucucggaaauacucgggaugcuacacacgcucguggucgcgagcgcaggcccgaccucggccagggacggcaucagggacgcaaugauaggccugcgagaggaaaugaucgagaaaauacgcaccgaagcacucaugaccaacgacagacucgaagccauggccaggcucaggaacgaagaauccgaaaagauggcgaaagacaccucggacgaggucucgcucaaccccacgagcgagaaacugaacaaccuacuggaagggaacgacagcgacaacgaccuuucccucgaggacuucugaggacuaguaauaaggaaacuguaugaaugucugugggcaggaagugaagagauccuucuguaaagguuuuuggaauuaugucugcugaauaauaaacuuuuuugaaauaauaaaucugguagaaaaaugagaucuaaaaaaaaaaaaaaaaaaaaaaaaaaaaaaaaaaaaaaaaaaaaaaaaaaaaaaaaaaaaaaaaugcaucccccccccccccccccccccccccccccccaaaggcucuuuucagagccaccagaauu

SEQ ID NO: 10782 - RNA, 1395 nt, Artificial Sequence
  mRNA product Design d-3 comprising derived and/or modified sequence from HRSV(A2)__P03421.1__P (wt)
gggagagggcgcuuggcuugcaaggacccugagcugcggcauugaagcacacccaacccaacucgacugaagucagccucacugaaccggaucugagaaucuucucucucugggcuugccagggcucuccgaaccuagcuagcauccucuucaauuccaacuagaaagcuuaccauggaaaaguuugcuccugaauuccauggagaagaugcaaacaacagggcuacuaaauuccuagaaucaauaaagggcaaauucacaucacccaaagaucccaagaaaaaagauaguaucauaucugucaacucaauagauauagaaguaaccaaagaaagcccuauaacaucaaauucaacuauuaucaacccaacaaaugagacagaugauacugcagggaacaagcccaauuaucaaagaaaaccucuaguaaguuucaaagaagacccuacaccaagugauaaucccuuuucuaaacuauacaaagaaaccauagaaacauuugauaacaaugaagaagaauccagcuauucauacgaagaaauaaaugaucagacaaacgauaauauaacagcaagauuagauaggauugaugaaaaauuaagugaaauacuaggaaugcuucacacauuaguaguggcaagugcaggaccuacaucugcucgggaugguauaagagaugccaugauugguuuaagagaagaaaugauagaaaaaaucagaacugaagcauuaaugaccaaugacagauuagaagcuauggcaagacucaggaaugaggaaagugaaaagauggcaaaagacacaucagaugaagugucucucaauccaacaucagagaaauugaacaaccuauuggaagggaaugauagugacaaugaucuaucacuugaagauuucugaggacuagugaagggaacacccaaauuuaauucagccuuaagcacaauuaauuaagagugaaacguaauuguacaagcaguuggucacccaccauagggcaugaucaacaccgcaaccuuuccuuuuucccccagugauucugaaaaaccccucuucccuucagcuugcuuagauguuccaaauuuaguaagcuuaaggcggccuacagaagaaaaagaaaaaaaaggccacaaaaguucccucucacuuucaguaaauaaaauaaaagcagcaacagaaauaaagaaauaaaugaaauucaaaaugaaauaaauauuguguugugcagcauuaaaaaaucaauaaaaauuaaaaaugagcaagaucuaaaaaaaaaaaaaaaaaaaaaaaaaaaaaaaaaaaaaaaaaaaaaaaaaaaaaaaaaaaaaaaaugcaucccccccccccccccccccccccccccccccaaaggcucuuuucagagccaccagaauu

SEQ ID NO: 10783 - RNA, 1395 nt, Artificial Sequence
  mRNA product Design d-3 comprising derived and/or modified sequence from HRSV(A2)__P03421.1__P (opt1)
gggagagggcgcuuggcuugcaaggacccugagcugcggcauugaagcacacccaacccaacucgacugaagucagccucacugaaccggaucugagaaucuucucucucugggcuugccagggcucuccgaaccuagcuagcauccucuucaauuccaacuagaaagcuuaccauggagaaguucgcccccgaguuccacggcgaggacgccaacaaccgcgcgaccaaguuccuggagagcaucaaggggaaguucaccuccccgaaggaccccaagaagaaggacagcaucaucuccgugaacagcaucgacaucgaggucacgaaggagucccccaucaccagcaacuccaccaucaucaaccccaccaacgagacggacgacaccgccggcaacaagccgaacuaccagcggaagccccucgugagcuucaaggaggaccccacccccuccgacaacccguucagcaagcuguacaaggagaccaucgagacguucgacaacaacgaggaggaguccagcuacuccuacgaggagaucaacgaccagaccaacgacaacaucaccgcccgccuggaccggaucgacgagaagcucagcgagauccuggggaugcugcacacccucguggucgccuccgccggccccacgagcgcgcgcgacgggauccgggacgccaugaucggccugcgcgaggagaugaucgagaagauccggaccgaggcccugaugaccaacgaccgccucgaggccauggcgcggcugcgcaacgaggaguccgagaagauggccaaggacaccagcgacgaggugucccugaaccccacgagcgagaagcucaacaaccugcuggagggcaacgacagcgacaacgaccucucccuggaggacuucugaggacuagugaagggaacacccaaauuuaauucagccuuaagcacaauuaauuaagagugaaacguaauuguacaagcaguuggucacccaccauagggcaugaucaacaccgcaaccuuuccuuuuucccccagugauucugaaaaaccccucuucccuucagcuugcuuagauguuccaaauuuaguaagcuuaaggcggccuacagaagaaaaagaaaaaaaaggccacaaaaguucccucucacuuucaguaaauaaaauaaaagcagcaacagaaauaaagaaauaaaugaaauucaaaaugaaauaaauauuguguugugcagcauuaaaaaaucaauaaaaauuaaaaaugagcaagaucuaaaaaaaaaaaaaaaaaaaaaaaaaaaaaaaaaaaaaaaaaaaaaaaaaaaaaaaaaaaaaaaaugcaucccccccccccccccccccccccccccccccaaaggcucuuuucagagccaccagaauu

SEQ ID NO: 10784 - RNA, 1395 nt, Artificial Sequence
  mRNA product Design d-3 comprising derived and/or modified sequence from HRSV(A2)__P03421.1__P (opt2)
gggagagggcgcuuggcuugcaaggacccugagcugcggcauugaagcacacccaacccaacucgacugaagucagccucacugaaccggaucugagaaucuucucucucugggcuugccagggcucuccgaaccuagcuagcauccucuucaauuccaacuagaaagcuuaccauggagaaguucgcccccgaguuccacggcgaggacgccaacaaccgcgccaccaaguuccucgaguccaucaagggcaaguucaccucccccaaggaccccaagaagaaggacuccaucaucuccgucaacuccaucgacaucgaggucaccaaggagucccccaucaccuccaacuccaccaucaucaaccccaccaacgagaccgacgacaccgccggcaacaagcccaacuaccagcgcaagccccucgucuccuucaaggaggaccccacccccuccgacaaccccuucuccaagcucuacaaggagaccaucgagaccuucgacaacaacgaggaggaguccuccuacuccuacgaggagaucaacgaccagaccaacgacaacaucaccgcccgccucgaccgcaucgacgagaagcucuccgagauccucggcaugcuccacacccucgucgucgccuccgccggccccaccuccgcccgcgacggcauccgcgacgccaugaucggccuccgcgaggagaugaucgagaagauccgcaccgaggcccucaugaccaacgaccgccucgaggccauggcccgccuccgcaacgaggaguccgagaagauggccaaggacaccuccgacgaggucucccucaaccccaccuccgagaagcucaacaaccuccucgagggcaacgacuccgacaacgaccucucccucgaggacuucugaggacuagugaagggaacacccaaauuuaauucagccuuaagcacaauuaauuaagagugaaacguaauuguacaagcaguuggucacccaccauagggcaugaucaacaccgcaaccuuuccuuuuucccccagugauucugaaaaaccccucuucccuucagcuugcuuagauguuccaaauuuaguaagcuuaaggcggccuacagaagaaaaagaaaaaaaaggccacaaaaguucccucucacuuucaguaaauaaaauaaaagcagcaacagaaauaaagaaauaaaugaaauucaaaaugaaauaaauauuguguugugcagcauuaaaaaaucaauaaaaauuaaaaaugagcaagaucuaaaaaaaaaaaaaaaaaaaaaaaaaaaaaaaaaaaaaaaaaaaaaaaaaaaaaaaaaaaaaaaaugcaucccccccccccccccccccccccccccccccaaaggcucuuuucagagccaccagaauu

SEQ ID NO: 10785 - RNA, 1395 nt, Artificial Sequence
  mRNA product Design d-3 comprising derived and/or modified sequence from HRSV(A2)__P03421.1__P (opt3)
gggagagggcgcuuggcuugcaaggacccugagcugcggcauugaagcacacccaacccaacucgacugaagucagccucacugaaccggaucugagaaucuucucucucugggcuugccagggcucuccgaaccuagcuagcauccucuucaauuccaacuagaaagcuuaccauggagaaguucgcccccgaauuucacggcgaggacgcuaacaauagagcaaccaaauuccuggaaagcaucaaggggaaauuuacauccccuaaggauccgaaaaagaaggacucuauuauaucagugaacaguaucgauauugaggucacuaaagaaagcccaaucacguccaauucuaccauuaucaaccccacaaaugagacugacgauaccgccggaaacaagccuaauuaccagaggaaaccacucguuucguucaaggaggaccccacaccuucagauaacccauuuagcaaacuuuauaaggaaaccauagagacuuucgacaauaacgaagaggagaguuccuacucuuaugaagagaucaaugaucaaacaaacgacaauauuaccgcgcggcuggaucgcaucgacgaaaaguugagcgagauuuuagguaugcugcauacgcuagugguagcuuccgccggccccacuucagcacgagaugggauccgugacgccaugauaggacucagagaagagaugauugagaaaaucaggaccgaagcucugaugacaaacgaccggcuugaggcaauggcccgccugagaaaugaagagagugaaaagauggcuaaagauacuagcgacgaggugucuuugaacccuaccuccgagaagcucaacaaucugcuggaaggcaacgauucagacaaugaucucagcuuagaggacuuuugaggacuagugaagggaacacccaaauuuaauucagccuuaagcacaauuaauuaagagugaaacguaauuguacaagcaguuggucacccaccauagggcaugaucaacaccgcaaccuuuccuuuuucccccagugauucugaaaaaccccucuucccuucagcuugcuuagauguuccaaauuuaguaagcuuaaggcggccuacagaagaaaaagaaaaaaaaggccacaaaaguucccucucacuuucaguaaauaaaauaaaagcagcaacagaaauaaagaaauaaaugaaauucaaaaugaaauaaauauuguguugugcagcauuaaaaaaucaauaaaaauuaaaaaugagcaagaucuaaaaaaaaaaaaaaaaaaaaaaaaaaaaaaaaaaaaaaaaaaaaaaaaaaaaaaaaaaaaaaaaugcaucccccccccccccccccccccccccccccccaaaggcucuuuucagagccaccagaauu

SEQ ID NO: 10786 - RNA, 1395 nt, Artificial Sequence
  mRNA product Design d-3 comprising derived and/or modified sequence from HRSV(A2)__P03421.1__P (opt4)
gggagagggcgcuuggcuugcaaggacccugagcugcggcauugaagcacacccaacccaacucgacugaagucagccucacugaaccggaucugagaaucuucucucucugggcuugccagggcucuccgaaccuagcuagcauccucuucaauuccaacuagaaagcuuaccauggagaaguucgcccccgaguuccacggcgaggacgccaacaacagagccaccaaguuccuggagagcaucaagggcaaguucaccagccccaaggaccccaagaagaaggacagcaucaucagcgugaacagcaucgacaucgaggugaccaaggagagccccaucaccagcaacagcaccaucaucaaccccaccaacgagaccgacgacaccgccggcaacaagcccaacuaccagagaaagccccuggugagcuucaaggaggaccccacccccagcgacaaccccuucagcaagcuguacaaggagaccaucgagaccuucgacaacaacgaggaggagagcagcuacagcuacgaggagaucaacgaccagaccaacgacaacaucaccgccagacuggacagaaucgacgagaagcugagcgagauccugggcaugcugcacacccuggugguggccagcgccggccccaccagcgccagagacggcaucagagacgccaugaucggccugagagaggagaugaucgagaagaucagaaccgaggcccugaugaccaacgacagacuggaggccauggccagacugagaaacgaggagagcgagaagauggccaaggacaccagcgacgaggugagccugaaccccaccagcgagaagcugaacaaccugcuggagggcaacgacagcgacaacgaccugagccuggaggacuucugaggacuagugaagggaacacccaaauuuaauucagccuuaagcacaauuaauuaagagugaaacguaauuguacaagcaguuggucacccaccauagggcaugaucaacaccgcaaccuuuccuuuuucccccagugauucugaaaaaccccucuucccuucagcuugcuuagauguuccaaauuuaguaagcuuaaggcggccuacagaagaaaaagaaaaaaaaggccacaaaaguucccucucacuuucaguaaauaaaauaaaagcagcaacagaaauaaagaaauaaaugaaauucaaaaugaaauaaauauuguguugugcagcauuaaaaaaucaauaaaaauuaaaaaugagcaagaucuaaaaaaaaaaaaaaaaaaaaaaaaaaaaaaaaaaaaaaaaaaaaaaaaaaaaaaaaaaaaaaaaugcaucccccccccccccccccccccccccccccccaaaggcucuuuucagagccaccagaauu

SEQ ID NO: 10787 - RNA, 1395 nt, Artificial Sequence
  mRNA product Design d-3 comprising derived and/or modified sequence from HRSV(A2)__P03421.1__P (opt5)
gggagagggcgcuuggcuugcaaggacccugagcugcggcauugaagcacacccaacccaacucgacugaagucagccucacugaaccggaucugagaaucuucucucucugggcuugccagggcucuccgaaccuagcuagcauccucuucaauuccaacuagaaagcuuaccauggagaaguucgcccccgaauuucacggcgaggacgcuaacaauagagccaccaaauuccuggaaagcaucaaggggaaauuuacauccccuaaggauccgaaaaagaaggacucuauuaucagcgugaacuccauugauaucgaggucacgaaagaaucucccauuaccagcaauuccacaaucaucaacccuaccaaugagacagacgauaccgcgggaaacaagcccaauuaccagcggaaaccucucguuucuuucaaggaggaccccacaccuagcgauaacccguuuuccaaacuguauaaggaaaccauugagacguucgacaauaacgaagaggagagcucuuacuccuaugaagagaucaaugaucaaaccaacgacaauauuacagcucgccuugauagaaucgacgaaaagcugagcgagauucucggcaugcugcauacccuugugguggccucugccgggcccacauccgcucgggauggaauccgcgacgccaugauuggccugagagaagagaugaucgagaaaauccggaccgaagcucucaugacgaacgaccgccuggaggccauggcgagacugcggaaugaagagagcgaaaagauggccaaagauacaucugacgaggucucccucaacccuaccagcgagaagcugaacaaucuucuggaagggaacgauuccgacaaugaucucucucuggaggacuuuugaggacuagugaagggaacacccaaauuuaauucagccuuaagcacaauuaauuaagagugaaacguaauuguacaagcaguuggucacccaccauagggcaugaucaacaccgcaaccuuuccuuuuucccccagugauucugaaaaaccccucuucccuucagcuugcuuagauguuccaaauuuaguaagcuuaaggcggccuacagaagaaaaagaaaaaaaaggccacaaaaguucccucucacuuucaguaaauaaaauaaaagcagcaacagaaauaaagaaauaaaugaaauucaaaaugaaauaaauauuguguugugcagcauuaaaaaaucaauaaaaauuaaaaaugagcaagaucuaaaaaaaaaaaaaaaaaaaaaaaaaaaaaaaaaaaaaaaaaaaaaaaaaaaaaaaaaaaaaaaaugcaucccccccccccccccccccccccccccccccaaaggcucuuuucagagccaccagaauu

SEQ ID NO: 10788 - RNA, 1395 nt, Artificial Sequence
  mRNA product Design d-3 comprising derived and/or modified sequence from HRSV(A2)__P03421.1__P (opt6)
gggagagggcgcuuggcuugcaaggacccugagcugcggcauugaagcacacccaacccaacucgacugaagucagccucacugaaccggaucugagaaucuucucucucugggcuugccagggcucuccgaaccuagcuagcauccucuucaauuccaacuagaaagcuuaccauggaaaaauucgcaccagaauuucacggagaagacgcaaacaacagagcaacaaaauucuuagaaucaaucaaaggaaaauucacaagcccaaaagacccaaaaaaaaaagacucaauaauaagcguaaacucaauagacauagaaguaacaaaagaaagcccaauaacaagcaacagcacaauaauaaacccaacaaacgaaacagaugacacagcuggaaauaaaccaaacuaccaaagaaaaccccuagucagcuucaaagaagaccccacaccaucagacaacccauucagcaaacuauauaaagaaacaauagaaacauuugacaacaacgaagaagaaucaucauacucauacgaagaaauaaacgaccaaacaaacgacaacauaaccgcaagauuagacagaauagaugaaaaacuaucagaaauacuaggaaugcuacacacauuaguaguagcaagcgcaggaccaacaucagcaagagacggaauaagagacgcaaugauaggacucagagaagaaaugauagaaaaaauaagaacagaagcacuaaugacaaacgacagauuagaagcaauggcaagacuaagaaaugaagaaucggaaaaaauggcaaaagacacaucagacgaaguaagccuaaacccaacaucagaaaaauuaaauaaccuacuagaaggaaacgacagcgacaacgacuuaucacuagaagacuucuaaggacuagugaagggaacacccaaauuuaauucagccuuaagcacaauuaauuaagagugaaacguaauuguacaagcaguuggucacccaccauagggcaugaucaacaccgcaaccuuuccuuuuucccccagugauucugaaaaaccccucuucccuucagcuugcuuagauguuccaaauuuaguaagcuuaaggcggccuacagaagaaaaagaaaaaaaaggccacaaaaguucccucucacuuucaguaaauaaaauaaaagcagcaacagaaauaaagaaauaaaugaaauucaaaaugaaauaaauauuguguugugcagcauuaaaaaaucaauaaaaauuaaaaaugagcaagaucuaaaaaaaaaaaaaaaaaaaaaaaaaaaaaaaaaaaaaaaaaaaaaaaaaaaaaaaaaaaaaaaaugcaucccccccccccccccccccccccccccccccaaaggcucuuuucagagccaccagaauu

SEQ ID NO: 10789 - RNA, 1395 nt, Artificial Sequence
  mRNA product Design d-3 comprising derived and/or modified sequence from HRSV(A2)__P03421.1__P (opt11)
gggagagggcgcuuggcuugcaaggacccugagcugcggcauugaagcacacccaacccaacucgacugaagucagccucacugaaccggaucugagaaucuucucucucugggcuugccagggcucuccgaaccuagcuagcauccucuucaauuccaacuagaaagcuuaccauggaaaaauucgcgcccgaguuccacggcgaggacgcgaacaaccgcgcgacaaaguuccuagaaucaaucaagggcaaauucacgagcccgaaagaccccaagaaaaaggacucaaucauaagcgugaacucgaucgacaucgaggucacgaaagagagcccgaucacaagcaacagcaccauaauaaacccgaccaacgaaacagacgacaccgcgggcaacaaaccgaacuaccaaagaaaaccgcucgugagcuucaaagaagacccgaccccaagcgacaacccguucucaaaacuauacaaggaaacgaucgagaccuucgacaacaacgaggaagagagcucguacucguacgaggaaauaaacgaccaaacaaacgacaacauaaccgcacgccuagacaggaucgacgaaaaacucucggaaauacucgggaugcuacacacgcucguggucgcgagcgcaggcccgaccucggccagggacggcaucagggacgcaaugauaggccugcgagaggaaaugaucgagaaaauacgcaccgaagcacucaugaccaacgacagacucgaagccauggccaggcucaggaacgaagaauccgaaaagauggcgaaagacaccucggacgaggucucgcucaaccccacgagcgagaaacugaacaaccuacuggaagggaacgacagcgacaacgaccuuucccucgaggacuucugaggacuagugaagggaacacccaaauuuaauucagccuuaagcacaauuaauuaagagugaaacguaauuguacaagcaguuggucacccaccauagggcaugaucaacaccgcaaccuuuccuuuuucccccagugauucugaaaaaccccucuucccuucagcuugcuuagauguuccaaauuuaguaagcuuaaggcggccuacagaagaaaaagaaaaaaaaggccacaaaaguucccucucacuuucaguaaauaaaauaaaagcagcaacagaaauaaagaaauaaaugaaauucaaaaugaaauaaauauuguguugugcagcauuaaaaaaucaauaaaaauuaaaaaugagcaagaucuaaaaaaaaaaaaaaaaaaaaaaaaaaaaaaaaaaaaaaaaaaaaaaaaaaaaaaaaaaaaaaaaugcaucccccccccccccccccccccccccccccccaaaggcucuuuucagagccaccagaauu

SEQ ID NO: 10790 - RNA, 1078 nt, Artificial Sequence
  mRNA product Design d-4 comprising derived and/or modified sequence from HRSV(A2)__P03421.1__P (wt)
gggagagucccgcagucggcguccagcggcucugcuuguucgugugugugucguugcaggccuuauucaagcuuaccauggaaaaguuugcuccugaauuccauggagaagaugcaaacaacagggcuacuaaauuccuagaaucaauaaagggcaaauucacaucacccaaagaucccaagaaaaaagauaguaucauaucugucaacucaauagauauagaaguaaccaaagaaagcccuauaacaucaaauucaacuauuaucaacccaacaaaugagacagaugauacugcagggaacaagcccaauuaucaaagaaaaccucuaguaaguuucaaagaagacccuacaccaagugauaaucccuuuucuaaacuauacaaagaaaccauagaaacauuugauaacaaugaagaagaauccagcuauucauacgaagaaauaaaugaucagacaaacgauaauauaacagcaagauuagauaggauugaugaaaaauuaagugaaauacuaggaaugcuucacacauuaguaguggcaagugcaggaccuacaucugcucgggaugguauaagagaugccaugauugguuuaagagaagaaaugauagaaaaaaucagaacugaagcauuaaugaccaaugacagauuagaagcuauggcaagacucaggaaugaggaaagugaaaagauggcaaaagacacaucagaugaagugucucucaauccaacaucagagaaauugaacaaccuauuggaagggaaugauagugacaaugaucuaucacuugaagauuucugaggacuaguggaagcauuuuccuggcugauuaaaagaaauuacucagcuauggucaucuguuccuguuagaaggcuaugcagcauauuauauacuaugcgcauguuaugaaaugcauaauaaaaaauuuuaaaaaaucuaaaagaucuaaaaaaaaaaaaaaaaaaaaaaaaaaaaaaaaaaaaaaaaaaaaaaaaaaaaaaaaaaaaaaaaugcaucccccccccccccccccccccccccccccccaaaggcucuuuucagagccaccagaauu

SEQ ID NO: 10791 - RNA, 1078 nt, Artificial Sequence
  mRNA product Design d-4 comprising derived and/or modified sequence from HRSV(A2)__P03421.1__P (opt1)
gggagagucccgcagucggcguccagcggcucugcuuguucgugugugugucguugcaggccuuauucaagcuuaccauggagaaguucgcccccgaguuccacggcgaggacgccaacaaccgcgcgaccaaguuccuggagagcaucaaggggaaguucaccuccccgaaggaccccaagaagaaggacagcaucaucuccgugaacagcaucgacaucgaggucacgaaggagucccccaucaccagcaacuccaccaucaucaaccccaccaacgagacggacgacaccgccggcaacaagccgaacuaccagcggaagccccucgugagcuucaaggaggaccccacccccuccgacaacccguucagcaagcuguacaaggagaccaucgagacguucgacaacaacgaggaggaguccagcuacuccuacgaggagaucaacgaccagaccaacgacaacaucaccgcccgccuggaccggaucgacgagaagcucagcgagauccuggggaugcugcacacccucguggucgccuccgccggccccacgagcgcgcgcgacgggauccgggacgccaugaucggccugcgcgaggagaugaucgagaagauccggaccgaggcccugaugaccaacgaccgccucgaggccauggcgcggcugcgcaacgaggaguccgagaagauggccaaggacaccagcgacgaggugucccugaaccccacgagcgagaagcucaacaaccugcuggagggcaacgacagcgacaacgaccucucccuggaggacuucugaggacuaguggaagcauuuuccuggcugauuaaaagaaauuacucagcuauggucaucuguuccuguuagaaggcuaugcagcauauuauauacuaugcgcauguuaugaaaugcauaauaaaaaauuuuaaaaaaucuaaaagaucuaaaaaaaaaaaaaaaaaaaaaaaaaaaaaaaaaaaaaaaaaaaaaaaaaaaaaaaaaaaaaaaaugcaucccccccccccccccccccccccccccccccaaaggcucuuuucagagccaccagaauu

SEQ ID NO: 10792 - RNA, 1078 nt, Artificial Sequence
  mRNA product Design d-4 comprising derived and/or modified sequence from HRSV(A2)__P03421.1__P (opt2)
gggagagucccgcagucggcguccagcggcucugcuuguucgugugugugucguugcaggccuuauucaagcuuaccauggagaaguucgcccccgaguuccacggcgaggacgccaacaaccgcgccaccaaguuccucgaguccaucaagggcaaguucaccucccccaaggaccccaagaagaaggacuccaucaucuccgucaacuccaucgacaucgaggucaccaaggagucccccaucaccuccaacuccaccaucaucaaccccaccaacgagaccgacgacaccgccggcaacaagcccaacuaccagcgcaagccccucgucuccuucaaggaggaccccacccccuccgacaaccccuucuccaagcucuacaaggagaccaucgagaccuucgacaacaacgaggaggaguccuccuacuccuacgaggagaucaacgaccagaccaacgacaacaucaccgcccgccucgaccgcaucgacgagaagcucuccgagauccucggcaugcuccacacccucgucgucgccuccgccggccccaccuccgcccgcgacggcauccgcgacgccaugaucggccuccgcgaggagaugaucgagaagauccgcaccgaggcccucaugaccaacgaccgccucgaggccauggcccgccuccgcaacgaggaguccgagaagauggccaaggacaccuccgacgaggucucccucaaccccaccuccgagaagcucaacaaccuccucgagggcaacgacuccgacaacgaccucucccucgaggacuucugaggacuaguggaagcauuuuccuggcugauuaaaagaaauuacucagcuauggucaucuguuccuguuagaaggcuaugcagcauauuauauacuaugcgcauguuaugaaaugcauaauaaaaaauuuuaaaaaaucuaaaagaucuaaaaaaaaaaaaaaaaaaaaaaaaaaaaaaaaaaaaaaaaaaaaaaaaaaaaaaaaaaaaaaaaugcaucccccccccccccccccccccccccccccccaaaggcucuuuucagagccaccagaauu

SEQ ID NO: 10793 - RNA, 1078 nt, Artificial Sequence
  mRNA product Design d-4 comprising derived and/or modified sequence from HRSV(A2)__P03421.1__P (opt3)
gggagagucccgcagucggcguccagcggcucugcuuguucgugugugugucguugcaggccuuauucaagcuuaccauggagaaguucgcccccgaauuucacggcgaggacgcuaacaauagagcaaccaaauuccuggaaagcaucaaggggaaauuuacauccccuaaggauccgaaaaagaaggacucuauuauaucagugaacaguaucgauauugaggucacuaaagaaagcccaaucacguccaauucuaccauuaucaaccccacaaaugagacugacgauaccgccggaaacaagccuaauuaccagaggaaaccacucguuucguucaaggaggaccccacaccuucagauaacccauuuagcaaacuuuauaaggaaaccauagagacuuucgacaauaacgaagaggagaguuccuacucuuaugaagagaucaaugaucaaacaaacgacaauauuaccgcgcggcuggaucgcaucgacgaaaaguugagcgagauuuuagguaugcugcauacgcuagugguagcuuccgccggccccacuucagcacgagaugggauccgugacgccaugauaggacucagagaagagaugauugagaaaaucaggaccgaagcucugaugacaaacgaccggcuugaggcaauggcccgccugagaaaugaagagagugaaaagauggcuaaagauacuagcgacgaggugucuuugaacccuaccuccgagaagcucaacaaucugcuggaaggcaacgauucagacaaugaucucagcuuagaggacuuuugaggacuaguggaagcauuuuccuggcugauuaaaagaaauuacucagcuauggucaucuguuccuguuagaaggcuaugcagcauauuauauacuaugcgcauguuaugaaaugcauaauaaaaaauuuuaaaaaaucuaaaagaucuaaaaaaaaaaaaaaaaaaaaaaaaaaaaaaaaaaaaaaaaaaaaaaaaaaaaaaaaaaaaaaaaugcaucccccccccccccccccccccccccccccccaaaggcucuuuucagagccaccagaauu

SEQ ID NO: 10794 - RNA, 1078 nt, Artificial Sequence
  mRNA product Design d-4 comprising derived and/or modified sequence from HRSV(A2)__P03421.1__P (opt4)
gggagagucccgcagucggcguccagcggcucugcuuguucgugugugugucguugcaggccuuauucaagcuuaccauggagaaguucgcccccgaguuccacggcgaggacgccaacaacagagccaccaaguuccuggagagcaucaagggcaaguucaccagccccaaggaccccaagaagaaggacagcaucaucagcgugaacagcaucgacaucgaggugaccaaggagagccccaucaccagcaacagcaccaucaucaaccccaccaacgagaccgacgacaccgccggcaacaagcccaacuaccagagaaagccccuggugagcuucaaggaggaccccacccccagcgacaaccccuucagcaagcuguacaaggagaccaucgagaccuucgacaacaacgaggaggagagcagcuacagcuacgaggagaucaacgaccagaccaacgacaacaucaccgccagacuggacagaaucgacgagaagcugagcgagauccugggcaugcugcacacccuggugguggccagcgccggccccaccagcgccagagacggcaucagagacgccaugaucggccugagagaggagaugaucgagaagaucagaaccgaggcccugaugaccaacgacagacuggaggccauggccagacugagaaacgaggagagcgagaagauggccaaggacaccagcgacgaggugagccugaaccccaccagcgagaagcugaacaaccugcuggagggcaacgacagcgacaacgaccugagccuggaggacuucugaggacuaguggaagcauuuuccuggcugauuaaaagaaauuacucagcuauggucaucuguuccuguuagaaggcuaugcagcauauuauauacuaugcgcauguuaugaaaugcauaauaaaaaauuuuaaaaaaucuaaaagaucuaaaaaaaaaaaaaaaaaaaaaaaaaaaaaaaaaaaaaaaaaaaaaaaaaaaaaaaaaaaaaaaaugcaucccccccccccccccccccccccccccccccaaaggcucuuuucagagccaccagaauu

SEQ ID NO: 10795 - RNA, 1078 nt, Artificial Sequence
  mRNA product Design d-4 comprising derived and/or modified sequence from HRSV(A2)__P03421.1__P (opt5)
gggagagucccgcagucggcguccagcggcucugcuuguucgugugugugucguugcaggccuuauucaagcuuaccauggagaaguucgcccccgaauuucacggcgaggacgcuaacaauagagccaccaaauuccuggaaagcaucaaggggaaauuuacauccccuaaggauccgaaaaagaaggacucuauuaucagcgugaacuccauugauaucgaggucacgaaagaaucucccauuaccagcaauuccacaaucaucaacccuaccaaugagacagacgauaccgcgggaaacaagcccaauuaccagcggaaaccucucguuucuuucaaggaggaccccacaccuagcgauaacccguuuuccaaacuguauaaggaaaccauugagacguucgacaauaacgaagaggagagcucuuacuccuaugaagagaucaaugaucaaaccaacgacaauauuacagcucgccuugauagaaucgacgaaaagcugagcgagauucucggcaugcugcauacccuugugguggccucugccgggcccacauccgcucgggauggaauccgcgacgccaugauuggccugagagaagagaugaucgagaaaauccggaccgaagcucucaugacgaacgaccgccuggaggccauggcgagacugcggaaugaagagagcgaaaagauggccaaagauacaucugacgaggucucccucaacccuaccagcgagaagcugaacaaucuucuggaagggaacgauuccgacaaugaucucucucuggaggacuuuugaggacuaguggaagcauuuuccuggcugauuaaaagaaauuacucagcuauggucaucuguuccuguuagaaggcuaugcagcauauuauauacuaugcgcauguuaugaaaugcauaauaaaaaauuuuaaaaaaucuaaaagaucuaaaaaaaaaaaaaaaaaaaaaaaaaaaaaaaaaaaaaaaaaaaaaaaaaaaaaaaaaaaaaaaaugcaucccccccccccccccccccccccccccccccaaaggcucuuuucagagccaccagaauu

SEQ ID NO: 10796 - RNA, 1078 nt, Artificial Sequence
  mRNA product Design d-4 comprising derived and/or modified sequence from HRSV(A2)__P03421.1__P (opt6)
gggagagucccgcagucggcguccagcggcucugcuuguucgugugugugucguugcaggccuuauucaagcuuaccauggaaaaauucgcaccagaauuucacggagaagacgcaaacaacagagcaacaaaauucuuagaaucaaucaaaggaaaauucacaagcccaaaagacccaaaaaaaaaagacucaauaauaagcguaaacucaauagacauagaaguaacaaaagaaagcccaauaacaagcaacagcacaauaauaaacccaacaaacgaaacagaugacacagcuggaaauaaaccaaacuaccaaagaaaaccccuagucagcuucaaagaagaccccacaccaucagacaacccauucagcaaacuauauaaagaaacaauagaaacauuugacaacaacgaagaagaaucaucauacucauacgaagaaauaaacgaccaaacaaacgacaacauaaccgcaagauuagacagaauagaugaaaaacuaucagaaauacuaggaaugcuacacacauuaguaguagcaagcgcaggaccaacaucagcaagagacggaauaagagacgcaaugauaggacucagagaagaaaugauagaaaaaauaagaacagaagcacuaaugacaaacgacagauuagaagcaauggcaagacuaagaaaugaagaaucggaaaaaauggcaaaagacacaucagacgaaguaagccuaaacccaacaucagaaaaauuaaauaaccuacuagaaggaaacgacagcgacaacgacuuaucacuagaagacuucuaaggacuaguggaagcauuuuccuggcugauuaaaagaaauuacucagcuauggucaucuguuccuguuagaaggcuaugcagcauauuauauacuaugcgcauguuaugaaaugcauaauaaaaaauuuuaaaaaaucuaaaagaucuaaaaaaaaaaaaaaaaaaaaaaaaaaaaaaaaaaaaaaaaaaaaaaaaaaaaaaaaaaaaaaaaugcaucccccccccccccccccccccccccccccccaaaggcucuuuucagagccaccagaauu

SEQ ID NO: 10797 - RNA, 1078 nt, Artificial Sequence
  mRNA product Design d-4 comprising derived and/or modified sequence from HRSV(A2)__P03421.1__P (opt11)
gggagagucccgcagucggcguccagcggcucugcuuguucgugugugugucguugcaggccuuauucaagcuuaccauggaaaaauucgcgcccgaguuccacggcgaggacgcgaacaaccgcgcgacaaaguuccuagaaucaaucaagggcaaauucacgagcccgaaagaccccaagaaaaaggacucaaucauaagcgugaacucgaucgacaucgaggucacgaaagagagcccgaucacaagcaacagcaccauaauaaacccgaccaacgaaacagacgacaccgcgggcaacaaaccgaacuaccaaagaaaaccgcucgugagcuucaaagaagacccgaccccaagcgacaacccguucucaaaacuauacaaggaaacgaucgagaccuucgacaacaacgaggaagagagcucguacucguacgaggaaauaaacgaccaaacaaacgacaacauaaccgcacgccuagacaggaucgacgaaaaacucucggaaauacucgggaugcuacacacgcucguggucgcgagcgcaggcccgaccucggccagggacggcaucagggacgcaaugauaggccugcgagaggaaaugaucgagaaaauacgcaccgaagcacucaugaccaacgacagacucgaagccauggccaggcucaggaacgaagaauccgaaaagauggcgaaagacaccucggacgaggucucgcucaaccccacgagcgagaaacugaacaaccuacuggaagggaacgacagcgacaacgaccuuucccucgaggacuucugaggacuaguggaagcauuuuccuggcugauuaaaagaaauuacucagcuauggucaucuguuccuguuagaaggcuaugcagcauauuauauacuaugcgcauguuaugaaaugcauaauaaaaaauuuuaaaaaaucuaaaagaucuaaaaaaaaaaaaaaaaaaaaaaaaaaaaaaaaaaaaaaaaaaaaaaaaaaaaaaaaaaaaaaaaugcaucccccccccccccccccccccccccccccccaaaggcucuuuucagagccaccagaauu

SEQ ID NO: 10798 - RNA, 1175 nt, Artificial Sequence
  mRNA product Design d-5 comprising derived and/or modified sequence from HRSV(A2)__P03421.1__P (wt)
gggagagggcgcuuggcuugcaaggacccugagcugcggcauugaagcacacccaacccaacucgacugaagucagccucacugaaccggaucugagaaucuucucucucugggcuugccagggcucuccgaaccuagcuagcauccucuucaauuccaacuagaaagcuuaccauggaaaaguuugcuccugaauuccauggagaagaugcaaacaacagggcuacuaaauuccuagaaucaauaaagggcaaauucacaucacccaaagaucccaagaaaaaagauaguaucauaucugucaacucaauagauauagaaguaaccaaagaaagcccuauaacaucaaauucaacuauuaucaacccaacaaaugagacagaugauacugcagggaacaagcccaauuaucaaagaaaaccucuaguaaguuucaaagaagacccuacaccaagugauaaucccuuuucuaaacuauacaaagaaaccauagaaacauuugauaacaaugaagaagaauccagcuauucauacgaagaaauaaaugaucagacaaacgauaauauaacagcaagauuagauaggauugaugaaaaauuaagugaaauacuaggaaugcuucacacauuaguaguggcaagugcaggaccuacaucugcucgggaugguauaagagaugccaugauugguuuaagagaagaaaugauagaaaaaaucagaacugaagcauuaaugaccaaugacagauuagaagcuauggcaagacucaggaaugaggaaagugaaaagauggcaaaagacacaucagaugaagugucucucaauccaacaucagagaaauugaacaaccuauuggaagggaaugauagugacaaugaucuaucacuugaagauuucugaggacuaguggaagcauuuuccuggcugauuaaaagaaauuacucagcuauggucaucuguuccuguuagaaggcuaugcagcauauuauauacuaugcgcauguuaugaaaugcauaauaaaaaauuuuaaaaaaucuaaaagaucuaaaaaaaaaaaaaaaaaaaaaaaaaaaaaaaaaaaaaaaaaaaaaaaaaaaaaaaaaaaaaaaaugcaucccccccccccccccccccccccccccccccaaaggcucuuuucagagccaccagaauu

SEQ ID NO: 10799 - RNA, 1175 nt, Artificial Sequence
  mRNA product Design d-5 comprising derived and/or modified sequence from HRSV(A2)__P03421.1__P (opt1)
gggagagggcgcuuggcuugcaaggacccugagcugcggcauugaagcacacccaacccaacucgacugaagucagccucacugaaccggaucugagaaucuucucucucugggcuugccagggcucuccgaaccuagcuagcauccucuucaauuccaacuagaaagcuuaccauggagaaguucgcccccgaguuccacggcgaggacgccaacaaccgcgcgaccaaguuccuggagagcaucaaggggaaguucaccuccccgaaggaccccaagaagaaggacagcaucaucuccgugaacagcaucgacaucgaggucacgaaggagucccccaucaccagcaacuccaccaucaucaaccccaccaacgagacggacgacaccgccggcaacaagccgaacuaccagcggaagccccucgugagcuucaaggaggaccccacccccuccgacaacccguucagcaagcuguacaaggagaccaucgagacguucgacaacaacgaggaggaguccagcuacuccuacgaggagaucaacgaccagaccaacgacaacaucaccgcccgccuggaccggaucgacgagaagcucagcgagauccuggggaugcugcacacccucguggucgccuccgccggccccacgagcgcgcgcgacgggauccgggacgccaugaucggccugcgcgaggagaugaucgagaagauccggaccgaggcccugaugaccaacgaccgccucgaggccauggcgcggcugcgcaacgaggaguccgagaagauggccaaggacaccagcgacgaggugucccugaaccccacgagcgagaagcucaacaaccugcuggagggcaacgacagcgacaacgaccucucccuggaggacuucugaggacuaguggaagcauuuuccuggcugauuaaaagaaauuacucagcuauggucaucuguuccuguuagaaggcuaugcagcauauuauauacuaugcgcauguuaugaaaugcauaauaaaaaauuuuaaaaaaucuaaaagaucuaaaaaaaaaaaaaaaaaaaaaaaaaaaaaaaaaaaaaaaaaaaaaaaaaaaaaaaaaaaaaaaaugcaucccccccccccccccccccccccccccccccaaaggcucuuuucagagccaccagaauu

SEQ ID NO: 10800 - RNA, 1175 nt, Artificial Sequence
  mRNA product Design d-5 comprising derived and/or modified sequence from HRSV(A2)__P03421.1__P (opt2)
gggagagggcgcuuggcuugcaaggacccugagcugcggcauugaagcacacccaacccaacucgacugaagucagccucacugaaccggaucugagaaucuucucucucugggcuugccagggcucuccgaaccuagcuagcauccucuucaauuccaacuagaaagcuuaccauggagaaguucgcccccgaguuccacggcgaggacgccaacaaccgcgccaccaaguuccucgaguccaucaagggcaaguucaccucccccaaggaccccaagaagaaggacuccaucaucuccgucaacuccaucgacaucgaggucaccaaggagucccccaucaccuccaacuccaccaucaucaaccccaccaacgagaccgacgacaccgccggcaacaagcccaacuaccagcgcaagccccucgucuccuucaaggaggaccccacccccuccgacaaccccuucuccaagcucuacaaggagaccaucgagaccuucgacaacaacgaggaggaguccuccuacuccuacgaggagaucaacgaccagaccaacgacaacaucaccgcccgccucgaccgcaucgacgagaagcucuccgagauccucggcaugcuccacacccucgucgucgccuccgccggccccaccuccgcccgcgacggcauccgcgacgccaugaucggccuccgcgaggagaugaucgagaagauccgcaccgaggcccucaugaccaacgaccgccucgaggccauggcccgccuccgcaacgaggaguccgagaagauggccaaggacaccuccgacgaggucucccucaaccccaccuccgagaagcucaacaaccuccucgagggcaacgacuccgacaacgaccucucccucgaggacuucugaggacuaguggaagcauuuuccuggcugauuaaaagaaauuacucagcuauggucaucuguuccuguuagaaggcuaugcagcauauuauauacuaugcgcauguuaugaaaugcauaauaaaaaauuuuaaaaaaucuaaaagaucuaaaaaaaaaaaaaaaaaaaaaaaaaaaaaaaaaaaaaaaaaaaaaaaaaaaaaaaaaaaaaaaaugcaucccccccccccccccccccccccccccccccaaaggcucuuuucagagccaccagaauu

SEQ ID NO: 10801 - RNA, 1175 nt, Artificial Sequence
  mRNA product Design d-5 comprising derived and/or modified sequence from HRSV(A2)__P03421.1__P (opt3)
gggagagggcgcuuggcuugcaaggacccugagcugcggcauugaagcacacccaacccaacucgacugaagucagccucacugaaccggaucugagaaucuucucucucugggcuugccagggcucuccgaaccuagcuagcauccucuucaauuccaacuagaaagcuuaccauggagaaguucgcccccgaauuucacggcgaggacgcuaacaauagagcaaccaaauuccuggaaagcaucaaggggaaauuuacauccccuaaggauccgaaaaagaaggacucuauuauaucagugaacaguaucgauauugaggucacuaaagaaagcccaaucacguccaauucuaccauuaucaaccccacaaaugagacugacgauaccgccggaaacaagccuaauuaccagaggaaaccacucguuucguucaaggaggaccccacaccuucagauaacccauuuagcaaacuuuauaaggaaaccauagagacuuucgacaauaacgaagaggagaguuccuacucuuaugaagagaucaaugaucaaacaaacgacaauauuaccgcgcggcuggaucgcaucgacgaaaaguugagcgagauuuuagguaugcugcauacgcuagugguagcuuccgccggccccacuucagcacgagaugggauccgugacgccaugauaggacucagagaagagaugauugagaaaaucaggaccgaagcucugaugacaaacgaccggcuugaggcaauggcccgccugagaaaugaagagagugaaaagauggcuaaagauacuagcgacgaggugucuuugaacccuaccuccgagaagcucaacaaucugcuggaaggcaacgauucagacaaugaucucagcuuagaggacuuuugaggacuaguggaagcauuuuccuggcugauuaaaagaaauuacucagcuauggucaucuguuccuguuagaaggcuaugcagcauauuauauacuaugcgcauguuaugaaaugcauaauaaaaaauuuuaaaaaaucuaaaagaucuaaaaaaaaaaaaaaaaaaaaaaaaaaaaaaaaaaaaaaaaaaaaaaaaaaaaaaaaaaaaaaaaugcaucccccccccccccccccccccccccccccccaaaggcucuuuucagagccaccagaauu

SEQ ID NO: 10802 - RNA, 1175 nt, Artificial Sequence
  mRNA product Design d-5 comprising derived and/or modified sequence from HRSV(A2)__P03421.1__P (opt4)
gggagagggcgcuuggcuugcaaggacccugagcugcggcauugaagcacacccaacccaacucgacugaagucagccucacugaaccggaucugagaaucuucucucucugggcuugccagggcucuccgaaccuagcuagcauccucuucaauuccaacuagaaagcuuaccauggagaaguucgcccccgaguuccacggcgaggacgccaacaacagagccaccaaguuccuggagagcaucaagggcaaguucaccagccccaaggaccccaagaagaaggacagcaucaucagcgugaacagcaucgacaucgaggugaccaaggagagccccaucaccagcaacagcaccaucaucaaccccaccaacgagaccgacgacaccgccggcaacaagcccaacuaccagagaaagccccuggugagcuucaaggaggaccccacccccagcgacaaccccuucagcaagcuguacaaggagaccaucgagaccuucgacaacaacgaggaggagagcagcuacagcuacgaggagaucaacgaccagaccaacgacaacaucaccgccagacuggacagaaucgacgagaagcugagcgagauccugggcaugcugcacacccuggugguggccagcgccggccccaccagcgccagagacggcaucagagacgccaugaucggccugagagaggagaugaucgagaagaucagaaccgaggcccugaugaccaacgacagacuggaggccauggccagacugagaaacgaggagagcgagaagauggccaaggacaccagcgacgaggugagccugaaccccaccagcgagaagcugaacaaccugcuggagggcaacgacagcgacaacgaccugagccuggaggacuucugaggacuaguggaagcauuuuccuggcugauuaaaagaaauuacucagcuauggucaucuguuccuguuagaaggcuaugcagcauauuauauacuaugcgcauguuaugaaaugcauaauaaaaaauuuuaaaaaaucuaaaagaucuaaaaaaaaaaaaaaaaaaaaaaaaaaaaaaaaaaaaaaaaaaaaaaaaaaaaaaaaaaaaaaaaugcaucccccccccccccccccccccccccccccccaaaggcucuuuucagagccaccagaauu

SEQ ID NO: 10803 - RNA, 1175 nt, Artificial Sequence
  mRNA product Design d-5 comprising derived and/or modified sequence from HRSV(A2)__P03421.1__P (opt5)
gggagagggcgcuuggcuugcaaggacccugagcugcggcauugaagcacacccaacccaacucgacugaagucagccucacugaaccggaucugagaaucuucucucucugggcuugccagggcucuccgaaccuagcuagcauccucuucaauuccaacuagaaagcuuaccauggagaaguucgcccccgaauuucacggcgaggacgcuaacaauagagccaccaaauuccuggaaagcaucaaggggaaauuuacauccccuaaggauccgaaaaagaaggacucuauuaucagcgugaacuccauugauaucgaggucacgaaagaaucucccauuaccagcaauuccacaaucaucaacccuaccaaugagacagacgauaccgcgggaaacaagcccaauuaccagcggaaaccucucguuucuuucaaggaggaccccacaccuagcgauaacccguuuuccaaacuguauaaggaaaccauugagacguucgacaauaacgaagaggagagcucuuacuccuaugaagagaucaaugaucaaaccaacgacaauauuacagcucgccuugauagaaucgacgaaaagcugagcgagauucucggcaugcugcauacccuugugguggccucugccgggcccacauccgcucgggauggaauccgcgacgccaugauuggccugagagaagagaugaucgagaaaauccggaccgaagcucucaugacgaacgaccgccuggaggccauggcgagacugcggaaugaagagagcgaaaagauggccaaagauacaucugacgaggucucccucaacccuaccagcgagaagcugaacaaucuucuggaagggaacgauuccgacaaugaucucucucuggaggacuuuugaggacuaguggaagcauuuuccuggcugauuaaaagaaauuacucagcuauggucaucuguuccuguuagaaggcuaugcagcauauuauauacuaugcgcauguuaugaaaugcauaauaaaaaauuuuaaaaaaucuaaaagaucuaaaaaaaaaaaaaaaaaaaaaaaaaaaaaaaaaaaaaaaaaaaaaaaaaaaaaaaaaaaaaaaaugcaucccccccccccccccccccccccccccccccaaaggcucuuuucagagccaccagaauu

SEQ ID NO: 10804 - RNA, 1175 nt, Artificial Sequence
  mRNA product Design d-5 comprising derived and/or modified sequence from HRSV(A2)__P03421.1__P (opt6)
gggagagggcgcuuggcuugcaaggacccugagcugcggcauugaagcacacccaacccaacucgacugaagucagccucacugaaccggaucugagaaucuucucucucugggcuugccagggcucuccgaaccuagcuagcauccucuucaauuccaacuagaaagcuuaccauggaaaaauucgcaccagaauuucacggagaagacgcaaacaacagagcaacaaaauucuuagaaucaaucaaaggaaaauucacaagcccaaaagacccaaaaaaaaaagacucaauaauaagcguaaacucaauagacauagaaguaacaaaagaaagcccaauaacaagcaacagcacaauaauaaacccaacaaacgaaacagaugacacagcuggaaauaaaccaaacuaccaaagaaaaccccuagucagcuucaaagaagaccccacaccaucagacaacccauucagcaaacuauauaaagaaacaauagaaacauuugacaacaacgaagaagaaucaucauacucauacgaagaaauaaacgaccaaacaaacgacaacauaaccgcaagauuagacagaauagaugaaaaacuaucagaaauacuaggaaugcuacacacauuaguaguagcaagcgcaggaccaacaucagcaagagacggaauaagagacgcaaugauaggacucagagaagaaaugauagaaaaaauaagaacagaagcacuaaugacaaacgacagauuagaagcaauggcaagacuaagaaaugaagaaucggaaaaaauggcaaaagacacaucagacgaaguaagccuaaacccaacaucagaaaaauuaaauaaccuacuagaaggaaacgacagcgacaacgacuuaucacuagaagacuucuaaggacuaguggaagcauuuuccuggcugauuaaaagaaauuacucagcuauggucaucuguuccuguuagaaggcuaugcagcauauuauauacuaugcgcauguuaugaaaugcauaauaaaaaauuuuaaaaaaucuaaaagaucuaaaaaaaaaaaaaaaaaaaaaaaaaaaaaaaaaaaaaaaaaaaaaaaaaaaaaaaaaaaaaaaaugcaucccccccccccccccccccccccccccccccaaaggcucuuuucagagccaccagaauu

SEQ ID NO: 10805 - RNA, 1175 nt, Artificial Sequence
  mRNA product Design d-5 comprising derived and/or modified sequence from HRSV(A2)__P03421.1__P (opt11)
gggagagggcgcuuggcuugcaaggacccugagcugcggcauugaagcacacccaacccaacucgacugaagucagccucacugaaccggaucugagaaucuucucucucugggcuugccagggcucuccgaaccuagcuagcauccucuucaauuccaacuagaaagcuuaccauggaaaaauucgcgcccgaguuccacggcgaggacgcgaacaaccgcgcgacaaaguuccuagaaucaaucaagggcaaauucacgagcccgaaagaccccaagaaaaaggacucaaucauaagcgugaacucgaucgacaucgaggucacgaaagagagcccgaucacaagcaacagcaccauaauaaacccgaccaacgaaacagacgacaccgcgggcaacaaaccgaacuaccaaagaaaaccgcucgugagcuucaaagaagacccgaccccaagcgacaacccguucucaaaacuauacaaggaaacgaucgagaccuucgacaacaacgaggaagagagcucguacucguacgaggaaauaaacgaccaaacaaacgacaacauaaccgcacgccuagacaggaucgacgaaaaacucucggaaauacucgggaugcuacacacgcucguggucgcgagcgcaggcccgaccucggccagggacggcaucagggacgcaaugauaggccugcgagaggaaaugaucgagaaaauacgcaccgaagcacucaugaccaacgacagacucgaagccauggccaggcucaggaacgaagaauccgaaaagauggcgaaagacaccucggacgaggucucgcucaaccccacgagcgagaaacugaacaaccuacuggaagggaacgacagcgacaacgaccuuucccucgaggacuucugaggacuaguggaagcauuuuccuggcugauuaaaagaaauuacucagcuauggucaucuguuccuguuagaaggcuaugcagcauauuauauacuaugcgcauguuaugaaaugcauaauaaaaaauuuuaaaaaaucuaaaagaucuaaaaaaaaaaaaaaaaaaaaaaaaaaaaaaaaaaaaaaaaaaaaaaaaaaaaaaaaaaaaaaaaugcaucccccccccccccccccccccccccccccccaaaggcucuuuucagagccaccagaauu

SEQ ID NO: 10806 - RNA, 1055 nt, Artificial Sequence
  mRNA product Design e-1 comprising derived and/or modified sequence from HRSV(A2)__P03421.1__P (wt)
gggagaauauaagcguuggcggagcgucgguuguagcacucugcgcgcccgcucuucugcugcuguuugucuacuuccuccugcuuccccgccgccgccgccgccaucaagcuuaccauggaaaaguuugcuccugaauuccauggagaagaugcaaacaacagggcuacuaaauuccuagaaucaauaaagggcaaauucacaucacccaaagaucccaagaaaaaagauaguaucauaucugucaacucaauagauauagaaguaaccaaagaaagcccuauaacaucaaauucaacuauuaucaacccaacaaaugagacagaugauacugcagggaacaagcccaauuaucaaagaaaaccucuaguaaguuucaaagaagacccuacaccaagugauaaucccuuuucuaaacuauacaaagaaaccauagaaacauuugauaacaaugaagaagaauccagcuauucauacgaagaaauaaaugaucagacaaacgauaauauaacagcaagauuagauaggauugaugaaaaauuaagugaaauacuaggaaugcuucacacauuaguaguggcaagugcaggaccuacaucugcucgggaugguauaagagaugccaugauugguuuaagagaagaaaugauagaaaaaaucagaacugaagcauuaaugaccaaugacagauuagaagcuauggcaagacucaggaaugaggaaagugaaaagauggcaaaagacacaucagaugaagugucucucaauccaacaucagagaaauugaacaaccuauuggaagggaaugauagugacaaugaucuaucacuugaagauuucugaggacuaguguccaccugucccuccugggcugcuggauugucucguuuuccugccaaauaaacaggaucagcgcuuuacagaucuaaaaaaaaaaaaaaaaaaaaaaaaaaaaaaaaaaaaaaaaaaaaaaaaaaaaaaaaaaaaaaaaugcaucccccccccccccccccccccccccccccccaaaggcucuuuucagagccaccagaauu

SEQ ID NO: 10807 - RNA, 1055 nt, Artificial Sequence
  mRNA product Design e-1 comprising derived and/or modified sequence from HRSV(A2)__P03421.1__P (opt1)
gggagaauauaagcguuggcggagcgucgguuguagcacucugcgcgcccgcucuucugcugcuguuugucuacuuccuccugcuuccccgccgccgccgccgccaucaagcuuaccauggagaaguucgcccccgaguuccacggcgaggacgccaacaaccgcgcgaccaaguuccuggagagcaucaaggggaaguucaccuccccgaaggaccccaagaagaaggacagcaucaucuccgugaacagcaucgacaucgaggucacgaaggagucccccaucaccagcaacuccaccaucaucaaccccaccaacgagacggacgacaccgccggcaacaagccgaacuaccagcggaagccccucgugagcuucaaggaggaccccacccccuccgacaacccguucagcaagcuguacaaggagaccaucgagacguucgacaacaacgaggaggaguccagcuacuccuacgaggagaucaacgaccagaccaacgacaacaucaccgcccgccuggaccggaucgacgagaagcucagcgagauccuggggaugcugcacacccucguggucgccuccgccggccccacgagcgcgcgcgacgggauccgggacgccaugaucggccugcgcgaggagaugaucgagaagauccggaccgaggcccugaugaccaacgaccgccucgaggccauggcgcggcugcgcaacgaggaguccgagaagauggccaaggacaccagcgacgaggugucccugaaccccacgagcgagaagcucaacaaccugcuggagggcaacgacagcgacaacgaccucucccuggaggacuucugaggacuaguguccaccugucccuccugggcugcuggauugucucguuuuccugccaaauaaacaggaucagcgcuuuacagaucuaaaaaaaaaaaaaaaaaaaaaaaaaaaaaaaaaaaaaaaaaaaaaaaaaaaaaaaaaaaaaaaaugcaucccccccccccccccccccccccccccccccaaaggcucuuuucagagccaccagaauu

SEQ ID NO: 10808 - RNA, 1055 nt, Artificial Sequence
  mRNA product Design e-1 comprising derived and/or modified sequence from HRSV(A2)__P03421.1__P (opt2)
gggagaauauaagcguuggcggagcgucgguuguagcacucugcgcgcccgcucuucugcugcuguuugucuacuuccuccugcuuccccgccgccgccgccgccaucaagcuuaccauggagaaguucgcccccgaguuccacggcgaggacgccaacaaccgcgccaccaaguuccucgaguccaucaagggcaaguucaccucccccaaggaccccaagaagaaggacuccaucaucuccgucaacuccaucgacaucgaggucaccaaggagucccccaucaccuccaacuccaccaucaucaaccccaccaacgagaccgacgacaccgccggcaacaagcccaacuaccagcgcaagccccucgucuccuucaaggaggaccccacccccuccgacaaccccuucuccaagcucuacaaggagaccaucgagaccuucgacaacaacgaggaggaguccuccuacuccuacgaggagaucaacgaccagaccaacgacaacaucaccgcccgccucgaccgcaucgacgagaagcucuccgagauccucggcaugcuccacacccucgucgucgccuccgccggccccaccuccgcccgcgacggcauccgcgacgccaugaucggccuccgcgaggagaugaucgagaagauccgcaccgaggcccucaugaccaacgaccgccucgaggccauggcccgccuccgcaacgaggaguccgagaagauggccaaggacaccuccgacgaggucucccucaaccccaccuccgagaagcucaacaaccuccucgagggcaacgacuccgacaacgaccucucccucgaggacuucugaggacuaguguccaccugucccuccugggcugcuggauugucucguuuuccugccaaauaaacaggaucagcgcuuuacagaucuaaaaaaaaaaaaaaaaaaaaaaaaaaaaaaaaaaaaaaaaaaaaaaaaaaaaaaaaaaaaaaaaugcaucccccccccccccccccccccccccccccccaaaggcucuuuucagagccaccagaauu

SEQ ID NO: 10809 - RNA, 1055 nt, Artificial Sequence
  mRNA product Design e-1 comprising derived and/or modified sequence from HRSV(A2)__P03421.1__P (opt3)
gggagaauauaagcguuggcggagcgucgguuguagcacucugcgcgcccgcucuucugcugcuguuugucuacuuccuccugcuuccccgccgccgccgccgccaucaagcuuaccauggagaaguucgcccccgaauuucacggcgaggacgcuaacaauagagcaaccaaauuccuggaaagcaucaaggggaaauuuacauccccuaaggauccgaaaaagaaggacucuauuauaucagugaacaguaucgauauugaggucacuaaagaaagcccaaucacguccaauucuaccauuaucaaccccacaaaugagacugacgauaccgccggaaacaagccuaauuaccagaggaaaccacucguuucguucaaggaggaccccacaccuucagauaacccauuuagcaaacuuuauaaggaaaccauagagacuuucgacaauaacgaagaggagaguuccuacucuuaugaagagaucaaugaucaaacaaacgacaauauuaccgcgcggcuggaucgcaucgacgaaaaguugagcgagauuuuagguaugcugcauacgcuagugguagcuuccgccggccccacuucagcacgagaugggauccgugacgccaugauaggacucagagaagagaugauugagaaaaucaggaccgaagcucugaugacaaacgaccggcuugaggcaauggcccgccugagaaaugaagagagugaaaagauggcuaaagauacuagcgacgaggugucuuugaacccuaccuccgagaagcucaacaaucugcuggaaggcaacgauucagacaaugaucucagcuuagaggacuuuugaggacuaguguccaccugucccuccugggcugcuggauugucucguuuuccugccaaauaaacaggaucagcgcuuuacagaucuaaaaaaaaaaaaaaaaaaaaaaaaaaaaaaaaaaaaaaaaaaaaaaaaaaaaaaaaaaaaaaaaugcaucccccccccccccccccccccccccccccccaaaggcucuuuucagagccaccagaauu

SEQ ID NO: 10810 - RNA, 1055 nt, Artificial Sequence
  mRNA product Design e-1 comprising derived and/or modified sequence from HRSV(A2)__P03421.1__P (opt4)
gggagaauauaagcguuggcggagcgucgguuguagcacucugcgcgcccgcucuucugcugcuguuugucuacuuccuccugcuuccccgccgccgccgccgccaucaagcuuaccauggagaaguucgcccccgaguuccacggcgaggacgccaacaacagagccaccaaguuccuggagagcaucaagggcaaguucaccagccccaaggaccccaagaagaaggacagcaucaucagcgugaacagcaucgacaucgaggugaccaaggagagccccaucaccagcaacagcaccaucaucaaccccaccaacgagaccgacgacaccgccggcaacaagcccaacuaccagagaaagccccuggugagcuucaaggaggaccccacccccagcgacaaccccuucagcaagcuguacaaggagaccaucgagaccuucgacaacaacgaggaggagagcagcuacagcuacgaggagaucaacgaccagaccaacgacaacaucaccgccagacuggacagaaucgacgagaagcugagcgagauccugggcaugcugcacacccuggugguggccagcgccggccccaccagcgccagagacggcaucagagacgccaugaucggccugagagaggagaugaucgagaagaucagaaccgaggcccugaugaccaacgacagacuggaggccauggccagacugagaaacgaggagagcgagaagauggccaaggacaccagcgacgaggugagccugaaccccaccagcgagaagcugaacaaccugcuggagggcaacgacagcgacaacgaccugagccuggaggacuucugaggacuaguguccaccugucccuccugggcugcuggauugucucguuuuccugccaaauaaacaggaucagcgcuuuacagaucuaaaaaaaaaaaaaaaaaaaaaaaaaaaaaaaaaaaaaaaaaaaaaaaaaaaaaaaaaaaaaaaaugcaucccccccccccccccccccccccccccccccaaaggcucuuuucagagccaccagaauu

SEQ ID NO: 10811 - RNA, 1055 nt, Artificial Sequence
  mRNA product Design e-1 comprising derived and/or modified sequence from HRSV(A2)__P03421.1__P (opt5)
gggagaauauaagcguuggcggagcgucgguuguagcacucugcgcgcccgcucuucugcugcuguuugucuacuuccuccugcuuccccgccgccgccgccgccaucaagcuuaccauggagaaguucgcccccgaauuucacggcgaggacgcuaacaauagagccaccaaauuccuggaaagcaucaaggggaaauuuacauccccuaaggauccgaaaaagaaggacucuauuaucagcgugaacuccauugauaucgaggucacgaaagaaucucccauuaccagcaauuccacaaucaucaacccuaccaaugagacagacgauaccgcgggaaacaagcccaauuaccagcggaaaccucucguuucuuucaaggaggaccccacaccuagcgauaacccguuuuccaaacuguauaaggaaaccauugagacguucgacaauaacgaagaggagagcucuuacuccuaugaagagaucaaugaucaaaccaacgacaauauuacagcucgccuugauagaaucgacgaaaagcugagcgagauucucggcaugcugcauacccuugugguggccucugccgggcccacauccgcucgggauggaauccgcgacgccaugauuggccugagagaagagaugaucgagaaaauccggaccgaagcucucaugacgaacgaccgccuggaggccauggcgagacugcggaaugaagagagcgaaaagauggccaaagauacaucugacgaggucucccucaacccuaccagcgagaagcugaacaaucuucuggaagggaacgauuccgacaaugaucucucucuggaggacuuuugaggacuaguguccaccugucccuccugggcugcuggauugucucguuuuccugccaaauaaacaggaucagcgcuuuacagaucuaaaaaaaaaaaaaaaaaaaaaaaaaaaaaaaaaaaaaaaaaaaaaaaaaaaaaaaaaaaaaaaaugcaucccccccccccccccccccccccccccccccaaaggcucuuuucagagccaccagaauu

SEQ ID NO: 10812 - RNA, 1055 nt, Artificial Sequence
  mRNA product Design e-1 comprising derived and/or modified sequence from HRSV(A2)__P03421.1__P (opt6)
gggagaauauaagcguuggcggagcgucgguuguagcacucugcgcgcccgcucuucugcugcuguuugucuacuuccuccugcuuccccgccgccgccgccgccaucaagcuuaccauggaaaaauucgcaccagaauuucacggagaagacgcaaacaacagagcaacaaaauucuuagaaucaaucaaaggaaaauucacaagcccaaaagacccaaaaaaaaaagacucaauaauaagcguaaacucaauagacauagaaguaacaaaagaaagcccaauaacaagcaacagcacaauaauaaacccaacaaacgaaacagaugacacagcuggaaauaaaccaaacuaccaaagaaaaccccuagucagcuucaaagaagaccccacaccaucagacaacccauucagcaaacuauauaaagaaacaauagaaacauuugacaacaacgaagaagaaucaucauacucauacgaagaaauaaacgaccaaacaaacgacaacauaaccgcaagauuagacagaauagaugaaaaacuaucagaaauacuaggaaugcuacacacauuaguaguagcaagcgcaggaccaacaucagcaagagacggaauaagagacgcaaugauaggacucagagaagaaaugauagaaaaaauaagaacagaagcacuaaugacaaacgacagauuagaagcaauggcaagacuaagaaaugaagaaucggaaaaaauggcaaaagacacaucagacgaaguaagccuaaacccaacaucagaaaaauuaaauaaccuacuagaaggaaacgacagcgacaacgacuuaucacuagaagacuucuaaggacuaguguccaccugucccuccugggcugcuggauugucucguuuuccugccaaauaaacaggaucagcgcuuuacagaucuaaaaaaaaaaaaaaaaaaaaaaaaaaaaaaaaaaaaaaaaaaaaaaaaaaaaaaaaaaaaaaaaugcaucccccccccccccccccccccccccccccccaaaggcucuuuucagagccaccagaauu

SEQ ID NO: 10813 - RNA, 1055 nt, Artificial Sequence
  mRNA product Design e-1 comprising derived and/or modified sequence from HRSV(A2)__P03421.1__P (opt11)
gggagaauauaagcguuggcggagcgucgguuguagcacucugcgcgcccgcucuucugcugcuguuugucuacuuccuccugcuuccccgccgccgccgccgccaucaagcuuaccauggaaaaauucgcgcccgaguuccacggcgaggacgcgaacaaccgcgcgacaaaguuccuagaaucaaucaagggcaaauucacgagcccgaaagaccccaagaaaaaggacucaaucauaagcgugaacucgaucgacaucgaggucacgaaagagagcccgaucacaagcaacagcaccauaauaaacccgaccaacgaaacagacgacaccgcgggcaacaaaccgaacuaccaaagaaaaccgcucgugagcuucaaagaagacccgaccccaagcgacaacccguucucaaaacuauacaaggaaacgaucgagaccuucgacaacaacgaggaagagagcucguacucguacgaggaaauaaacgaccaaacaaacgacaacauaaccgcacgccuagacaggaucgacgaaaaacucucggaaauacucgggaugcuacacacgcucguggucgcgagcgcaggcccgaccucggccagggacggcaucagggacgcaaugauaggccugcgagaggaaaugaucgagaaaauacgcaccgaagcacucaugaccaacgacagacucgaagccauggccaggcucaggaacgaagaauccgaaaagauggcgaaagacaccucggacgaggucucgcucaaccccacgagcgagaaacugaacaaccuacuggaagggaacgacagcgacaacgaccuuucccucgaggacuucugaggacuaguguccaccugucccuccugggcugcuggauugucucguuuuccugccaaauaaacaggaucagcgcuuuacagaucuaaaaaaaaaaaaaaaaaaaaaaaaaaaaaaaaaaaaaaaaaaaaaaaaaaaaaaaaaaaaaaaaugcaucccccccccccccccccccccccccccccccaaaggcucuuuucagagccaccagaauu

SEQ ID NO: 10814 - RNA, 1037 nt, Artificial Sequence
  mRNA product Design e-2 comprising derived and/or modified sequence from HRSV(A2)__P03421.1__P (wt)
gggagacccgugacccggaaguuguacggcuacgcgacuuucccucccacaaacccucgcgcccuuccuuuccuacuugggcccggcagaaagcuuaccauggaaaaguuugcuccugaauuccauggagaagaugcaaacaacagggcuacuaaauuccuagaaucaauaaagggcaaauucacaucacccaaagaucccaagaaaaaagauaguaucauaucugucaacucaauagauauagaaguaaccaaagaaagcccuauaacaucaaauucaacuauuaucaacccaacaaaugagacagaugauacugcagggaacaagcccaauuaucaaagaaaaccucuaguaaguuucaaagaagacccuacaccaagugauaaucccuuuucuaaacuauacaaagaaaccauagaaacauuugauaacaaugaagaagaauccagcuauucauacgaagaaauaaaugaucagacaaacgauaauauaacagcaagauuagauaggauugaugaaaaauuaagugaaauacuaggaaugcuucacacauuaguaguggcaagugcaggaccuacaucugcucgggaugguauaagagaugccaugauugguuuaagagaagaaaugauagaaaaaaucagaacugaagcauuaaugaccaaugacagauuagaagcuauggcaagacucaggaaugaggaaagugaaaagauggcaaaagacacaucagaugaagugucucucaauccaacaucagagaaauugaacaaccuauuggaagggaaugauagugacaaugaucuaucacuugaagauuucugaggacuaguguccaccugucccuccugggcugcuggauugucucguuuuccugccaaauaaacaggaucagcgcuuuacagaucuaaaaaaaaaaaaaaaaaaaaaaaaaaaaaaaaaaaaaaaaaaaaaaaaaaaaaaaaaaaaaaaaugcaucccccccccccccccccccccccccccccccaaaggcucuuuucagagccaccagaauu

SEQ ID NO: 10815 - RNA, 1037 nt, Artificial Sequence
  mRNA product Design e-2 comprising derived and/or modified sequence from HRSV(A2)__P03421.1__P (opt1)
gggagacccgugacccggaaguuguacggcuacgcgacuuucccucccacaaacccucgcgcccuuccuuuccuacuugggcccggcagaaagcuuaccauggagaaguucgcccccgaguuccacggcgaggacgccaacaaccgcgcgaccaaguuccuggagagcaucaaggggaaguucaccuccccgaaggaccccaagaagaaggacagcaucaucuccgugaacagcaucgacaucgaggucacgaaggagucccccaucaccagcaacuccaccaucaucaaccccaccaacgagacggacgacaccgccggcaacaagccgaacuaccagcggaagccccucgugagcuucaaggaggaccccacccccuccgacaacccguucagcaagcuguacaaggagaccaucgagacguucgacaacaacgaggaggaguccagcuacuccuacgaggagaucaacgaccagaccaacgacaacaucaccgcccgccuggaccggaucgacgagaagcucagcgagauccuggggaugcugcacacccucguggucgccuccgccggccccacgagcgcgcgcgacgggauccgggacgccaugaucggccugcgcgaggagaugaucgagaagauccggaccgaggcccugaugaccaacgaccgccucgaggccauggcgcggcugcgcaacgaggaguccgagaagauggccaaggacaccagcgacgaggugucccugaaccccacgagcgagaagcucaacaaccugcuggagggcaacgacagcgacaacgaccucucccuggaggacuucugaggacuaguguccaccugucccuccugggcugcuggauugucucguuuuccugccaaauaaacaggaucagcgcuuuacagaucuaaaaaaaaaaaaaaaaaaaaaaaaaaaaaaaaaaaaaaaaaaaaaaaaaaaaaaaaaaaaaaaaugcaucccccccccccccccccccccccccccccccaaaggcucuuuucagagccaccagaauu

SEQ ID NO: 10816 - RNA, 1037 nt, Artificial Sequence
  mRNA product Design e-2 comprising derived and/or modified sequence from HRSV(A2)__P03421.1__P (opt2)
gggagacccgugacccggaaguuguacggcuacgcgacuuucccucccacaaacccucgcgcccuuccuuuccuacuugggcccggcagaaagcuuaccauggagaaguucgcccccgaguuccacggcgaggacgccaacaaccgcgccaccaaguuccucgaguccaucaagggcaaguucaccucccccaaggaccccaagaagaaggacuccaucaucuccgucaacuccaucgacaucgaggucaccaaggagucccccaucaccuccaacuccaccaucaucaaccccaccaacgagaccgacgacaccgccggcaacaagcccaacuaccagcgcaagccccucgucuccuucaaggaggaccccacccccuccgacaaccccuucuccaagcucuacaaggagaccaucgagaccuucgacaacaacgaggaggaguccuccuacuccuacgaggagaucaacgaccagaccaacgacaacaucaccgcccgccucgaccgcaucgacgagaagcucuccgagauccucggcaugcuccacacccucgucgucgccuccgccggccccaccuccgcccgcgacggcauccgcgacgccaugaucggccuccgcgaggagaugaucgagaagauccgcaccgaggcccucaugaccaacgaccgccucgaggccauggcccgccuccgcaacgaggaguccgagaagauggccaaggacaccuccgacgaggucucccucaaccccaccuccgagaagcucaacaaccuccucgagggcaacgacuccgacaacgaccucucccucgaggacuucugaggacuaguguccaccugucccuccugggcugcuggauugucucguuuuccugccaaauaaacaggaucagcgcuuuacagaucuaaaaaaaaaaaaaaaaaaaaaaaaaaaaaaaaaaaaaaaaaaaaaaaaaaaaaaaaaaaaaaaaugcaucccccccccccccccccccccccccccccccaaaggcucuuuucagagccaccagaauu

SEQ ID NO: 10817 - RNA, 1037 nt, Artificial Sequence
  mRNA product Design e-2 comprising derived and/or modified sequence from HRSV(A2)__P03421.1__P (opt3)
gggagacccgugacccggaaguuguacggcuacgcgacuuucccucccacaaacccucgcgcccuuccuuuccuacuugggcccggcagaaagcuuaccauggagaaguucgcccccgaauuucacggcgaggacgcuaacaauagagcaaccaaauuccuggaaagcaucaaggggaaauuuacauccccuaaggauccgaaaaagaaggacucuauuauaucagugaacaguaucgauauugaggucacuaaagaaagcccaaucacguccaauucuaccauuaucaaccccacaaaugagacugacgauaccgccggaaacaagccuaauuaccagaggaaaccacucguuucguucaaggaggaccccacaccuucagauaacccauuuagcaaacuuuauaaggaaaccauagagacuuucgacaauaacgaagaggagaguuccuacucuuaugaagagaucaaugaucaaacaaacgacaauauuaccgcgcggcuggaucgcaucgacgaaaaguugagcgagauuuuagguaugcugcauacgcuagugguagcuuccgccggccccacuucagcacgagaugggauccgugacgccaugauaggacucagagaagagaugauugagaaaaucaggaccgaagcucugaugacaaacgaccggcuugaggcaauggcccgccugagaaaugaagagagugaaaagauggcuaaagauacuagcgacgaggugucuuugaacccuaccuccgagaagcucaacaaucugcuggaaggcaacgauucagacaaugaucucagcuuagaggacuuuugaggacuaguguccaccugucccuccugggcugcuggauugucucguuuuccugccaaauaaacaggaucagcgcuuuacagaucuaaaaaaaaaaaaaaaaaaaaaaaaaaaaaaaaaaaaaaaaaaaaaaaaaaaaaaaaaaaaaaaaugcaucccccccccccccccccccccccccccccccaaaggcucuuuucagagccaccagaauu

SEQ ID NO: 10818 - RNA, 1037 nt, Artificial Sequence
  mRNA product Design e-2 comprising derived and/or modified sequence from HRSV(A2)__P03421.1__P (opt4)
gggagacccgugacccggaaguuguacggcuacgcgacuuucccucccacaaacccucgcgcccuuccuuuccuacuugggcccggcagaaagcuuaccauggagaaguucgcccccgaguuccacggcgaggacgccaacaacagagccaccaaguuccuggagagcaucaagggcaaguucaccagccccaaggaccccaagaagaaggacagcaucaucagcgugaacagcaucgacaucgaggugaccaaggagagccccaucaccagcaacagcaccaucaucaaccccaccaacgagaccgacgacaccgccggcaacaagcccaacuaccagagaaagccccuggugagcuucaaggaggaccccacccccagcgacaaccccuucagcaagcuguacaaggagaccaucgagaccuucgacaacaacgaggaggagagcagcuacagcuacgaggagaucaacgaccagaccaacgacaacaucaccgccagacuggacagaaucgacgagaagcugagcgagauccugggcaugcugcacacccuggugguggccagcgccggccccaccagcgccagagacggcaucagagacgccaugaucggccugagagaggagaugaucgagaagaucagaaccgaggcccugaugaccaacgacagacuggaggccauggccagacugagaaacgaggagagcgagaagauggccaaggacaccagcgacgaggugagccugaaccccaccagcgagaagcugaacaaccugcuggagggcaacgacagcgacaacgaccugagccuggaggacuucugaggacuaguguccaccugucccuccugggcugcuggauugucucguuuuccugccaaauaaacaggaucagcgcuuuacagaucuaaaaaaaaaaaaaaaaaaaaaaaaaaaaaaaaaaaaaaaaaaaaaaaaaaaaaaaaaaaaaaaaugcaucccccccccccccccccccccccccccccccaaaggcucuuuucagagccaccagaauu

SEQ ID NO: 10819 - RNA, 1037 nt, Artificial Sequence
  mRNA product Design e-2 comprising derived and/or modified sequence from HRSV(A2)__P03421.1__P (opt5)
gggagacccgugacccggaaguuguacggcuacgcgacuuucccucccacaaacccucgcgcccuuccuuuccuacuugggcccggcagaaagcuuaccauggagaaguucgcccccgaauuucacggcgaggacgcuaacaauagagccaccaaauuccuggaaagcaucaaggggaaauuuacauccccuaaggauccgaaaaagaaggacucuauuaucagcgugaacuccauugauaucgaggucacgaaagaaucucccauuaccagcaauuccacaaucaucaacccuaccaaugagacagacgauaccgcgggaaacaagcccaauuaccagcggaaaccucucguuucuuucaaggaggaccccacaccuagcgauaacccguuuuccaaacuguauaaggaaaccauugagacguucgacaauaacgaagaggagagcucuuacuccuaugaagagaucaaugaucaaaccaacgacaauauuacagcucgccuugauagaaucgacgaaaagcugagcgagauucucggcaugcugcauacccuugugguggccucugccgggcccacauccgcucgggauggaauccgcgacgccaugauuggccugagagaagagaugaucgagaaaauccggaccgaagcucucaugacgaacgaccgccuggaggccauggcgagacugcggaaugaagagagcgaaaagauggccaaagauacaucugacgaggucucccucaacccuaccagcgagaagcugaacaaucuucuggaagggaacgauuccgacaaugaucucucucuggaggacuuuugaggacuaguguccaccugucccuccugggcugcuggauugucucguuuuccugccaaauaaacaggaucagcgcuuuacagaucuaaaaaaaaaaaaaaaaaaaaaaaaaaaaaaaaaaaaaaaaaaaaaaaaaaaaaaaaaaaaaaaaugcaucccccccccccccccccccccccccccccccaaaggcucuuuucagagccaccagaauu

SEQ ID NO: 10820 - RNA, 1037 nt, Artificial Sequence
  mRNA product Design e-2 comprising derived and/or modified sequence from HRSV(A2)__P03421.1__P (opt6)
gggagacccgugacccggaaguuguacggcuacgcgacuuucccucccacaaacccucgcgcccuuccuuuccuacuugggcccggcagaaagcuuaccauggaaaaauucgcaccagaauuucacggagaagacgcaaacaacagagcaacaaaauucuuagaaucaaucaaaggaaaauucacaagcccaaaagacccaaaaaaaaaagacucaauaauaagcguaaacucaauagacauagaaguaacaaaagaaagcccaauaacaagcaacagcacaauaauaaacccaacaaacgaaacagaugacacagcuggaaauaaaccaaacuaccaaagaaaaccccuagucagcuucaaagaagaccccacaccaucagacaacccauucagcaaacuauauaaagaaacaauagaaacauuugacaacaacgaagaagaaucaucauacucauacgaagaaauaaacgaccaaacaaacgacaacauaaccgcaagauuagacagaauagaugaaaaacuaucagaaauacuaggaaugcuacacacauuaguaguagcaagcgcaggaccaacaucagcaagagacggaauaagagacgcaaugauaggacucagagaagaaaugauagaaaaaauaagaacagaagcacuaaugacaaacgacagauuagaagcaauggcaagacuaagaaaugaagaaucggaaaaaauggcaaaagacacaucagacgaaguaagccuaaacccaacaucagaaaaauuaaauaaccuacuagaaggaaacgacagcgacaacgacuuaucacuagaagacuucuaaggacuaguguccaccugucccuccugggcugcuggauugucucguuuuccugccaaauaaacaggaucagcgcuuuacagaucuaaaaaaaaaaaaaaaaaaaaaaaaaaaaaaaaaaaaaaaaaaaaaaaaaaaaaaaaaaaaaaaaugcaucccccccccccccccccccccccccccccccaaaggcucuuuucagagccaccagaauu

SEQ ID NO: 10821 - RNA, 1037 nt, Artificial Sequence
  mRNA product Design e-2 comprising derived and/or modified sequence from HRSV(A2)__P03421.1__P (opt11)
gggagacccgugacccggaaguuguacggcuacgcgacuuucccucccacaaacccucgcgcccuuccuuuccuacuugggcccggcagaaagcuuaccauggaaaaauucgcgcccgaguuccacggcgaggacgcgaacaaccgcgcgacaaaguuccuagaaucaaucaagggcaaauucacgagcccgaaagaccccaagaaaaaggacucaaucauaagcgugaacucgaucgacaucgaggucacgaaagagagcccgaucacaagcaacagcaccauaauaaacccgaccaacgaaacagacgacaccgcgggcaacaaaccgaacuaccaaagaaaaccgcucgugagcuucaaagaagacccgaccccaagcgacaacccguucucaaaacuauacaaggaaacgaucgagaccuucgacaacaacgaggaagagagcucguacucguacgaggaaauaaacgaccaaacaaacgacaacauaaccgcacgccuagacaggaucgacgaaaaacucucggaaauacucgggaugcuacacacgcucguggucgcgagcgcaggcccgaccucggccagggacggcaucagggacgcaaugauaggccugcgagaggaaaugaucgagaaaauacgcaccgaagcacucaugaccaacgacagacucgaagccauggccaggcucaggaacgaagaauccgaaaagauggcgaaagacaccucggacgaggucucgcucaaccccacgagcgagaaacugaacaaccuacuggaagggaacgacagcgacaacgaccuuucccucgaggacuucugaggacuaguguccaccugucccuccugggcugcuggauugucucguuuuccugccaaauaaacaggaucagcgcuuuacagaucuaaaaaaaaaaaaaaaaaaaaaaaaaaaaaaaaaaaaaaaaaaaaaaaaaaaaaaaaaaaaaaaaugcaucccccccccccccccccccccccccccccccaaaggcucuuuucagagccaccagaauu

SEQ ID NO: 10822 - RNA, 1007 nt, Artificial Sequence
  mRNA product Design e-3 comprising derived and/or modified sequence from HRSV(A2)__P03421.1__P (wt)
gggagacuuucccauucuguagcagaauuugguguugccuguggucuuggucccgcggagaagcuuaccauggaaaaguuugcuccugaauuccauggagaagaugcaaacaacagggcuacuaaauuccuagaaucaauaaagggcaaauucacaucacccaaagaucccaagaaaaaagauaguaucauaucugucaacucaauagauauagaaguaaccaaagaaagcccuauaacaucaaauucaacuauuaucaacccaacaaaugagacagaugauacugcagggaacaagcccaauuaucaaagaaaaccucuaguaaguuucaaagaagacccuacaccaagugauaaucccuuuucuaaacuauacaaagaaaccauagaaacauuugauaacaaugaagaagaauccagcuauucauacgaagaaauaaaugaucagacaaacgauaauauaacagcaagauuagauaggauugaugaaaaauuaagugaaauacuaggaaugcuucacacauuaguaguggcaagugcaggaccuacaucugcucgggaugguauaagagaugccaugauugguuuaagagaagaaaugauagaaaaaaucagaacugaagcauuaaugaccaaugacagauuagaagcuauggcaagacucaggaaugaggaaagugaaaagauggcaaaagacacaucagaugaagugucucucaauccaacaucagagaaauugaacaaccuauuggaagggaaugauagugacaaugaucuaucacuugaagauuucugaggacuaguguccaccugucccuccugggcugcuggauugucucguuuuccugccaaauaaacaggaucagcgcuuuacagaucuaaaaaaaaaaaaaaaaaaaaaaaaaaaaaaaaaaaaaaaaaaaaaaaaaaaaaaaaaaaaaaaaugcaucccccccccccccccccccccccccccccccaaaggcucuuuucagagccaccagaauu

SEQ ID NO: 10823 - RNA, 1007 nt, Artificial Sequence
  mRNA product Design e-3 comprising derived and/or modified sequence from HRSV(A2)__P03421.1__P (opt1)
gggagacuuucccauucuguagcagaauuugguguugccuguggucuuggucccgcggagaagcuuaccauggagaaguucgcccccgaguuccacggcgaggacgccaacaaccgcgcgaccaaguuccuggagagcaucaaggggaaguucaccuccccgaaggaccccaagaagaaggacagcaucaucuccgugaacagcaucgacaucgaggucacgaaggagucccccaucaccagcaacuccaccaucaucaaccccaccaacgagacggacgacaccgccggcaacaagccgaacuaccagcggaagccccucgugagcuucaaggaggaccccacccccuccgacaacccguucagcaagcuguacaaggagaccaucgagacguucgacaacaacgaggaggaguccagcuacuccuacgaggagaucaacgaccagaccaacgacaacaucaccgcccgccuggaccggaucgacgagaagcucagcgagauccuggggaugcugcacacccucguggucgccuccgccggccccacgagcgcgcgcgacgggauccgggacgccaugaucggccugcgcgaggagaugaucgagaagauccggaccgaggcccugaugaccaacgaccgccucgaggccauggcgcggcugcgcaacgaggaguccgagaagauggccaaggacaccagcgacgaggugucccugaaccccacgagcgagaagcucaacaaccugcuggagggcaacgacagcgacaacgaccucucccuggaggacuucugaggacuaguguccaccugucccuccugggcugcuggauugucucguuuuccugccaaauaaacaggaucagcgcuuuacagaucuaaaaaaaaaaaaaaaaaaaaaaaaaaaaaaaaaaaaaaaaaaaaaaaaaaaaaaaaaaaaaaaaugcaucccccccccccccccccccccccccccccccaaaggcucuuuucagagccaccagaauu

SEQ ID NO: 10824 - RNA, 1007 nt, Artificial Sequence
  mRNA product Design e-3 comprising derived and/or modified sequence from HRSV(A2)__P03421.1__P (opt2)
gggagacuuucccauucuguagcagaauuugguguugccuguggucuuggucccgcggagaagcuuaccauggagaaguucgcccccgaguuccacggcgaggacgccaacaaccgcgccaccaaguuccucgaguccaucaagggcaaguucaccucccccaaggaccccaagaagaaggacuccaucaucuccgucaacuccaucgacaucgaggucaccaaggagucccccaucaccuccaacuccaccaucaucaaccccaccaacgagaccgacgacaccgccggcaacaagcccaacuaccagcgcaagccccucgucuccuucaaggaggaccccacccccuccgacaaccccuucuccaagcucuacaaggagaccaucgagaccuucgacaacaacgaggaggaguccuccuacuccuacgaggagaucaacgaccagaccaacgacaacaucaccgcccgccucgaccgcaucgacgagaagcucuccgagauccucggcaugcuccacacccucgucgucgccuccgccggccccaccuccgcccgcgacggcauccgcgacgccaugaucggccuccgcgaggagaugaucgagaagauccgcaccgaggcccucaugaccaacgaccgccucgaggccauggcccgccuccgcaacgaggaguccgagaagauggccaaggacaccuccgacgaggucucccucaaccccaccuccgagaagcucaacaaccuccucgagggcaacgacuccgacaacgaccucucccucgaggacuucugaggacuaguguccaccugucccuccugggcugcuggauugucucguuuuccugccaaauaaacaggaucagcgcuuuacagaucuaaaaaaaaaaaaaaaaaaaaaaaaaaaaaaaaaaaaaaaaaaaaaaaaaaaaaaaaaaaaaaaaugcaucccccccccccccccccccccccccccccccaaaggcucuuuucagagccaccagaauu

SEQ ID NO: 10825 - RNA, 1007 nt, Artificial Sequence
  mRNA product Design e-3 comprising derived and/or modified sequence from HRSV(A2)__P03421.1__P (opt3)
gggagacuuucccauucuguagcagaauuugguguugccuguggucuuggucccgcggagaagcuuaccauggagaaguucgcccccgaauuucacggcgaggacgcuaacaauagagcaaccaaauuccuggaaagcaucaaggggaaauuuacauccccuaaggauccgaaaaagaaggacucuauuauaucagugaacaguaucgauauugaggucacuaaagaaagcccaaucacguccaauucuaccauuaucaaccccacaaaugagacugacgauaccgccggaaacaagccuaauuaccagaggaaaccacucguuucguucaaggaggaccccacaccuucagauaacccauuuagcaaacuuuauaaggaaaccauagagacuuucgacaauaacgaagaggagaguuccuacucuuaugaagagaucaaugaucaaacaaacgacaauauuaccgcgcggcuggaucgcaucgacgaaaaguugagcgagauuuuagguaugcugcauacgcuagugguagcuuccgccggccccacuucagcacgagaugggauccgugacgccaugauaggacucagagaagagaugauugagaaaaucaggaccgaagcucugaugacaaacgaccggcuugaggcaauggcccgccugagaaaugaagagagugaaaagauggcuaaagauacuagcgacgaggugucuuugaacccuaccuccgagaagcucaacaaucugcuggaaggcaacgauucagacaaugaucucagcuuagaggacuuuugaggacuaguguccaccugucccuccugggcugcuggauugucucguuuuccugccaaauaaacaggaucagcgcuuuacagaucuaaaaaaaaaaaaaaaaaaaaaaaaaaaaaaaaaaaaaaaaaaaaaaaaaaaaaaaaaaaaaaaaugcaucccccccccccccccccccccccccccccccaaaggcucuuuucagagccaccagaauu

SEQ ID NO: 10826 - RNA, 1007 nt, Artificial Sequence
  mRNA product Design e-3 comprising derived and/or modified sequence from HRSV(A2)__P03421.1__P (opt4)
gggagacuuucccauucuguagcagaauuugguguugccuguggucuuggucccgcggagaagcuuaccauggagaaguucgcccccgaguuccacggcgaggacgccaacaacagagccaccaaguuccuggagagcaucaagggcaaguucaccagccccaaggaccccaagaagaaggacagcaucaucagcgugaacagcaucgacaucgaggugaccaaggagagccccaucaccagcaacagcaccaucaucaaccccaccaacgagaccgacgacaccgccggcaacaagcccaacuaccagagaaagccccuggugagcuucaaggaggaccccacccccagcgacaaccccuucagcaagcuguacaaggagaccaucgagaccuucgacaacaacgaggaggagagcagcuacagcuacgaggagaucaacgaccagaccaacgacaacaucaccgccagacuggacagaaucgacgagaagcugagcgagauccugggcaugcugcacacccuggugguggccagcgccggccccaccagcgccagagacggcaucagagacgccaugaucggccugagagaggagaugaucgagaagaucagaaccgaggcccugaugaccaacgacagacuggaggccauggccagacugagaaacgaggagagcgagaagauggccaaggacaccagcgacgaggugagccugaaccccaccagcgagaagcugaacaaccugcuggagggcaacgacagcgacaacgaccugagccuggaggacuucugaggacuaguguccaccugucccuccugggcugcuggauugucucguuuuccugccaaauaaacaggaucagcgcuuuacagaucuaaaaaaaaaaaaaaaaaaaaaaaaaaaaaaaaaaaaaaaaaaaaaaaaaaaaaaaaaaaaaaaaugcaucccccccccccccccccccccccccccccccaaaggcucuuuucagagccaccagaauu

SEQ ID NO: 10827 - RNA, 1007 nt, Artificial Sequence
  mRNA product Design e-3 comprising derived and/or modified sequence from HRSV(A2)__P03421.1__P (opt5)
gggagacuuucccauucuguagcagaauuugguguugccuguggucuuggucccgcggagaagcuuaccauggagaaguucgcccccgaauuucacggcgaggacgcuaacaauagagccaccaaauuccuggaaagcaucaaggggaaauuuacauccccuaaggauccgaaaaagaaggacucuauuaucagcgugaacuccauugauaucgaggucacgaaagaaucucccauuaccagcaauuccacaaucaucaacccuaccaaugagacagacgauaccgcgggaaacaagcccaauuaccagcggaaaccucucguuucuuucaaggaggaccccacaccuagcgauaacccguuuuccaaacuguauaaggaaaccauugagacguucgacaauaacgaagaggagagcucuuacuccuaugaagagaucaaugaucaaaccaacgacaauauuacagcucgccuugauagaaucgacgaaaagcugagcgagauucucggcaugcugcauacccuugugguggccucugccgggcccacauccgcucgggauggaauccgcgacgccaugauuggccugagagaagagaugaucgagaaaauccggaccgaagcucucaugacgaacgaccgccuggaggccauggcgagacugcggaaugaagagagcgaaaagauggccaaagauacaucugacgaggucucccucaacccuaccagcgagaagcugaacaaucuucuggaagggaacgauuccgacaaugaucucucucuggaggacuuuugaggacuaguguccaccugucccuccugggcugcuggauugucucguuuuccugccaaauaaacaggaucagcgcuuuacagaucuaaaaaaaaaaaaaaaaaaaaaaaaaaaaaaaaaaaaaaaaaaaaaaaaaaaaaaaaaaaaaaaaugcaucccccccccccccccccccccccccccccccaaaggcucuuuucagagccaccagaauu

SEQ ID NO: 10828 - RNA, 1007 nt, Artificial Sequence
  mRNA product Design e-3 comprising derived and/or modified sequence from HRSV(A2)__P03421.1__P (opt6)
gggagacuuucccauucuguagcagaauuugguguugccuguggucuuggucccgcggagaagcuuaccauggaaaaauucgcaccagaauuucacggagaagacgcaaacaacagagcaacaaaauucuuagaaucaaucaaaggaaaauucacaagcccaaaagacccaaaaaaaaaagacucaauaauaagcguaaacucaauagacauagaaguaacaaaagaaagcccaauaacaagcaacagcacaauaauaaacccaacaaacgaaacagaugacacagcuggaaauaaaccaaacuaccaaagaaaaccccuagucagcuucaaagaagaccccacaccaucagacaacccauucagcaaacuauauaaagaaacaauagaaacauuugacaacaacgaagaagaaucaucauacucauacgaagaaauaaacgaccaaacaaacgacaacauaaccgcaagauuagacagaauagaugaaaaacuaucagaaauacuaggaaugcuacacacauuaguaguagcaagcgcaggaccaacaucagcaagagacggaauaagagacgcaaugauaggacucagagaagaaaugauagaaaaaauaagaacagaagcacuaaugacaaacgacagauuagaagcaauggcaagacuaagaaaugaagaaucggaaaaaauggcaaaagacacaucagacgaaguaagccuaaacccaacaucagaaaaauuaaauaaccuacuagaaggaaacgacagcgacaacgacuuaucacuagaagacuucuaaggacuaguguccaccugucccuccugggcugcuggauugucucguuuuccugccaaauaaacaggaucagcgcuuuacagaucuaaaaaaaaaaaaaaaaaaaaaaaaaaaaaaaaaaaaaaaaaaaaaaaaaaaaaaaaaaaaaaaaugcaucccccccccccccccccccccccccccccccaaaggcucuuuucagagccaccagaauu

SEQ ID NO: 10829 - RNA, 1007 nt, Artificial Sequence
  mRNA product Design e-3 comprising derived and/or modified sequence from HRSV(A2)__P03421.1__P (opt11)
gggagacuuucccauucuguagcagaauuugguguugccuguggucuuggucccgcggagaagcuuaccauggaaaaauucgcgcccgaguuccacggcgaggacgcgaacaaccgcgcgacaaaguuccuagaaucaaucaagggcaaauucacgagcccgaaagaccccaagaaaaaggacucaaucauaagcgugaacucgaucgacaucgaggucacgaaagagagcccgaucacaagcaacagcaccauaauaaacccgaccaacgaaacagacgacaccgcgggcaacaaaccgaacuaccaaagaaaaccgcucgugagcuucaaagaagacccgaccccaagcgacaacccguucucaaaacuauacaaggaaacgaucgagaccuucgacaacaacgaggaagagagcucguacucguacgaggaaauaaacgaccaaacaaacgacaacauaaccgcacgccuagacaggaucgacgaaaaacucucggaaauacucgggaugcuacacacgcucguggucgcgagcgcaggcccgaccucggccagggacggcaucagggacgcaaugauaggccugcgagaggaaaugaucgagaaaauacgcaccgaagcacucaugaccaacgacagacucgaagccauggccaggcucaggaacgaagaauccgaaaagauggcgaaagacaccucggacgaggucucgcucaaccccacgagcgagaaacugaacaaccuacuggaagggaacgacagcgacaacgaccuuucccucgaggacuucugaggacuaguguccaccugucccuccugggcugcuggauugucucguuuuccugccaaauaaacaggaucagcgcuuuacagaucuaaaaaaaaaaaaaaaaaaaaaaaaaaaaaaaaaaaaaaaaaaaaaaaaaaaaaaaaaaaaaaaaugcaucccccccccccccccccccccccccccccccaaaggcucuuuucagagccaccagaauu

SEQ ID NO: 10830 - RNA, 1061 nt, Artificial Sequence
  mRNA product Design e-4 comprising derived and/or modified sequence from HRSV(A2)__P03421.1__P (wt)
gggagacuccugucgggcggaaguaggaggaguagaguuuaaaaacaguacucuuuuuccgguucgggacguaguugaagcaacgacaagccggauaaccgcucuugagacaggaagcuuaccauggaaaaguuugcuccugaauuccauggagaagaugcaaacaacagggcuacuaaauuccuagaaucaauaaagggcaaauucacaucacccaaagaucccaagaaaaaagauaguaucauaucugucaacucaauagauauagaaguaaccaaagaaagcccuauaacaucaaauucaacuauuaucaacccaacaaaugagacagaugauacugcagggaacaagcccaauuaucaaagaaaaccucuaguaaguuucaaagaagacccuacaccaagugauaaucccuuuucuaaacuauacaaagaaaccauagaaacauuugauaacaaugaagaagaauccagcuauucauacgaagaaauaaaugaucagacaaacgauaauauaacagcaagauuagauaggauugaugaaaaauuaagugaaauacuaggaaugcuucacacauuaguaguggcaagugcaggaccuacaucugcucgggaugguauaagagaugccaugauugguuuaagagaagaaaugauagaaaaaaucagaacugaagcauuaaugaccaaugacagauuagaagcuauggcaagacucaggaaugaggaaagugaaaagauggcaaaagacacaucagaugaagugucucucaauccaacaucagagaaauugaacaaccuauuggaagggaaugauagugacaaugaucuaucacuugaagauuucugaggacuaguguccaccugucccuccugggcugcuggauugucucguuuuccugccaaauaaacaggaucagcgcuuuacagaucuaaaaaaaaaaaaaaaaaaaaaaaaaaaaaaaaaaaaaaaaaaaaaaaaaaaaaaaaaaaaaaaaugcaucccccccccccccccccccccccccccccccaaaggcucuuuucagagccaccagaauu

SEQ ID NO: 10831 - RNA, 1061 nt, Artificial Sequence
  mRNA product Design e-4 comprising derived and/or modified sequence from HRSV(A2)__P03421.1__P (opt1)
gggagacuccugucgggcggaaguaggaggaguagaguuuaaaaacaguacucuuuuuccgguucgggacguaguugaagcaacgacaagccggauaaccgcucuugagacaggaagcuuaccauggagaaguucgcccccgaguuccacggcgaggacgccaacaaccgcgcgaccaaguuccuggagagcaucaaggggaaguucaccuccccgaaggaccccaagaagaaggacagcaucaucuccgugaacagcaucgacaucgaggucacgaaggagucccccaucaccagcaacuccaccaucaucaaccccaccaacgagacggacgacaccgccggcaacaagccgaacuaccagcggaagccccucgugagcuucaaggaggaccccacccccuccgacaacccguucagcaagcuguacaaggagaccaucgagacguucgacaacaacgaggaggaguccagcuacuccuacgaggagaucaacgaccagaccaacgacaacaucaccgcccgccuggaccggaucgacgagaagcucagcgagauccuggggaugcugcacacccucguggucgccuccgccggccccacgagcgcgcgcgacgggauccgggacgccaugaucggccugcgcgaggagaugaucgagaagauccggaccgaggcccugaugaccaacgaccgccucgaggccauggcgcggcugcgcaacgaggaguccgagaagauggccaaggacaccagcgacgaggugucccugaaccccacgagcgagaagcucaacaaccugcuggagggcaacgacagcgacaacgaccucucccuggaggacuucugaggacuaguguccaccugucccuccugggcugcuggauugucucguuuuccugccaaauaaacaggaucagcgcuuuacagaucuaaaaaaaaaaaaaaaaaaaaaaaaaaaaaaaaaaaaaaaaaaaaaaaaaaaaaaaaaaaaaaaaugcaucccccccccccccccccccccccccccccccaaaggcucuuuucagagccaccagaauu

SEQ ID NO: 10832 - RNA, 1061 nt, Artificial Sequence
  mRNA product Design e-4 comprising derived and/or modified sequence from HRSV(A2)__P03421.1__P (opt2)
gggagacuccugucgggcggaaguaggaggaguagaguuuaaaaacaguacucuuuuuccgguucgggacguaguugaagcaacgacaagccggauaaccgcucuugagacaggaagcuuaccauggagaaguucgcccccgaguuccacggcgaggacgccaacaaccgcgccaccaaguuccucgaguccaucaagggcaaguucaccucccccaaggaccccaagaagaaggacuccaucaucuccgucaacuccaucgacaucgaggucaccaaggagucccccaucaccuccaacuccaccaucaucaaccccaccaacgagaccgacgacaccgccggcaacaagcccaacuaccagcgcaagccccucgucuccuucaaggaggaccccacccccuccgacaaccccuucuccaagcucuacaaggagaccaucgagaccuucgacaacaacgaggaggaguccuccuacuccuacgaggagaucaacgaccagaccaacgacaacaucaccgcccgccucgaccgcaucgacgagaagcucuccgagauccucggcaugcuccacacccucgucgucgccuccgccggccccaccuccgcccgcgacggcauccgcgacgccaugaucggccuccgcgaggagaugaucgagaagauccgcaccgaggcccucaugaccaacgaccgccucgaggccauggcccgccuccgcaacgaggaguccgagaagauggccaaggacaccuccgacgaggucucccucaaccccaccuccgagaagcucaacaaccuccucgagggcaacgacuccgacaacgaccucucccucgaggacuucugaggacuaguguccaccugucccuccugggcugcuggauugucucguuuuccugccaaauaaacaggaucagcgcuuuacagaucuaaaaaaaaaaaaaaaaaaaaaaaaaaaaaaaaaaaaaaaaaaaaaaaaaaaaaaaaaaaaaaaaugcaucccccccccccccccccccccccccccccccaaaggcucuuuucagagccaccagaauu

SEQ ID NO: 10833 - RNA, 1061 nt, Artificial Sequence
  mRNA product Design e-4 comprising derived and/or modified sequence from HRSV(A2)__P03421.1__P (opt3)
gggagacuccugucgggcggaaguaggaggaguagaguuuaaaaacaguacucuuuuuccgguucgggacguaguugaagcaacgacaagccggauaaccgcucuugagacaggaagcuuaccauggagaaguucgcccccgaauuucacggcgaggacgcuaacaauagagcaaccaaauuccuggaaagcaucaaggggaaauuuacauccccuaaggauccgaaaaagaaggacucuauuauaucagugaacaguaucgauauugaggucacuaaagaaagcccaaucacguccaauucuaccauuaucaaccccacaaaugagacugacgauaccgccggaaacaagccuaauuaccagaggaaaccacucguuucguucaaggaggaccccacaccuucagauaacccauuuagcaaacuuuauaaggaaaccauagagacuuucgacaauaacgaagaggagaguuccuacucuuaugaagagaucaaugaucaaacaaacgacaauauuaccgcgcggcuggaucgcaucgacgaaaaguugagcgagauuuuagguaugcugcauacgcuagugguagcuuccgccggccccacuucagcacgagaugggauccgugacgccaugauaggacucagagaagagaugauugagaaaaucaggaccgaagcucugaugacaaacgaccggcuugaggcaauggcccgccugagaaaugaagagagugaaaagauggcuaaagauacuagcgacgaggugucuuugaacccuaccuccgagaagcucaacaaucugcuggaaggcaacgauucagacaaugaucucagcuuagaggacuuuugaggacuaguguccaccugucccuccugggcugcuggauugucucguuuuccugccaaauaaacaggaucagcgcuuuacagaucuaaaaaaaaaaaaaaaaaaaaaaaaaaaaaaaaaaaaaaaaaaaaaaaaaaaaaaaaaaaaaaaaugcaucccccccccccccccccccccccccccccccaaaggcucuuuucagagccaccagaauu

SEQ ID NO: 10834 - RNA, 1061 nt, Artificial Sequence
  mRNA product Design e-4 comprising derived and/or modified sequence from HRSV(A2)__P03421.1__P (opt4)
gggagacuccugucgggcggaaguaggaggaguagaguuuaaaaacaguacucuuuuuccgguucgggacguaguugaagcaacgacaagccggauaaccgcucuugagacaggaagcuuaccauggagaaguucgcccccgaguuccacggcgaggacgccaacaacagagccaccaaguuccuggagagcaucaagggcaaguucaccagccccaaggaccccaagaagaaggacagcaucaucagcgugaacagcaucgacaucgaggugaccaaggagagccccaucaccagcaacagcaccaucaucaaccccaccaacgagaccgacgacaccgccggcaacaagcccaacuaccagagaaagccccuggugagcuucaaggaggaccccacccccagcgacaaccccuucagcaagcuguacaaggagaccaucgagaccuucgacaacaacgaggaggagagcagcuacagcuacgaggagaucaacgaccagaccaacgacaacaucaccgccagacuggacagaaucgacgagaagcugagcgagauccugggcaugcugcacacccuggugguggccagcgccggccccaccagcgccagagacggcaucagagacgccaugaucggccugagagaggagaugaucgagaagaucagaaccgaggcccugaugaccaacgacagacuggaggccauggccagacugagaaacgaggagagcgagaagauggccaaggacaccagcgacgaggugagccugaaccccaccagcgagaagcugaacaaccugcuggagggcaacgacagcgacaacgaccugagccuggaggacuucugaggacuaguguccaccugucccuccugggcugcuggauugucucguuuuccugccaaauaaacaggaucagcgcuuuacagaucuaaaaaaaaaaaaaaaaaaaaaaaaaaaaaaaaaaaaaaaaaaaaaaaaaaaaaaaaaaaaaaaaugcaucccccccccccccccccccccccccccccccaaaggcucuuuucagagccaccagaauu

SEQ ID NO: 10835 - RNA, 1061 nt, Artificial Sequence
  mRNA product Design e-4 comprising derived and/or modified sequence from HRSV(A2)__P03421.1__P (opt5)
gggagacuccugucgggcggaaguaggaggaguagaguuuaaaaacaguacucuuuuuccgguucgggacguaguugaagcaacgacaagccggauaaccgcucuugagacaggaagcuuaccauggagaaguucgcccccgaauuucacggcgaggacgcuaacaauagagccaccaaauuccuggaaagcaucaaggggaaauuuacauccccuaaggauccgaaaaagaaggacucuauuaucagcgugaacuccauugauaucgaggucacgaaagaaucucccauuaccagcaauuccacaaucaucaacccuaccaaugagacagacgauaccgcgggaaacaagcccaauuaccagcggaaaccucucguuucuuucaaggaggaccccacaccuagcgauaacccguuuuccaaacuguauaaggaaaccauugagacguucgacaauaacgaagaggagagcucuuacuccuaugaagagaucaaugaucaaaccaacgacaauauuacagcucgccuugauagaaucgacgaaaagcugagcgagauucucggcaugcugcauacccuugugguggccucugccgggcccacauccgcucgggauggaauccgcgacgccaugauuggccugagagaagagaugaucgagaaaauccggaccgaagcucucaugacgaacgaccgccuggaggccauggcgagacugcggaaugaagagagcgaaaagauggccaaagauacaucugacgaggucucccucaacccuaccagcgagaagcugaacaaucuucuggaagggaacgauuccgacaaugaucucucucuggaggacuuuugaggacuaguguccaccugucccuccugggcugcuggauugucucguuuuccugccaaauaaacaggaucagcgcuuuacagaucuaaaaaaaaaaaaaaaaaaaaaaaaaaaaaaaaaaaaaaaaaaaaaaaaaaaaaaaaaaaaaaaaugcaucccccccccccccccccccccccccccccccaaaggcucuuuucagagccaccagaauu

SEQ ID NO: 10836 - RNA, 1061 nt, Artificial Sequence
  mRNA product Design e-4 comprising derived and/or modified sequence from HRSV(A2)__P03421.1__P (opt6)
gggagacuccugucgggcggaaguaggaggaguagaguuuaaaaacaguacucuuuuuccgguucgggacguaguugaagcaacgacaagccggauaaccgcucuugagacaggaagcuuaccauggaaaaauucgcaccagaauuucacggagaagacgcaaacaacagagcaacaaaauucuuagaaucaaucaaaggaaaauucacaagcccaaaagacccaaaaaaaaaagacucaauaauaagcguaaacucaauagacauagaaguaacaaaagaaagcccaauaacaagcaacagcacaauaauaaacccaacaaacgaaacagaugacacagcuggaaauaaaccaaacuaccaaagaaaaccccuagucagcuucaaagaagaccccacaccaucagacaacccauucagcaaacuauauaaagaaacaauagaaacauuugacaacaacgaagaagaaucaucauacucauacgaagaaauaaacgaccaaacaaacgacaacauaaccgcaagauuagacagaauagaugaaaaacuaucagaaauacuaggaaugcuacacacauuaguaguagcaagcgcaggaccaacaucagcaagagacggaauaagagacgcaaugauaggacucagagaagaaaugauagaaaaaauaagaacagaagcacuaaugacaaacgacagauuagaagcaauggcaagacuaagaaaugaagaaucggaaaaaauggcaaaagacacaucagacgaaguaagccuaaacccaacaucagaaaaauuaaauaaccuacuagaaggaaacgacagcgacaacgacuuaucacuagaagacuucuaaggacuaguguccaccugucccuccugggcugcuggauugucucguuuuccugccaaauaaacaggaucagcgcuuuacagaucuaaaaaaaaaaaaaaaaaaaaaaaaaaaaaaaaaaaaaaaaaaaaaaaaaaaaaaaaaaaaaaaaugcaucccccccccccccccccccccccccccccccaaaggcucuuuucagagccaccagaauu

SEQ ID NO: 10837 - RNA, 1061 nt, Artificial Sequence
  mRNA product Design e-4 comprising derived and/or modified sequence from HRSV(A2)__P03421.1__P (opt11)
gggagacuccugucgggcggaaguaggaggaguagaguuuaaaaacaguacucuuuuuccgguucgggacguaguugaagcaacgacaagccggauaaccgcucuugagacaggaagcuuaccauggaaaaauucgcgcccgaguuccacggcgaggacgcgaacaaccgcgcgacaaaguuccuagaaucaaucaagggcaaauucacgagcccgaaagaccccaagaaaaaggacucaaucauaagcgugaacucgaucgacaucgaggucacgaaagagagcccgaucacaagcaacagcaccauaauaaacccgaccaacgaaacagacgacaccgcgggcaacaaaccgaacuaccaaagaaaaccgcucgugagcuucaaagaagacccgaccccaagcgacaacccguucucaaaacuauacaaggaaacgaucgagaccuucgacaacaacgaggaagagagcucguacucguacgaggaaauaaacgaccaaacaaacgacaacauaaccgcacgccuagacaggaucgacgaaaaacucucggaaauacucgggaugcuacacacgcucguggucgcgagcgcaggcccgaccucggccagggacggcaucagggacgcaaugauaggccugcgagaggaaaugaucgagaaaauacgcaccgaagcacucaugaccaacgacagacucgaagccauggccaggcucaggaacgaagaauccgaaaagauggcgaaagacaccucggacgaggucucgcucaaccccacgagcgagaaacugaacaaccuacuggaagggaacgacagcgacaacgaccuuucccucgaggacuucugaggacuaguguccaccugucccuccugggcugcuggauugucucguuuuccugccaaauaaacaggaucagcgcuuuacagaucuaaaaaaaaaaaaaaaaaaaaaaaaaaaaaaaaaaaaaaaaaaaaaaaaaaaaaaaaaaaaaaaaugcaucccccccccccccccccccccccccccccccaaaggcucuuuucagagccaccagaauu

SEQ ID NO: 10838 - RNA, 1028 nt, Artificial Sequence
  mRNA product Design e-5 comprising derived and/or modified sequence from HRSV(A2)__P03421.1__P (wt)
gggagagcggcucggccauuuugucccagucaguccggaggcugcggcugcagaaguaccgccugcggaguaacugcaaagaagcuuaccauggaaaaguuugcuccugaauuccauggagaagaugcaaacaacagggcuacuaaauuccuagaaucaauaaagggcaaauucacaucacccaaagaucccaagaaaaaagauaguaucauaucugucaacucaauagauauagaaguaaccaaagaaagcccuauaacaucaaauucaacuauuaucaacccaacaaaugagacagaugauacugcagggaacaagcccaauuaucaaagaaaaccucuaguaaguuucaaagaagacccuacaccaagugauaaucccuuuucuaaacuauacaaagaaaccauagaaacauuugauaacaaugaagaagaauccagcuauucauacgaagaaauaaaugaucagacaaacgauaauauaacagcaagauuagauaggauugaugaaaaauuaagugaaauacuaggaaugcuucacacauuaguaguggcaagugcaggaccuacaucugcucgggaugguauaagagaugccaugauugguuuaagagaagaaaugauagaaaaaaucagaacugaagcauuaaugaccaaugacagauuagaagcuauggcaagacucaggaaugaggaaagugaaaagauggcaaaagacacaucagaugaagugucucucaauccaacaucagagaaauugaacaaccuauuggaagggaaugauagugacaaugaucuaucacuugaagauuucugaggacuaguguccaccugucccuccugggcugcuggauugucucguuuuccugccaaauaaacaggaucagcgcuuuacagaucuaaaaaaaaaaaaaaaaaaaaaaaaaaaaaaaaaaaaaaaaaaaaaaaaaaaaaaaaaaaaaaaaugcaucccccccccccccccccccccccccccccccaaaggcucuuuucagagccaccagaauu

SEQ ID NO: 10839 - RNA, 1028 nt, Artificial Sequence
  mRNA product Design e-5 comprising derived and/or modified sequence from HRSV(A2)__P03421.1__P (opt1)
gggagagcggcucggccauuuugucccagucaguccggaggcugcggcugcagaaguaccgccugcggaguaacugcaaagaagcuuaccauggagaaguucgcccccgaguuccacggcgaggacgccaacaaccgcgcgaccaaguuccuggagagcaucaaggggaaguucaccuccccgaaggaccccaagaagaaggacagcaucaucuccgugaacagcaucgacaucgaggucacgaaggagucccccaucaccagcaacuccaccaucaucaaccccaccaacgagacggacgacaccgccggcaacaagccgaacuaccagcggaagccccucgugagcuucaaggaggaccccacccccuccgacaacccguucagcaagcuguacaaggagaccaucgagacguucgacaacaacgaggaggaguccagcuacuccuacgaggagaucaacgaccagaccaacgacaacaucaccgcccgccuggaccggaucgacgagaagcucagcgagauccuggggaugcugcacacccucguggucgccuccgccggccccacgagcgcgcgcgacgggauccgggacgccaugaucggccugcgcgaggagaugaucgagaagauccggaccgaggcccugaugaccaacgaccgccucgaggccauggcgcggcugcgcaacgaggaguccgagaagauggccaaggacaccagcgacgaggugucccugaaccccacgagcgagaagcucaacaaccugcuggagggcaacgacagcgacaacgaccucucccuggaggacuucugaggacuaguguccaccugucccuccugggcugcuggauugucucguuuuccugccaaauaaacaggaucagcgcuuuacagaucuaaaaaaaaaaaaaaaaaaaaaaaaaaaaaaaaaaaaaaaaaaaaaaaaaaaaaaaaaaaaaaaaugcaucccccccccccccccccccccccccccccccaaaggcucuuuucagagccaccagaauu

SEQ ID NO: 10840 - RNA, 1028 nt, Artificial Sequence
  mRNA product Design e-5 comprising derived and/or modified sequence from HRSV(A2)__P03421.1__P (opt2)
gggagagcggcucggccauuuugucccagucaguccggaggcugcggcugcagaaguaccgccugcggaguaacugcaaagaagcuuaccauggagaaguucgcccccgaguuccacggcgaggacgccaacaaccgcgccaccaaguuccucgaguccaucaagggcaaguucaccucccccaaggaccccaagaagaaggacuccaucaucuccgucaacuccaucgacaucgaggucaccaaggagucccccaucaccuccaacuccaccaucaucaaccccaccaacgagaccgacgacaccgccggcaacaagcccaacuaccagcgcaagccccucgucuccuucaaggaggaccccacccccuccgacaaccccuucuccaagcucuacaaggagaccaucgagaccuucgacaacaacgaggaggaguccuccuacuccuacgaggagaucaacgaccagaccaacgacaacaucaccgcccgccucgaccgcaucgacgagaagcucuccgagauccucggcaugcuccacacccucgucgucgccuccgccggccccaccuccgcccgcgacggcauccgcgacgccaugaucggccuccgcgaggagaugaucgagaagauccgcaccgaggcccucaugaccaacgaccgccucgaggccauggcccgccuccgcaacgaggaguccgagaagauggccaaggacaccuccgacgaggucucccucaaccccaccuccgagaagcucaacaaccuccucgagggcaacgacuccgacaacgaccucucccucgaggacuucugaggacuaguguccaccugucccuccugggcugcuggauugucucguuuuccugccaaauaaacaggaucagcgcuuuacagaucuaaaaaaaaaaaaaaaaaaaaaaaaaaaaaaaaaaaaaaaaaaaaaaaaaaaaaaaaaaaaaaaaugcaucccccccccccccccccccccccccccccccaaaggcucuuuucagagccaccagaauu

SEQ ID NO: 10841 - RNA, 1028 nt, Artificial Sequence
  mRNA product Design e-5 comprising derived and/or modified sequence from HRSV(A2)__P03421.1__P (opt3)
gggagagcggcucggccauuuugucccagucaguccggaggcugcggcugcagaaguaccgccugcggaguaacugcaaagaagcuuaccauggagaaguucgcccccgaauuucacggcgaggacgcuaacaauagagcaaccaaauuccuggaaagcaucaaggggaaauuuacauccccuaaggauccgaaaaagaaggacucuauuauaucagugaacaguaucgauauugaggucacuaaagaaagcccaaucacguccaauucuaccauuaucaaccccacaaaugagacugacgauaccgccggaaacaagccuaauuaccagaggaaaccacucguuucguucaaggaggaccccacaccuucagauaacccauuuagcaaacuuuauaaggaaaccauagagacuuucgacaauaacgaagaggagaguuccuacucuuaugaagagaucaaugaucaaacaaacgacaauauuaccgcgcggcuggaucgcaucgacgaaaaguugagcgagauuuuagguaugcugcauacgcuagugguagcuuccgccggccccacuucagcacgagaugggauccgugacgccaugauaggacucagagaagagaugauugagaaaaucaggaccgaagcucugaugacaaacgaccggcuugaggcaauggcccgccugagaaaugaagagagugaaaagauggcuaaagauacuagcgacgaggugucuuugaacccuaccuccgagaagcucaacaaucugcuggaaggcaacgauucagacaaugaucucagcuuagaggacuuuugaggacuaguguccaccugucccuccugggcugcuggauugucucguuuuccugccaaauaaacaggaucagcgcuuuacagaucuaaaaaaaaaaaaaaaaaaaaaaaaaaaaaaaaaaaaaaaaaaaaaaaaaaaaaaaaaaaaaaaaugcaucccccccccccccccccccccccccccccccaaaggcucuuuucagagccaccagaauu

SEQ ID NO: 10842 - RNA, 1028 nt, Artificial Sequence
  mRNA product Design e-5 comprising derived and/or modified sequence from HRSV(A2)__P03421.1__P (opt4)
gggagagcggcucggccauuuugucccagucaguccggaggcugcggcugcagaaguaccgccugcggaguaacugcaaagaagcuuaccauggagaaguucgcccccgaguuccacggcgaggacgccaacaacagagccaccaaguuccuggagagcaucaagggcaaguucaccagccccaaggaccccaagaagaaggacagcaucaucagcgugaacagcaucgacaucgaggugaccaaggagagccccaucaccagcaacagcaccaucaucaaccccaccaacgagaccgacgacaccgccggcaacaagcccaacuaccagagaaagccccuggugagcuucaaggaggaccccacccccagcgacaaccccuucagcaagcuguacaaggagaccaucgagaccuucgacaacaacgaggaggagagcagcuacagcuacgaggagaucaacgaccagaccaacgacaacaucaccgccagacuggacagaaucgacgagaagcugagcgagauccugggcaugcugcacacccuggugguggccagcgccggccccaccagcgccagagacggcaucagagacgccaugaucggccugagagaggagaugaucgagaagaucagaaccgaggcccugaugaccaacgacagacuggaggccauggccagacugagaaacgaggagagcgagaagauggccaaggacaccagcgacgaggugagccugaaccccaccagcgagaagcugaacaaccugcuggagggcaacgacagcgacaacgaccugagccuggaggacuucugaggacuaguguccaccugucccuccugggcugcuggauugucucguuuuccugccaaauaaacaggaucagcgcuuuacagaucuaaaaaaaaaaaaaaaaaaaaaaaaaaaaaaaaaaaaaaaaaaaaaaaaaaaaaaaaaaaaaaaaugcaucccccccccccccccccccccccccccccccaaaggcucuuuucagagccaccagaauu

SEQ ID NO: 10843 - RNA, 1028 nt, Artificial Sequence
  mRNA product Design e-5 comprising derived and/or modified sequence from HRSV(A2)__P03421.1__P (opt5)
gggagagcggcucggccauuuugucccagucaguccggaggcugcggcugcagaaguaccgccugcggaguaacugcaaagaagcuuaccauggagaaguucgcccccgaauuucacggcgaggacgcuaacaauagagccaccaaauuccuggaaagcaucaaggggaaauuuacauccccuaaggauccgaaaaagaaggacucuauuaucagcgugaacuccauugauaucgaggucacgaaagaaucucccauuaccagcaauuccacaaucaucaacccuaccaaugagacagacgauaccgcgggaaacaagcccaauuaccagcggaaaccucucguuucuuucaaggaggaccccacaccuagcgauaacccguuuuccaaacuguauaaggaaaccauugagacguucgacaauaacgaagaggagagcucuuacuccuaugaagagaucaaugaucaaaccaacgacaauauuacagcucgccuugauagaaucgacgaaaagcugagcgagauucucggcaugcugcauacccuugugguggccucugccgggcccacauccgcucgggauggaauccgcgacgccaugauuggccugagagaagagaugaucgagaaaauccggaccgaagcucucaugacgaacgaccgccuggaggccauggcgagacugcggaaugaagagagcgaaaagauggccaaagauacaucugacgaggucucccucaacccuaccagcgagaagcugaacaaucuucuggaagggaacgauuccgacaaugaucucucucuggaggacuuuugaggacuaguguccaccugucccuccugggcugcuggauugucucguuuuccugccaaauaaacaggaucagcgcuuuacagaucuaaaaaaaaaaaaaaaaaaaaaaaaaaaaaaaaaaaaaaaaaaaaaaaaaaaaaaaaaaaaaaaaugcaucccccccccccccccccccccccccccccccaaaggcucuuuucagagccaccagaauu

SEQ ID NO: 10844 - RNA, 1028 nt, Artificial Sequence
  mRNA product Design e-5 comprising derived and/or modified sequence from HRSV(A2)__P03421.1__P (opt6)
gggagagcggcucggccauuuugucccagucaguccggaggcugcggcugcagaaguaccgccugcggaguaacugcaaagaagcuuaccauggaaaaauucgcaccagaauuucacggagaagacgcaaacaacagagcaacaaaauucuuagaaucaaucaaaggaaaauucacaagcccaaaagacccaaaaaaaaaagacucaauaauaagcguaaacucaauagacauagaaguaacaaaagaaagcccaauaacaagcaacagcacaauaauaaacccaacaaacgaaacagaugacacagcuggaaauaaaccaaacuaccaaagaaaaccccuagucagcuucaaagaagaccccacaccaucagacaacccauucagcaaacuauauaaagaaacaauagaaacauuugacaacaacgaagaagaaucaucauacucauacgaagaaauaaacgaccaaacaaacgacaacauaaccgcaagauuagacagaauagaugaaaaacuaucagaaauacuaggaaugcuacacacauuaguaguagcaagcgcaggaccaacaucagcaagagacggaauaagagacgcaaugauaggacucagagaagaaaugauagaaaaaauaagaacagaagcacuaaugacaaacgacagauuagaagcaauggcaagacuaagaaaugaagaaucggaaaaaauggcaaaagacacaucagacgaaguaagccuaaacccaacaucagaaaaauuaaauaaccuacuagaaggaaacgacagcgacaacgacuuaucacuagaagacuucuaaggacuaguguccaccugucccuccugggcugcuggauugucucguuuuccugccaaauaaacaggaucagcgcuuuacagaucuaaaaaaaaaaaaaaaaaaaaaaaaaaaaaaaaaaaaaaaaaaaaaaaaaaaaaaaaaaaaaaaaugcaucccccccccccccccccccccccccccccccaaaggcucuuuucagagccaccagaauu

SEQ ID NO: 10845 - RNA, 1028 nt, Artificial Sequence
  mRNA product Design e-5 comprising derived and/or modified sequence from HRSV(A2)__P03421.1__P (opt11)
gggagagcggcucggccauuuugucccagucaguccggaggcugcggcugcagaaguaccgccugcggaguaacugcaaagaagcuuaccauggaaaaauucgcgcccgaguuccacggcgaggacgcgaacaaccgcgcgacaaaguuccuagaaucaaucaagggcaaauucacgagcccgaaagaccccaagaaaaaggacucaaucauaagcgugaacucgaucgacaucgaggucacgaaagagagcccgaucacaagcaacagcaccauaauaaacccgaccaacgaaacagacgacaccgcgggcaacaaaccgaacuaccaaagaaaaccgcucgugagcuucaaagaagacccgaccccaagcgacaacccguucucaaaacuauacaaggaaacgaucgagaccuucgacaacaacgaggaagagagcucguacucguacgaggaaauaaacgaccaaacaaacgacaacauaaccgcacgccuagacaggaucgacgaaaaacucucggaaauacucgggaugcuacacacgcucguggucgcgagcgcaggcccgaccucggccagggacggcaucagggacgcaaugauaggccugcgagaggaaaugaucgagaaaauacgcaccgaagcacucaugaccaacgacagacucgaagccauggccaggcucaggaacgaagaauccgaaaagauggcgaaagacaccucggacgaggucucgcucaaccccacgagcgagaaacugaacaaccuacuggaagggaacgacagcgacaacgaccuuucccucgaggacuucugaggacuaguguccaccugucccuccugggcugcuggauugucucguuuuccugccaaauaaacaggaucagcgcuuuacagaucuaaaaaaaaaaaaaaaaaaaaaaaaaaaaaaaaaaaaaaaaaaaaaaaaaaaaaaaaaaaaaaaaugcaucccccccccccccccccccccccccccccccaaaggcucuuuucagagccaccagaauu

SEQ ID NO: 10846 - RNA, 1095 nt, Artificial Sequence
  mRNA product Design e-6 comprising derived and/or modified sequence from HRSV(A2)__P03421.1__P (wt)
gggagagcggcucggccauuuugucccagucaguccggaggcugcggcugcagaaguaccgccugcggaguaacugcaaagaagcuuaccauggaaaaguuugcuccugaauuccauggagaagaugcaaacaacagggcuacuaaauuccuagaaucaauaaagggcaaauucacaucacccaaagaucccaagaaaaaagauaguaucauaucugucaacucaauagauauagaaguaaccaaagaaagcccuauaacaucaaauucaacuauuaucaacccaacaaaugagacagaugauacugcagggaacaagcccaauuaucaaagaaaaccucuaguaaguuucaaagaagacccuacaccaagugauaaucccuuuucuaaacuauacaaagaaaccauagaaacauuugauaacaaugaagaagaauccagcuauucauacgaagaaauaaaugaucagacaaacgauaauauaacagcaagauuagauaggauugaugaaaaauuaagugaaauacuaggaaugcuucacacauuaguaguggcaagugcaggaccuacaucugcucgggaugguauaagagaugccaugauugguuuaagagaagaaaugauagaaaaaaucagaacugaagcauuaaugaccaaugacagauuagaagcuauggcaagacucaggaaugaggaaagugaaaagauggcaaaagacacaucagaugaagugucucucaauccaacaucagagaaauugaacaaccuauuggaagggaaugauagugacaaugaucuaucacuugaagauuucugaggacuaguacuggcugcaucucccuuuccucuguccuccauccuucucccaggauggugaagggggaccugguacccagugauccccaccccaggauccuaaaucaugacuuaccugcuaauaaaaacucauuggaaaagugagaagaucuaaaaaaaaaaaaaaaaaaaaaaaaaaaaaaaaaaaaaaaaaaaaaaaaaaaaaaaaaaaaaaaaugcaucccccccccccccccccccccccccccccccaaaggcucuuuucagagccaccagaauu

SEQ ID NO: 10847 - RNA, 1095 nt, Artificial Sequence
  mRNA product Design e-6 comprising derived and/or modified sequence from HRSV(A2)__P03421.1__P (opt1)
gggagagcggcucggccauuuugucccagucaguccggaggcugcggcugcagaaguaccgccugcggaguaacugcaaagaagcuuaccauggagaaguucgcccccgaguuccacggcgaggacgccaacaaccgcgcgaccaaguuccuggagagcaucaaggggaaguucaccuccccgaaggaccccaagaagaaggacagcaucaucuccgugaacagcaucgacaucgaggucacgaaggagucccccaucaccagcaacuccaccaucaucaaccccaccaacgagacggacgacaccgccggcaacaagccgaacuaccagcggaagccccucgugagcuucaaggaggaccccacccccuccgacaacccguucagcaagcuguacaaggagaccaucgagacguucgacaacaacgaggaggaguccagcuacuccuacgaggagaucaacgaccagaccaacgacaacaucaccgcccgccuggaccggaucgacgagaagcucagcgagauccuggggaugcugcacacccucguggucgccuccgccggccccacgagcgcgcgcgacgggauccgggacgccaugaucggccugcgcgaggagaugaucgagaagauccggaccgaggcccugaugaccaacgaccgccucgaggccauggcgcggcugcgcaacgaggaguccgagaagauggccaaggacaccagcgacgaggugucccugaaccccacgagcgagaagcucaacaaccugcuggagggcaacgacagcgacaacgaccucucccuggaggacuucugaggacuaguacuggcugcaucucccuuuccucuguccuccauccuucucccaggauggugaagggggaccugguacccagugauccccaccccaggauccuaaaucaugacuuaccugcuaauaaaaacucauuggaaaagugagaagaucuaaaaaaaaaaaaaaaaaaaaaaaaaaaaaaaaaaaaaaaaaaaaaaaaaaaaaaaaaaaaaaaaugcaucccccccccccccccccccccccccccccccaaaggcucuuuucagagccaccagaauu

SEQ ID NO: 10848 - RNA, 1095 nt, Artificial Sequence
  mRNA product Design e-6 comprising derived and/or modified sequence from HRSV(A2)__P03421.1__P (opt2)
gggagagcggcucggccauuuugucccagucaguccggaggcugcggcugcagaaguaccgccugcggaguaacugcaaagaagcuuaccauggagaaguucgcccccgaguuccacggcgaggacgccaacaaccgcgccaccaaguuccucgaguccaucaagggcaaguucaccucccccaaggaccccaagaagaaggacuccaucaucuccgucaacuccaucgacaucgaggucaccaaggagucccccaucaccuccaacuccaccaucaucaaccccaccaacgagaccgacgacaccgccggcaacaagcccaacuaccagcgcaagccccucgucuccuucaaggaggaccccacccccuccgacaaccccuucuccaagcucuacaaggagaccaucgagaccuucgacaacaacgaggaggaguccuccuacuccuacgaggagaucaacgaccagaccaacgacaacaucaccgcccgccucgaccgcaucgacgagaagcucuccgagauccucggcaugcuccacacccucgucgucgccuccgccggccccaccuccgcccgcgacggcauccgcgacgccaugaucggccuccgcgaggagaugaucgagaagauccgcaccgaggcccucaugaccaacgaccgccucgaggccauggcccgccuccgcaacgaggaguccgagaagauggccaaggacaccuccgacgaggucucccucaaccccaccuccgagaagcucaacaaccuccucgagggcaacgacuccgacaacgaccucucccucgaggacuucugaggacuaguacuggcugcaucucccuuuccucuguccuccauccuucucccaggauggugaagggggaccugguacccagugauccccaccccaggauccuaaaucaugacuuaccugcuaauaaaaacucauuggaaaagugagaagaucuaaaaaaaaaaaaaaaaaaaaaaaaaaaaaaaaaaaaaaaaaaaaaaaaaaaaaaaaaaaaaaaaugcaucccccccccccccccccccccccccccccccaaaggcucuuuucagagccaccagaauu

SEQ ID NO: 10849 - RNA, 1095 nt, Artificial Sequence
  mRNA product Design e-6 comprising derived and/or modified sequence from HRSV(A2)__P03421.1__P (opt3)
gggagagcggcucggccauuuugucccagucaguccggaggcugcggcugcagaaguaccgccugcggaguaacugcaaagaagcuuaccauggagaaguucgcccccgaauuucacggcgaggacgcuaacaauagagcaaccaaauuccuggaaagcaucaaggggaaauuuacauccccuaaggauccgaaaaagaaggacucuauuauaucagugaacaguaucgauauugaggucacuaaagaaagcccaaucacguccaauucuaccauuaucaaccccacaaaugagacugacgauaccgccggaaacaagccuaauuaccagaggaaaccacucguuucguucaaggaggaccccacaccuucagauaacccauuuagcaaacuuuauaaggaaaccauagagacuuucgacaauaacgaagaggagaguuccuacucuuaugaagagaucaaugaucaaacaaacgacaauauuaccgcgcggcuggaucgcaucgacgaaaaguugagcgagauuuuagguaugcugcauacgcuagugguagcuuccgccggccccacuucagcacgagaugggauccgugacgccaugauaggacucagagaagagaugauugagaaaaucaggaccgaagcucugaugacaaacgaccggcuugaggcaauggcccgccugagaaaugaagagagugaaaagauggcuaaagauacuagcgacgaggugucuuugaacccuaccuccgagaagcucaacaaucugcuggaaggcaacgauucagacaaugaucucagcuuagaggacuuuugaggacuaguacuggcugcaucucccuuuccucuguccuccauccuucucccaggauggugaagggggaccugguacccagugauccccaccccaggauccuaaaucaugacuuaccugcuaauaaaaacucauuggaaaagugagaagaucuaaaaaaaaaaaaaaaaaaaaaaaaaaaaaaaaaaaaaaaaaaaaaaaaaaaaaaaaaaaaaaaaugcaucccccccccccccccccccccccccccccccaaaggcucuuuucagagccaccagaauu

SEQ ID NO: 10850 - RNA, 1095 nt, Artificial Sequence
  mRNA product Design e-6 comprising derived and/or modified sequence from HRSV(A2)__P03421.1__P (opt4)
gggagagcggcucggccauuuugucccagucaguccggaggcugcggcugcagaaguaccgccugcggaguaacugcaaagaagcuuaccauggagaaguucgcccccgaguuccacggcgaggacgccaacaacagagccaccaaguuccuggagagcaucaagggcaaguucaccagccccaaggaccccaagaagaaggacagcaucaucagcgugaacagcaucgacaucgaggugaccaaggagagccccaucaccagcaacagcaccaucaucaaccccaccaacgagaccgacgacaccgccggcaacaagcccaacuaccagagaaagccccuggugagcuucaaggaggaccccacccccagcgacaaccccuucagcaagcuguacaaggagaccaucgagaccuucgacaacaacgaggaggagagcagcuacagcuacgaggagaucaacgaccagaccaacgacaacaucaccgccagacuggacagaaucgacgagaagcugagcgagauccugggcaugcugcacacccuggugguggccagcgccggccccaccagcgccagagacggcaucagagacgccaugaucggccugagagaggagaugaucgagaagaucagaaccgaggcccugaugaccaacgacagacuggaggccauggccagacugagaaacgaggagagcgagaagauggccaaggacaccagcgacgaggugagccugaaccccaccagcgagaagcugaacaaccugcuggagggcaacgacagcgacaacgaccugagccuggaggacuucugaggacuaguacuggcugcaucucccuuuccucuguccuccauccuucucccaggauggugaagggggaccugguacccagugauccccaccccaggauccuaaaucaugacuuaccugcuaauaaaaacucauuggaaaagugagaagaucuaaaaaaaaaaaaaaaaaaaaaaaaaaaaaaaaaaaaaaaaaaaaaaaaaaaaaaaaaaaaaaaaugcaucccccccccccccccccccccccccccccccaaaggcucuuuucagagccaccagaauu

SEQ ID NO: 10851 - RNA, 1095 nt, Artificial Sequence
  mRNA product Design e-6 comprising derived and/or modified sequence from HRSV(A2)__P03421.1__P (opt5)
gggagagcggcucggccauuuugucccagucaguccggaggcugcggcugcagaaguaccgccugcggaguaacugcaaagaagcuuaccauggagaaguucgcccccgaauuucacggcgaggacgcuaacaauagagccaccaaauuccuggaaagcaucaaggggaaauuuacauccccuaaggauccgaaaaagaaggacucuauuaucagcgugaacuccauugauaucgaggucacgaaagaaucucccauuaccagcaauuccacaaucaucaacccuaccaaugagacagacgauaccgcgggaaacaagcccaauuaccagcggaaaccucucguuucuuucaaggaggaccccacaccuagcgauaacccguuuuccaaacuguauaaggaaaccauugagacguucgacaauaacgaagaggagagcucuuacuccuaugaagagaucaaugaucaaaccaacgacaauauuacagcucgccuugauagaaucgacgaaaagcugagcgagauucucggcaugcugcauacccuugugguggccucugccgggcccacauccgcucgggauggaauccgcgacgccaugauuggccugagagaagagaugaucgagaaaauccggaccgaagcucucaugacgaacgaccgccuggaggccauggcgagacugcggaaugaagagagcgaaaagauggccaaagauacaucugacgaggucucccucaacccuaccagcgagaagcugaacaaucuucuggaagggaacgauuccgacaaugaucucucucuggaggacuuuugaggacuaguacuggcugcaucucccuuuccucuguccuccauccuucucccaggauggugaagggggaccugguacccagugauccccaccccaggauccuaaaucaugacuuaccugcuaauaaaaacucauuggaaaagugagaagaucuaaaaaaaaaaaaaaaaaaaaaaaaaaaaaaaaaaaaaaaaaaaaaaaaaaaaaaaaaaaaaaaaugcaucccccccccccccccccccccccccccccccaaaggcucuuuucagagccaccagaauu

SEQ ID NO: 10852 - RNA, 1095 nt, Artificial Sequence
  mRNA product Design e-6 comprising derived and/or modified sequence from HRSV(A2)__P03421.1__P (opt6)
gggagagcggcucggccauuuugucccagucaguccggaggcugcggcugcagaaguaccgccugcggaguaacugcaaagaagcuuaccauggaaaaauucgcaccagaauuucacggagaagacgcaaacaacagagcaacaaaauucuuagaaucaaucaaaggaaaauucacaagcccaaaagacccaaaaaaaaaagacucaauaauaagcguaaacucaauagacauagaaguaacaaaagaaagcccaauaacaagcaacagcacaauaauaaacccaacaaacgaaacagaugacacagcuggaaauaaaccaaacuaccaaagaaaaccccuagucagcuucaaagaagaccccacaccaucagacaacccauucagcaaacuauauaaagaaacaauagaaacauuugacaacaacgaagaagaaucaucauacucauacgaagaaauaaacgaccaaacaaacgacaacauaaccgcaagauuagacagaauagaugaaaaacuaucagaaauacuaggaaugcuacacacauuaguaguagcaagcgcaggaccaacaucagcaagagacggaauaagagacgcaaugauaggacucagagaagaaaugauagaaaaaauaagaacagaagcacuaaugacaaacgacagauuagaagcaauggcaagacuaagaaaugaagaaucggaaaaaauggcaaaagacacaucagacgaaguaagccuaaacccaacaucagaaaaauuaaauaaccuacuagaaggaaacgacagcgacaacgacuuaucacuagaagacuucuaaggacuaguacuggcugcaucucccuuuccucuguccuccauccuucucccaggauggugaagggggaccugguacccagugauccccaccccaggauccuaaaucaugacuuaccugcuaauaaaaacucauuggaaaagugagaagaucuaaaaaaaaaaaaaaaaaaaaaaaaaaaaaaaaaaaaaaaaaaaaaaaaaaaaaaaaaaaaaaaaugcaucccccccccccccccccccccccccccccccaaaggcucuuuucagagccaccagaauu

SEQ ID NO: 10853 - RNA, 1095 nt, Artificial Sequence
  mRNA product Design e-6 comprising derived and/or modified sequence from HRSV(A2)__P03421.1__P (opt11)
gggagagcggcucggccauuuugucccagucaguccggaggcugcggcugcagaaguaccgccugcggaguaacugcaaagaagcuuaccauggaaaaauucgcgcccgaguuccacggcgaggacgcgaacaaccgcgcgacaaaguuccuagaaucaaucaagggcaaauucacgagcccgaaagaccccaagaaaaaggacucaaucauaagcgugaacucgaucgacaucgaggucacgaaagagagcccgaucacaagcaacagcaccauaauaaacccgaccaacgaaacagacgacaccgcgggcaacaaaccgaacuaccaaagaaaaccgcucgugagcuucaaagaagacccgaccccaagcgacaacccguucucaaaacuauacaaggaaacgaucgagaccuucgacaacaacgaggaagagagcucguacucguacgaggaaauaaacgaccaaacaaacgacaacauaaccgcacgccuagacaggaucgacgaaaaacucucggaaauacucgggaugcuacacacgcucguggucgcgagcgcaggcccgaccucggccagggacggcaucagggacgcaaugauaggccugcgagaggaaaugaucgagaaaauacgcaccgaagcacucaugaccaacgacagacucgaagccauggccaggcucaggaacgaagaauccgaaaagauggcgaaagacaccucggacgaggucucgcucaaccccacgagcgagaaacugaacaaccuacuggaagggaacgacagcgacaacgaccuuucccucgaggacuucugaggacuaguacuggcugcaucucccuuuccucuguccuccauccuucucccaggauggugaagggggaccugguacccagugauccccaccccaggauccuaaaucaugacuuaccugcuaauaaaaacucauuggaaaagugagaagaucuaaaaaaaaaaaaaaaaaaaaaaaaaaaaaaaaaaaaaaaaaaaaaaaaaaaaaaaaaaaaaaaaugcaucccccccccccccccccccccccccccccccaaaggcucuuuucagagccaccagaauu

SEQ ID NO: 10854 - RNA, 1311 nt, Artificial Sequence
  mRNA product Design f-1 comprising derived and/or modified sequence from HRSV(A2)__P03421.1__P (wt)
gggagagcggcucggccauuuugucccagucaguccggaggcugcggcugcagaaguaccgccugcggaguaacugcaaagaagcuuaccauggaaaaguuugcuccugaauuccauggagaagaugcaaacaacagggcuacuaaauuccuagaaucaauaaagggcaaauucacaucacccaaagaucccaagaaaaaagauaguaucauaucugucaacucaauagauauagaaguaaccaaagaaagcccuauaacaucaaauucaacuauuaucaacccaacaaaugagacagaugauacugcagggaacaagcccaauuaucaaagaaaaccucuaguaaguuucaaagaagacccuacaccaagugauaaucccuuuucuaaacuauacaaagaaaccauagaaacauuugauaacaaugaagaagaauccagcuauucauacgaagaaauaaaugaucagacaaacgauaauauaacagcaagauuagauaggauugaugaaaaauuaagugaaauacuaggaaugcuucacacauuaguaguggcaagugcaggaccuacaucugcucgggaugguauaagagaugccaugauugguuuaagagaagaaaugauagaaaaaaucagaacugaagcauuaaugaccaaugacagauuagaagcuauggcaagacucaggaaugaggaaagugaaaagauggcaaaagacacaucagaugaagugucucucaauccaacaucagagaaauugaacaaccuauuggaagggaaugauagugacaaugaucuaucacuugaagauuucugaggacuagugaagggaacacccaaauuuaauucagccuuaagcacaauuaauuaagagugaaacguaauuguacaagcaguuggucacccaccauagggcaugaucaacaccgcaaccuuuccuuuuucccccagugauucugaaaaaccccucuucccuucagcuugcuuagauguuccaaauuuaguaagcuuaaggcggccuacagaagaaaaagaaaaaaaaggccacaaaaguucccucucacuuucaguaaauaaaauaaaagcagcaacagaaauaaagaaauaaaugaaauucaaaaugaaauaaauauuguguugugcagcauuaaaaaaucaauaaaaauuaaaaaugagcaagaucuaaaaaaaaaaaaaaaaaaaaaaaaaaaaaaaaaaaaaaaaaaaaaaaaaaaaaaaaaaaaaaaaugcaucccccccccccccccccccccccccccccccaaaggcucuuuucagagccaccagaauu

SEQ ID NO: 10855 - RNA, 1311 nt, Artificial Sequence
  mRNA product Design f-1 comprising derived and/or modified sequence from HRSV(A2)__P03421.1__P (opt1)
gggagagcggcucggccauuuugucccagucaguccggaggcugcggcugcagaaguaccgccugcggaguaacugcaaagaagcuuaccauggagaaguucgcccccgaguuccacggcgaggacgccaacaaccgcgcgaccaaguuccuggagagcaucaaggggaaguucaccuccccgaaggaccccaagaagaaggacagcaucaucuccgugaacagcaucgacaucgaggucacgaaggagucccccaucaccagcaacuccaccaucaucaaccccaccaacgagacggacgacaccgccggcaacaagccgaacuaccagcggaagccccucgugagcuucaaggaggaccccacccccuccgacaacccguucagcaagcuguacaaggagaccaucgagacguucgacaacaacgaggaggaguccagcuacuccuacgaggagaucaacgaccagaccaacgacaacaucaccgcccgccuggaccggaucgacgagaagcucagcgagauccuggggaugcugcacacccucguggucgccuccgccggccccacgagcgcgcgcgacgggauccgggacgccaugaucggccugcgcgaggagaugaucgagaagauccggaccgaggcccugaugaccaacgaccgccucgaggccauggcgcggcugcgcaacgaggaguccgagaagauggccaaggacaccagcgacgaggugucccugaaccccacgagcgagaagcucaacaaccugcuggagggcaacgacagcgacaacgaccucucccuggaggacuucugaggacuagugaagggaacacccaaauuuaauucagccuuaagcacaauuaauuaagagugaaacguaauuguacaagcaguuggucacccaccauagggcaugaucaacaccgcaaccuuuccuuuuucccccagugauucugaaaaaccccucuucccuucagcuugcuuagauguuccaaauuuaguaagcuuaaggcggccuacagaagaaaaagaaaaaaaaggccacaaaaguucccucucacuuucaguaaauaaaauaaaagcagcaacagaaauaaagaaauaaaugaaauucaaaaugaaauaaauauuguguugugcagcauuaaaaaaucaauaaaaauuaaaaaugagcaagaucuaaaaaaaaaaaaaaaaaaaaaaaaaaaaaaaaaaaaaaaaaaaaaaaaaaaaaaaaaaaaaaaaugcaucccccccccccccccccccccccccccccccaaaggcucuuuucagagccaccagaauu

SEQ ID NO: 10856 - RNA, 1311 nt, Artificial Sequence
  mRNA product Design f-1 comprising derived and/or modified sequence from HRSV(A2)__P03421.1__P (opt2)
gggagagcggcucggccauuuugucccagucaguccggaggcugcggcugcagaaguaccgccugcggaguaacugcaaagaagcuuaccauggagaaguucgcccccgaguuccacggcgaggacgccaacaaccgcgccaccaaguuccucgaguccaucaagggcaaguucaccucccccaaggaccccaagaagaaggacuccaucaucuccgucaacuccaucgacaucgaggucaccaaggagucccccaucaccuccaacuccaccaucaucaaccccaccaacgagaccgacgacaccgccggcaacaagcccaacuaccagcgcaagccccucgucuccuucaaggaggaccccacccccuccgacaaccccuucuccaagcucuacaaggagaccaucgagaccuucgacaacaacgaggaggaguccuccuacuccuacgaggagaucaacgaccagaccaacgacaacaucaccgcccgccucgaccgcaucgacgagaagcucuccgagauccucggcaugcuccacacccucgucgucgccuccgccggccccaccuccgcccgcgacggcauccgcgacgccaugaucggccuccgcgaggagaugaucgagaagauccgcaccgaggcccucaugaccaacgaccgccucgaggccauggcccgccuccgcaacgaggaguccgagaagauggccaaggacaccuccgacgaggucucccucaaccccaccuccgagaagcucaacaaccuccucgagggcaacgacuccgacaacgaccucucccucgaggacuucugaggacuagugaagggaacacccaaauuuaauucagccuuaagcacaauuaauuaagagugaaacguaauuguacaagcaguuggucacccaccauagggcaugaucaacaccgcaaccuuuccuuuuucccccagugauucugaaaaaccccucuucccuucagcuugcuuagauguuccaaauuuaguaagcuuaaggcggccuacagaagaaaaagaaaaaaaaggccacaaaaguucccucucacuuucaguaaauaaaauaaaagcagcaacagaaauaaagaaauaaaugaaauucaaaaugaaauaaauauuguguugugcagcauuaaaaaaucaauaaaaauuaaaaaugagcaagaucuaaaaaaaaaaaaaaaaaaaaaaaaaaaaaaaaaaaaaaaaaaaaaaaaaaaaaaaaaaaaaaaaugcaucccccccccccccccccccccccccccccccaaaggcucuuuucagagccaccagaauu

SEQ ID NO: 10857 - RNA, 1311 nt, Artificial Sequence
  mRNA product Design f-1 comprising derived and/or modified sequence from HRSV(A2)__P03421.1__P (opt3)
gggagagcggcucggccauuuugucccagucaguccggaggcugcggcugcagaaguaccgccugcggaguaacugcaaagaagcuuaccauggagaaguucgcccccgaauuucacggcgaggacgcuaacaauagagcaaccaaauuccuggaaagcaucaaggggaaauuuacauccccuaaggauccgaaaaagaaggacucuauuauaucagugaacaguaucgauauugaggucacuaaagaaagcccaaucacguccaauucuaccauuaucaaccccacaaaugagacugacgauaccgccggaaacaagccuaauuaccagaggaaaccacucguuucguucaaggaggaccccacaccuucagauaacccauuuagcaaacuuuauaaggaaaccauagagacuuucgacaauaacgaagaggagaguuccuacucuuaugaagagaucaaugaucaaacaaacgacaauauuaccgcgcggcuggaucgcaucgacgaaaaguugagcgagauuuuagguaugcugcauacgcuagugguagcuuccgccggccccacuucagcacgagaugggauccgugacgccaugauaggacucagagaagagaugauugagaaaaucaggaccgaagcucugaugacaaacgaccggcuugaggcaauggcccgccugagaaaugaagagagugaaaagauggcuaaagauacuagcgacgaggugucuuugaacccuaccuccgagaagcucaacaaucugcuggaaggcaacgauucagacaaugaucucagcuuagaggacuuuugaggacuagugaagggaacacccaaauuuaauucagccuuaagcacaauuaauuaagagugaaacguaauuguacaagcaguuggucacccaccauagggcaugaucaacaccgcaaccuuuccuuuuucccccagugauucugaaaaaccccucuucccuucagcuugcuuagauguuccaaauuuaguaagcuuaaggcggccuacagaagaaaaagaaaaaaaaggccacaaaaguucccucucacuuucaguaaauaaaauaaaagcagcaacagaaauaaagaaauaaaugaaauucaaaaugaaauaaauauuguguugugcagcauuaaaaaaucaauaaaaauuaaaaaugagcaagaucuaaaaaaaaaaaaaaaaaaaaaaaaaaaaaaaaaaaaaaaaaaaaaaaaaaaaaaaaaaaaaaaaugcaucccccccccccccccccccccccccccccccaaaggcucuuuucagagccaccagaauu

SEQ ID NO: 10858 - RNA, 1311 nt, Artificial Sequence
  mRNA product Design f-1 comprising derived and/or modified sequence from HRSV(A2)__P03421.1__P (opt4)
gggagagcggcucggccauuuugucccagucaguccggaggcugcggcugcagaaguaccgccugcggaguaacugcaaagaagcuuaccauggagaaguucgcccccgaguuccacggcgaggacgccaacaacagagccaccaaguuccuggagagcaucaagggcaaguucaccagccccaaggaccccaagaagaaggacagcaucaucagcgugaacagcaucgacaucgaggugaccaaggagagccccaucaccagcaacagcaccaucaucaaccccaccaacgagaccgacgacaccgccggcaacaagcccaacuaccagagaaagccccuggugagcuucaaggaggaccccacccccagcgacaaccccuucagcaagcuguacaaggagaccaucgagaccuucgacaacaacgaggaggagagcagcuacagcuacgaggagaucaacgaccagaccaacgacaacaucaccgccagacuggacagaaucgacgagaagcugagcgagauccugggcaugcugcacacccuggugguggccagcgccggccccaccagcgccagagacggcaucagagacgccaugaucggccugagagaggagaugaucgagaagaucagaaccgaggcccugaugaccaacgacagacuggaggccauggccagacugagaaacgaggagagcgagaagauggccaaggacaccagcgacgaggugagccugaaccccaccagcgagaagcugaacaaccugcuggagggcaacgacagcgacaacgaccugagccuggaggacuucugaggacuagugaagggaacacccaaauuuaauucagccuuaagcacaauuaauuaagagugaaacguaauuguacaagcaguuggucacccaccauagggcaugaucaacaccgcaaccuuuccuuuuucccccagugauucugaaaaaccccucuucccuucagcuugcuuagauguuccaaauuuaguaagcuuaaggcggccuacagaagaaaaagaaaaaaaaggccacaaaaguucccucucacuuucaguaaauaaaauaaaagcagcaacagaaauaaagaaauaaaugaaauucaaaaugaaauaaauauuguguugugcagcauuaaaaaaucaauaaaaauuaaaaaugagcaagaucuaaaaaaaaaaaaaaaaaaaaaaaaaaaaaaaaaaaaaaaaaaaaaaaaaaaaaaaaaaaaaaaaugcaucccccccccccccccccccccccccccccccaaaggcucuuuucagagccaccagaauu

SEQ ID NO: 10859 - RNA, 1311 nt, Artificial Sequence
  mRNA product Design f-1 comprising derived and/or modified sequence from HRSV(A2)__P03421.1__P (opt5)
gggagagcggcucggccauuuugucccagucaguccggaggcugcggcugcagaaguaccgccugcggaguaacugcaaagaagcuuaccauggagaaguucgcccccgaauuucacggcgaggacgcuaacaauagagccaccaaauuccuggaaagcaucaaggggaaauuuacauccccuaaggauccgaaaaagaaggacucuauuaucagcgugaacuccauugauaucgaggucacgaaagaaucucccauuaccagcaauuccacaaucaucaacccuaccaaugagacagacgauaccgcgggaaacaagcccaauuaccagcggaaaccucucguuucuuucaaggaggaccccacaccuagcgauaacccguuuuccaaacuguauaaggaaaccauugagacguucgacaauaacgaagaggagagcucuuacuccuaugaagagaucaaugaucaaaccaacgacaauauuacagcucgccuugauagaaucgacgaaaagcugagcgagauucucggcaugcugcauacccuugugguggccucugccgggcccacauccgcucgggauggaauccgcgacgccaugauuggccugagagaagagaugaucgagaaaauccggaccgaagcucucaugacgaacgaccgccuggaggccauggcgagacugcggaaugaagagagcgaaaagauggccaaagauacaucugacgaggucucccucaacccuaccagcgagaagcugaacaaucuucuggaagggaacgauuccgacaaugaucucucucuggaggacuuuugaggacuagugaagggaacacccaaauuuaauucagccuuaagcacaauuaauuaagagugaaacguaauuguacaagcaguuggucacccaccauagggcaugaucaacaccgcaaccuuuccuuuuucccccagugauucugaaaaaccccucuucccuucagcuugcuuagauguuccaaauuuaguaagcuuaaggcggccuacagaagaaaaagaaaaaaaaggccacaaaaguucccucucacuuucaguaaauaaaauaaaagcagcaacagaaauaaagaaauaaaugaaauucaaaaugaaauaaauauuguguugugcagcauuaaaaaaucaauaaaaauuaaaaaugagcaagaucuaaaaaaaaaaaaaaaaaaaaaaaaaaaaaaaaaaaaaaaaaaaaaaaaaaaaaaaaaaaaaaaaugcaucccccccccccccccccccccccccccccccaaaggcucuuuucagagccaccagaauu

SEQ ID NO: 10860 - RNA, 1311 nt, Artificial Sequence
  mRNA product Design f-1 comprising derived and/or modified sequence from HRSV(A2)__P03421.1__P (opt6)
gggagagcggcucggccauuuugucccagucaguccggaggcugcggcugcagaaguaccgccugcggaguaacugcaaagaagcuuaccauggaaaaauucgcaccagaauuucacggagaagacgcaaacaacagagcaacaaaauucuuagaaucaaucaaaggaaaauucacaagcccaaaagacccaaaaaaaaaagacucaauaauaagcguaaacucaauagacauagaaguaacaaaagaaagcccaauaacaagcaacagcacaauaauaaacccaacaaacgaaacagaugacacagcuggaaauaaaccaaacuaccaaagaaaaccccuagucagcuucaaagaagaccccacaccaucagacaacccauucagcaaacuauauaaagaaacaauagaaacauuugacaacaacgaagaagaaucaucauacucauacgaagaaauaaacgaccaaacaaacgacaacauaaccgcaagauuagacagaauagaugaaaaacuaucagaaauacuaggaaugcuacacacauuaguaguagcaagcgcaggaccaacaucagcaagagacggaauaagagacgcaaugauaggacucagagaagaaaugauagaaaaaauaagaacagaagcacuaaugacaaacgacagauuagaagcaauggcaagacuaagaaaugaagaaucggaaaaaauggcaaaagacacaucagacgaaguaagccuaaacccaacaucagaaaaauuaaauaaccuacuagaaggaaacgacagcgacaacgacuuaucacuagaagacuucuaaggacuagugaagggaacacccaaauuuaauucagccuuaagcacaauuaauuaagagugaaacguaauuguacaagcaguuggucacccaccauagggcaugaucaacaccgcaaccuuuccuuuuucccccagugauucugaaaaaccccucuucccuucagcuugcuuagauguuccaaauuuaguaagcuuaaggcggccuacagaagaaaaagaaaaaaaaggccacaaaaguucccucucacuuucaguaaauaaaauaaaagcagcaacagaaauaaagaaauaaaugaaauucaaaaugaaauaaauauuguguugugcagcauuaaaaaaucaauaaaaauuaaaaaugagcaagaucuaaaaaaaaaaaaaaaaaaaaaaaaaaaaaaaaaaaaaaaaaaaaaaaaaaaaaaaaaaaaaaaaugcaucccccccccccccccccccccccccccccccaaaggcucuuuucagagccaccagaauu

SEQ ID NO: 10861 - RNA, 1311 nt, Artificial Sequence
  mRNA product Design f-1 comprising derived and/or modified sequence from HRSV(A2)__P03421.1__P (opt11)
gggagagcggcucggccauuuugucccagucaguccggaggcugcggcugcagaaguaccgccugcggaguaacugcaaagaagcuuaccauggaaaaauucgcgcccgaguuccacggcgaggacgcgaacaaccgcgcgacaaaguuccuagaaucaaucaagggcaaauucacgagcccgaaagaccccaagaaaaaggacucaaucauaagcgugaacucgaucgacaucgaggucacgaaagagagcccgaucacaagcaacagcaccauaauaaacccgaccaacgaaacagacgacaccgcgggcaacaaaccgaacuaccaaagaaaaccgcucgugagcuucaaagaagacccgaccccaagcgacaacccguucucaaaacuauacaaggaaacgaucgagaccuucgacaacaacgaggaagagagcucguacucguacgaggaaauaaacgaccaaacaaacgacaacauaaccgcacgccuagacaggaucgacgaaaaacucucggaaauacucgggaugcuacacacgcucguggucgcgagcgcaggcccgaccucggccagggacggcaucagggacgcaaugauaggccugcgagaggaaaugaucgagaaaauacgcaccgaagcacucaugaccaacgacagacucgaagccauggccaggcucaggaacgaagaauccgaaaagauggcgaaagacaccucggacgaggucucgcucaaccccacgagcgagaaacugaacaaccuacuggaagggaacgacagcgacaacgaccuuucccucgaggacuucugaggacuagugaagggaacacccaaauuuaauucagccuuaagcacaauuaauuaagagugaaacguaauuguacaagcaguuggucacccaccauagggcaugaucaacaccgcaaccuuuccuuuuucccccagugauucugaaaaaccccucuucccuucagcuugcuuagauguuccaaauuuaguaagcuuaaggcggccuacagaagaaaaagaaaaaaaaggccacaaaaguucccucucacuuucaguaaauaaaauaaaagcagcaacagaaauaaagaaauaaaugaaauucaaaaugaaauaaauauuguguugugcagcauuaaaaaaucaauaaaaauuaaaaaugagcaagaucuaaaaaaaaaaaaaaaaaaaaaaaaaaaaaaaaaaaaaaaaaaaaaaaaaaaaaaaaaaaaaaaaugcaucccccccccccccccccccccccccccccccaaaggcucuuuucagagccaccagaauu

SEQ ID NO: 10862 - RNA, 1091 nt, Artificial Sequence
  mRNA product Design f-2 comprising derived and/or modified sequence from HRSV(A2)__P03421.1__P (wt)
gggagagcggcucggccauuuugucccagucaguccggaggcugcggcugcagaaguaccgccugcggaguaacugcaaagaagcuuaccauggaaaaguuugcuccugaauuccauggagaagaugcaaacaacagggcuacuaaauuccuagaaucaauaaagggcaaauucacaucacccaaagaucccaagaaaaaagauaguaucauaucugucaacucaauagauauagaaguaaccaaagaaagcccuauaacaucaaauucaacuauuaucaacccaacaaaugagacagaugauacugcagggaacaagcccaauuaucaaagaaaaccucuaguaaguuucaaagaagacccuacaccaagugauaaucccuuuucuaaacuauacaaagaaaccauagaaacauuugauaacaaugaagaagaauccagcuauucauacgaagaaauaaaugaucagacaaacgauaauauaacagcaagauuagauaggauugaugaaaaauuaagugaaauacuaggaaugcuucacacauuaguaguggcaagugcaggaccuacaucugcucgggaugguauaagagaugccaugauugguuuaagagaagaaaugauagaaaaaaucagaacugaagcauuaaugaccaaugacagauuagaagcuauggcaagacucaggaaugaggaaagugaaaagauggcaaaagacacaucagaugaagugucucucaauccaacaucagagaaauugaacaaccuauuggaagggaaugauagugacaaugaucuaucacuugaagauuucugaggacuaguggaagcauuuuccuggcugauuaaaagaaauuacucagcuauggucaucuguuccuguuagaaggcuaugcagcauauuauauacuaugcgcauguuaugaaaugcauaauaaaaaauuuuaaaaaaucuaaaagaucuaaaaaaaaaaaaaaaaaaaaaaaaaaaaaaaaaaaaaaaaaaaaaaaaaaaaaaaaaaaaaaaaugcaucccccccccccccccccccccccccccccccaaaggcucuuuucagagccaccagaauu

SEQ ID NO: 10863 - RNA, 1091 nt, Artificial Sequence
  mRNA product Design f-2 comprising derived and/or modified sequence from HRSV(A2)__P03421.1__P (opt1)
gggagagcggcucggccauuuugucccagucaguccggaggcugcggcugcagaaguaccgccugcggaguaacugcaaagaagcuuaccauggagaaguucgcccccgaguuccacggcgaggacgccaacaaccgcgcgaccaaguuccuggagagcaucaaggggaaguucaccuccccgaaggaccccaagaagaaggacagcaucaucuccgugaacagcaucgacaucgaggucacgaaggagucccccaucaccagcaacuccaccaucaucaaccccaccaacgagacggacgacaccgccggcaacaagccgaacuaccagcggaagccccucgugagcuucaaggaggaccccacccccuccgacaacccguucagcaagcuguacaaggagaccaucgagacguucgacaacaacgaggaggaguccagcuacuccuacgaggagaucaacgaccagaccaacgacaacaucaccgcccgccuggaccggaucgacgagaagcucagcgagauccuggggaugcugcacacccucguggucgccuccgccggccccacgagcgcgcgcgacgggauccgggacgccaugaucggccugcgcgaggagaugaucgagaagauccggaccgaggcccugaugaccaacgaccgccucgaggccauggcgcggcugcgcaacgaggaguccgagaagauggccaaggacaccagcgacgaggugucccugaaccccacgagcgagaagcucaacaaccugcuggagggcaacgacagcgacaacgaccucucccuggaggacuucugaggacuaguggaagcauuuuccuggcugauuaaaagaaauuacucagcuauggucaucuguuccuguuagaaggcuaugcagcauauuauauacuaugcgcauguuaugaaaugcauaauaaaaaauuuuaaaaaaucuaaaagaucuaaaaaaaaaaaaaaaaaaaaaaaaaaaaaaaaaaaaaaaaaaaaaaaaaaaaaaaaaaaaaaaaugcaucccccccccccccccccccccccccccccccaaaggcucuuuucagagccaccagaauu

SEQ ID NO: 10864 - RNA, 1091 nt, Artificial Sequence
  mRNA product Design f-2 comprising derived and/or modified sequence from HRSV(A2)__P03421.1__P (opt2)
gggagagcggcucggccauuuugucccagucaguccggaggcugcggcugcagaaguaccgccugcggaguaacugcaaagaagcuuaccauggagaaguucgcccccgaguuccacggcgaggacgccaacaaccgcgccaccaaguuccucgaguccaucaagggcaaguucaccucccccaaggaccccaagaagaaggacuccaucaucuccgucaacuccaucgacaucgaggucaccaaggagucccccaucaccuccaacuccaccaucaucaaccccaccaacgagaccgacgacaccgccggcaacaagcccaacuaccagcgcaagccccucgucuccuucaaggaggaccccacccccuccgacaaccccuucuccaagcucuacaaggagaccaucgagaccuucgacaacaacgaggaggaguccuccuacuccuacgaggagaucaacgaccagaccaacgacaacaucaccgcccgccucgaccgcaucgacgagaagcucuccgagauccucggcaugcuccacacccucgucgucgccuccgccggccccaccuccgcccgcgacggcauccgcgacgccaugaucggccuccgcgaggagaugaucgagaagauccgcaccgaggcccucaugaccaacgaccgccucgaggccauggcccgccuccgcaacgaggaguccgagaagauggccaaggacaccuccgacgaggucucccucaaccccaccuccgagaagcucaacaaccuccucgagggcaacgacuccgacaacgaccucucccucgaggacuucugaggacuaguggaagcauuuuccuggcugauuaaaagaaauuacucagcuauggucaucuguuccuguuagaaggcuaugcagcauauuauauacuaugcgcauguuaugaaaugcauaauaaaaaauuuuaaaaaaucuaaaagaucuaaaaaaaaaaaaaaaaaaaaaaaaaaaaaaaaaaaaaaaaaaaaaaaaaaaaaaaaaaaaaaaaugcaucccccccccccccccccccccccccccccccaaaggcucuuuucagagccaccagaauu

SEQ ID NO: 10865 - RNA, 1091 nt, Artificial Sequence
  mRNA product Design f-2 comprising derived and/or modified sequence from HRSV(A2)__P03421.1__P (opt3)
gggagagcggcucggccauuuugucccagucaguccggaggcugcggcugcagaaguaccgccugcggaguaacugcaaagaagcuuaccauggagaaguucgcccccgaauuucacggcgaggacgcuaacaauagagcaaccaaauuccuggaaagcaucaaggggaaauuuacauccccuaaggauccgaaaaagaaggacucuauuauaucagugaacaguaucgauauugaggucacuaaagaaagcccaaucacguccaauucuaccauuaucaaccccacaaaugagacugacgauaccgccggaaacaagccuaauuaccagaggaaaccacucguuucguucaaggaggaccccacaccuucagauaacccauuuagcaaacuuuauaaggaaaccauagagacuuucgacaauaacgaagaggagaguuccuacucuuaugaagagaucaaugaucaaacaaacgacaauauuaccgcgcggcuggaucgcaucgacgaaaaguugagcgagauuuuagguaugcugcauacgcuagugguagcuuccgccggccccacuucagcacgagaugggauccgugacgccaugauaggacucagagaagagaugauugagaaaaucaggaccgaagcucugaugacaaacgaccggcuugaggcaauggcccgccugagaaaugaagagagugaaaagauggcuaaagauacuagcgacgaggugucuuugaacccuaccuccgagaagcucaacaaucugcuggaaggcaacgauucagacaaugaucucagcuuagaggacuuuugaggacuaguggaagcauuuuccuggcugauuaaaagaaauuacucagcuauggucaucuguuccuguuagaaggcuaugcagcauauuauauacuaugcgcauguuaugaaaugcauaauaaaaaauuuuaaaaaaucuaaaagaucuaaaaaaaaaaaaaaaaaaaaaaaaaaaaaaaaaaaaaaaaaaaaaaaaaaaaaaaaaaaaaaaaugcaucccccccccccccccccccccccccccccccaaaggcucuuuucagagccaccagaauu

SEQ ID NO: 10866 - RNA, 1091 nt, Artificial Sequence
  mRNA product Design f-2 comprising derived and/or modified sequence from HRSV(A2)__P03421.1__P (opt4)
gggagagcggcucggccauuuugucccagucaguccggaggcugcggcugcagaaguaccgccugcggaguaacugcaaagaagcuuaccauggagaaguucgcccccgaguuccacggcgaggacgccaacaacagagccaccaaguuccuggagagcaucaagggcaaguucaccagccccaaggaccccaagaagaaggacagcaucaucagcgugaacagcaucgacaucgaggugaccaaggagagccccaucaccagcaacagcaccaucaucaaccccaccaacgagaccgacgacaccgccggcaacaagcccaacuaccagagaaagccccuggugagcuucaaggaggaccccacccccagcgacaaccccuucagcaagcuguacaaggagaccaucgagaccuucgacaacaacgaggaggagagcagcuacagcuacgaggagaucaacgaccagaccaacgacaacaucaccgccagacuggacagaaucgacgagaagcugagcgagauccugggcaugcugcacacccuggugguggccagcgccggccccaccagcgccagagacggcaucagagacgccaugaucggccugagagaggagaugaucgagaagaucagaaccgaggcccugaugaccaacgacagacuggaggccauggccagacugagaaacgaggagagcgagaagauggccaaggacaccagcgacgaggugagccugaaccccaccagcgagaagcugaacaaccugcuggagggcaacgacagcgacaacgaccugagccuggaggacuucugaggacuaguggaagcauuuuccuggcugauuaaaagaaauuacucagcuauggucaucuguuccuguuagaaggcuaugcagcauauuauauacuaugcgcauguuaugaaaugcauaauaaaaaauuuuaaaaaaucuaaaagaucuaaaaaaaaaaaaaaaaaaaaaaaaaaaaaaaaaaaaaaaaaaaaaaaaaaaaaaaaaaaaaaaaugcaucccccccccccccccccccccccccccccccaaaggcucuuuucagagccaccagaauu

SEQ ID NO: 10867 - RNA, 1091 nt, Artificial Sequence
  mRNA product Design f-2 comprising derived and/or modified sequence from HRSV(A2)__P03421.1__P (opt5)
gggagagcggcucggccauuuugucccagucaguccggaggcugcggcugcagaaguaccgccugcggaguaacugcaaagaagcuuaccauggagaaguucgcccccgaauuucacggcgaggacgcuaacaauagagccaccaaauuccuggaaagcaucaaggggaaauuuacauccccuaaggauccgaaaaagaaggacucuauuaucagcgugaacuccauugauaucgaggucacgaaagaaucucccauuaccagcaauuccacaaucaucaacccuaccaaugagacagacgauaccgcgggaaacaagcccaauuaccagcggaaaccucucguuucuuucaaggaggaccccacaccuagcgauaacccguuuuccaaacuguauaaggaaaccauugagacguucgacaauaacgaagaggagagcucuuacuccuaugaagagaucaaugaucaaaccaacgacaauauuacagcucgccuugauagaaucgacgaaaagcugagcgagauucucggcaugcugcauacccuugugguggccucugccgggcccacauccgcucgggauggaauccgcgacgccaugauuggccugagagaagagaugaucgagaaaauccggaccgaagcucucaugacgaacgaccgccuggaggccauggcgagacugcggaaugaagagagcgaaaagauggccaaagauacaucugacgaggucucccucaacccuaccagcgagaagcugaacaaucuucuggaagggaacgauuccgacaaugaucucucucuggaggacuuuugaggacuaguggaagcauuuuccuggcugauuaaaagaaauuacucagcuauggucaucuguuccuguuagaaggcuaugcagcauauuauauacuaugcgcauguuaugaaaugcauaauaaaaaauuuuaaaaaaucuaaaagaucuaaaaaaaaaaaaaaaaaaaaaaaaaaaaaaaaaaaaaaaaaaaaaaaaaaaaaaaaaaaaaaaaugcaucccccccccccccccccccccccccccccccaaaggcucuuuucagagccaccagaauu

SEQ ID NO: 10868 - RNA, 1091 nt, Artificial Sequence
  mRNA product Design f-2 comprising derived and/or modified sequence from HRSV(A2)__P03421.1__P (opt6)
gggagagcggcucggccauuuugucccagucaguccggaggcugcggcugcagaaguaccgccugcggaguaacugcaaagaagcuuaccauggaaaaauucgcaccagaauuucacggagaagacgcaaacaacagagcaacaaaauucuuagaaucaaucaaaggaaaauucacaagcccaaaagacccaaaaaaaaaagacucaauaauaagcguaaacucaauagacauagaaguaacaaaagaaagcccaauaacaagcaacagcacaauaauaaacccaacaaacgaaacagaugacacagcuggaaauaaaccaaacuaccaaagaaaaccccuagucagcuucaaagaagaccccacaccaucagacaacccauucagcaaacuauauaaagaaacaauagaaacauuugacaacaacgaagaagaaucaucauacucauacgaagaaauaaacgaccaaacaaacgacaacauaaccgcaagauuagacagaauagaugaaaaacuaucagaaauacuaggaaugcuacacacauuaguaguagcaagcgcaggaccaacaucagcaagagacggaauaagagacgcaaugauaggacucagagaagaaaugauagaaaaaauaagaacagaagcacuaaugacaaacgacagauuagaagcaauggcaagacuaagaaaugaagaaucggaaaaaauggcaaaagacacaucagacgaaguaagccuaaacccaacaucagaaaaauuaaauaaccuacuagaaggaaacgacagcgacaacgacuuaucacuagaagacuucuaaggacuaguggaagcauuuuccuggcugauuaaaagaaauuacucagcuauggucaucuguuccuguuagaaggcuaugcagcauauuauauacuaugcgcauguuaugaaaugcauaauaaaaaauuuuaaaaaaucuaaaagaucuaaaaaaaaaaaaaaaaaaaaaaaaaaaaaaaaaaaaaaaaaaaaaaaaaaaaaaaaaaaaaaaaugcaucccccccccccccccccccccccccccccccaaaggcucuuuucagagccaccagaauu

SEQ ID NO: 10869 - RNA, 1091 nt, Artificial Sequence
  mRNA product Design f-2 comprising derived and/or modified sequence from HRSV(A2)__P03421.1__P (opt11)
gggagagcggcucggccauuuugucccagucaguccggaggcugcggcugcagaaguaccgccugcggaguaacugcaaagaagcuuaccauggaaaaauucgcgcccgaguuccacggcgaggacgcgaacaaccgcgcgacaaaguuccuagaaucaaucaagggcaaauucacgagcccgaaagaccccaagaaaaaggacucaaucauaagcgugaacucgaucgacaucgaggucacgaaagagagcccgaucacaagcaacagcaccauaauaaacccgaccaacgaaacagacgacaccgcgggcaacaaaccgaacuaccaaagaaaaccgcucgugagcuucaaagaagacccgaccccaagcgacaacccguucucaaaacuauacaaggaaacgaucgagaccuucgacaacaacgaggaagagagcucguacucguacgaggaaauaaacgaccaaacaaacgacaacauaaccgcacgccuagacaggaucgacgaaaaacucucggaaauacucgggaugcuacacacgcucguggucgcgagcgcaggcccgaccucggccagggacggcaucagggacgcaaugauaggccugcgagaggaaaugaucgagaaaauacgcaccgaagcacucaugaccaacgacagacucgaagccauggccaggcucaggaacgaagaauccgaaaagauggcgaaagacaccucggacgaggucucgcucaaccccacgagcgagaaacugaacaaccuacuggaagggaacgacagcgacaacgaccuuucccucgaggacuucugaggacuaguggaagcauuuuccuggcugauuaaaagaaauuacucagcuauggucaucuguuccuguuagaaggcuaugcagcauauuauauacuaugcgcauguuaugaaaugcauaauaaaaaauuuuaaaaaaucuaaaagaucuaaaaaaaaaaaaaaaaaaaaaaaaaaaaaaaaaaaaaaaaaaaaaaaaaaaaaaaaaaaaaaaaugcaucccccccccccccccccccccccccccccccaaaggcucuuuucagagccaccagaauu

SEQ ID NO: 10870 - RNA, 1082 nt, Artificial Sequence
  mRNA product Design f-3 comprising derived and/or modified sequence from HRSV(A2)__P03421.1__P (wt)
gggagagucccgcagucggcguccagcggcucugcuuguucgugugugugucguugcaggccuuauucaagcuuaccauggaaaaguuugcuccugaauuccauggagaagaugcaaacaacagggcuacuaaauuccuagaaucaauaaagggcaaauucacaucacccaaagaucccaagaaaaaagauaguaucauaucugucaacucaauagauauagaaguaaccaaagaaagcccuauaacaucaaauucaacuauuaucaacccaacaaaugagacagaugauacugcagggaacaagcccaauuaucaaagaaaaccucuaguaaguuucaaagaagacccuacaccaagugauaaucccuuuucuaaacuauacaaagaaaccauagaaacauuugauaacaaugaagaagaauccagcuauucauacgaagaaauaaaugaucagacaaacgauaauauaacagcaagauuagauaggauugaugaaaaauuaagugaaauacuaggaaugcuucacacauuaguaguggcaagugcaggaccuacaucugcucgggaugguauaagagaugccaugauugguuuaagagaagaaaugauagaaaaaaucagaacugaagcauuaaugaccaaugacagauuagaagcuauggcaagacucaggaaugaggaaagugaaaagauggcaaaagacacaucagaugaagugucucucaauccaacaucagagaaauugaacaaccuauuggaagggaaugauagugacaaugaucuaucacuugaagauuucugaggacuaguacuggcugcaucucccuuuccucuguccuccauccuucucccaggauggugaagggggaccugguacccagugauccccaccccaggauccuaaaucaugacuuaccugcuaauaaaaacucauuggaaaagugagaagaucuaaaaaaaaaaaaaaaaaaaaaaaaaaaaaaaaaaaaaaaaaaaaaaaaaaaaaaaaaaaaaaaaugcaucccccccccccccccccccccccccccccccaaaggcucuuuucagagccaccagaauu

SEQ ID NO: 10871 - RNA, 1082 nt, Artificial Sequence
  mRNA product Design f-3 comprising derived and/or modified sequence from HRSV(A2)__P03421.1__P (opt1)
gggagagucccgcagucggcguccagcggcucugcuuguucgugugugugucguugcaggccuuauucaagcuuaccauggagaaguucgcccccgaguuccacggcgaggacgccaacaaccgcgcgaccaaguuccuggagagcaucaaggggaaguucaccuccccgaaggaccccaagaagaaggacagcaucaucuccgugaacagcaucgacaucgaggucacgaaggagucccccaucaccagcaacuccaccaucaucaaccccaccaacgagacggacgacaccgccggcaacaagccgaacuaccagcggaagccccucgugagcuucaaggaggaccccacccccuccgacaacccguucagcaagcuguacaaggagaccaucgagacguucgacaacaacgaggaggaguccagcuacuccuacgaggagaucaacgaccagaccaacgacaacaucaccgcccgccuggaccggaucgacgagaagcucagcgagauccuggggaugcugcacacccucguggucgccuccgccggccccacgagcgcgcgcgacgggauccgggacgccaugaucggccugcgcgaggagaugaucgagaagauccggaccgaggcccugaugaccaacgaccgccucgaggccauggcgcggcugcgcaacgaggaguccgagaagauggccaaggacaccagcgacgaggugucccugaaccccacgagcgagaagcucaacaaccugcuggagggcaacgacagcgacaacgaccucucccuggaggacuucugaggacuaguacuggcugcaucucccuuuccucuguccuccauccuucucccaggauggugaagggggaccugguacccagugauccccaccccaggauccuaaaucaugacuuaccugcuaauaaaaacucauuggaaaagugagaagaucuaaaaaaaaaaaaaaaaaaaaaaaaaaaaaaaaaaaaaaaaaaaaaaaaaaaaaaaaaaaaaaaaugcaucccccccccccccccccccccccccccccccaaaggcucuuuucagagccaccagaauu

SEQ ID NO: 10872 - RNA, 1082 nt, Artificial Sequence
  mRNA product Design f-3 comprising derived and/or modified sequence from HRSV(A2)__P03421.1__P (opt2)
gggagagucccgcagucggcguccagcggcucugcuuguucgugugugugucguugcaggccuuauucaagcuuaccauggagaaguucgcccccgaguuccacggcgaggacgccaacaaccgcgccaccaaguuccucgaguccaucaagggcaaguucaccucccccaaggaccccaagaagaaggacuccaucaucuccgucaacuccaucgacaucgaggucaccaaggagucccccaucaccuccaacuccaccaucaucaaccccaccaacgagaccgacgacaccgccggcaacaagcccaacuaccagcgcaagccccucgucuccuucaaggaggaccccacccccuccgacaaccccuucuccaagcucuacaaggagaccaucgagaccuucgacaacaacgaggaggaguccuccuacuccuacgaggagaucaacgaccagaccaacgacaacaucaccgcccgccucgaccgcaucgacgagaagcucuccgagauccucggcaugcuccacacccucgucgucgccuccgccggccccaccuccgcccgcgacggcauccgcgacgccaugaucggccuccgcgaggagaugaucgagaagauccgcaccgaggcccucaugaccaacgaccgccucgaggccauggcccgccuccgcaacgaggaguccgagaagauggccaaggacaccuccgacgaggucucccucaaccccaccuccgagaagcucaacaaccuccucgagggcaacgacuccgacaacgaccucucccucgaggacuucugaggacuaguacuggcugcaucucccuuuccucuguccuccauccuucucccaggauggugaagggggaccugguacccagugauccccaccccaggauccuaaaucaugacuuaccugcuaauaaaaacucauuggaaaagugagaagaucuaaaaaaaaaaaaaaaaaaaaaaaaaaaaaaaaaaaaaaaaaaaaaaaaaaaaaaaaaaaaaaaaugcaucccccccccccccccccccccccccccccccaaaggcucuuuucagagccaccagaauu

SEQ ID NO: 10873 - RNA, 1082 nt, Artificial Sequence
  mRNA product Design f-3 comprising derived and/or modified sequence from HRSV(A2)__P03421.1__P (opt3)
gggagagucccgcagucggcguccagcggcucugcuuguucgugugugugucguugcaggccuuauucaagcuuaccauggagaaguucgcccccgaauuucacggcgaggacgcuaacaauagagcaaccaaauuccuggaaagcaucaaggggaaauuuacauccccuaaggauccgaaaaagaaggacucuauuauaucagugaacaguaucgauauugaggucacuaaagaaagcccaaucacguccaauucuaccauuaucaaccccacaaaugagacugacgauaccgccggaaacaagccuaauuaccagaggaaaccacucguuucguucaaggaggaccccacaccuucagauaacccauuuagcaaacuuuauaaggaaaccauagagacuuucgacaauaacgaagaggagaguuccuacucuuaugaagagaucaaugaucaaacaaacgacaauauuaccgcgcggcuggaucgcaucgacgaaaaguugagcgagauuuuagguaugcugcauacgcuagugguagcuuccgccggccccacuucagcacgagaugggauccgugacgccaugauaggacucagagaagagaugauugagaaaaucaggaccgaagcucugaugacaaacgaccggcuugaggcaauggcccgccugagaaaugaagagagugaaaagauggcuaaagauacuagcgacgaggugucuuugaacccuaccuccgagaagcucaacaaucugcuggaaggcaacgauucagacaaugaucucagcuuagaggacuuuugaggacuaguacuggcugcaucucccuuuccucuguccuccauccuucucccaggauggugaagggggaccugguacccagugauccccaccccaggauccuaaaucaugacuuaccugcuaauaaaaacucauuggaaaagugagaagaucuaaaaaaaaaaaaaaaaaaaaaaaaaaaaaaaaaaaaaaaaaaaaaaaaaaaaaaaaaaaaaaaaugcaucccccccccccccccccccccccccccccccaaaggcucuuuucagagccaccagaauu
